United States Patent Application Publication US 2007/0054278 A1 - sequence listing, part 95

SEQ ID NO: 97237 - DNA, 23922 bp, Homo sapiens
  misc_feature (1)...(23922): n = A,T,C or G
ggaaacttgagtatttcacagatttagttttgaattagatcaaactgtgaaaacctctcctttccttccccagccctcacataacttcataactttctaacatattcacctgaaattaaggggtttttttttagttgttggtttttaaaaattcatgttgacttttcttaatacatgtttattttagaaaatatagataagcaaaaaggaaaagaccacccataaccccattgcccgtgagttatcactctgaacagcttggtgcattcccttcaagattttttccacctacgtatatatgtataaatgtattacaacaatatgaaataataggtattactgtaacatgagtgttttctcttaatatctaatcaacattgtttctcattaatctacagttataaaatggctgcctggtgttccatgattcatttccctagtgttgggaatgttatgcccccaccccacttttcattttgttatttgctattataaataatgttgcagtgagctgagatctgcaaatgaactagagagtggagagcagagtattctaaagatgtggagacagcatgatgctgagaaagagaaacccagagaggctcttgctgctgaagtatagacagtggggatggaaatgtatgtagggccagactatacagtcctcataggctacatgatttggcttattatcctaaggccattgggaatatgtaaaagttcaagcagggggcacagtgaactgactggggttttacaaagatccatggctgtagtgtagagcaggaatctgaaatctacagtccctggctaaattcagtctgccattcttggatacagcctgagaacaattttcacattttcaagtagttttttttaagtgaaaggaataatattttgtgatgtgaaaagttacctgaaaatcatctcagtgttataaagttttattggaacacagtcacactaatgtgtttacacattatctgtgctacaactgccaaagttgagtatttgtgatagagaccacctagccggccaagcctaagatatttactatctgtgcctttacagaagtttgctgatcactagcatagaggatgcttgagggaaaggcaagtatgggtgtgagcaagttctctcctcctgcatccattctctgtcctccccttggaccgacatcagtcagacatgccctccagcttcaggttctgtttagtcgatagaagagggagagaatgggatattcctgctatctcagcaccatttggctgatgcactggccctctgcatcatcaggggagcccctggagctccagtcttctcacactgtaataacatgtccttctctttgtctcttcagtcttagggatgataacggtttgctagtccctgggtgcctcaacccccttgttgttttccttgtccattctgtaaaacttttaattatcttcaaaactctagattgtcttctgttccctttgaggaccagattgatagaaagtccagatgaaatatattggttgctgggaggggatgaggggacctaagggaggtggtggtgagggaaagtgaagaggacatatttgagagatgcataggagataaaatggagaggacttggtgatagagttggaaagtaaggcagggggaggtatttgttgaccctggtttctgggttttgtatcttggcagatggtgggagaggtccacatttagtaaggaagcttatgaactcatttctctccaacattttattatgaaaaaaatgcaaaccaggaaagtcatttttggatttgttaaattagggagtactttggcgtcatccaagaaaagatgtcaagttagctactgtatagttgagtctggagcgtggcaaagatgtgtgggctgcaaatacacctttctgagttgcctgtggcttccgaacttgctctcaaattacttcctcaagaaagcttctctatcctgcccctgcaaactagctgtgtgccccatgcttctacgtagtagcatcgtttctcacaattataaacttgtgtttagttatgtaatgtctgtcttcctaagtataatttaatctctctaaaagcagggacttcaccttgttcagagcagtatccccagtgcctagcacaatccttgcacttgtaggaatttctgaattatttgttgaataaaccaatgaatcaactattgtttggactgctttggtgcattggggctgacagctacttgaatgtccgaggctcgggattatccaggactagccctttgagcttggtccggaggtttagtccttctagtatcatggatacacaactctgcttgtctatccagtctttcataattcagcacattgaaccaattactttgccaattggctcacctctgaagtgtgaaagtctctgttcaggtttgaccatgttccagtttataggaaatgaccaaagttgaaagtatatgaagatctaaactaaaaacaccgatttatggccaggatctaagattcaaaaagtaagaggctgtggataagaagtcacatgttgggagcgtgagctcagttctgcttggaaagatctgagagactgtgctgttgtctttcctcaagccatttagtgctctctggggctattttgaacccaaaggttcttggccttttgagataatatacaactttgagaaattgctcaaagccttataattttttcttcagaaaaatgctaatgagcacattttggagacatgattacatatataatgttatcagaggcactcaggagcctctccaaggatttcaggttaagattcctattctaacctaattcaaaaccagccttccacattggggtgtccagctccttctgttgcagggccctggtgatcctggaagtagttggttaactagggatggtaggtccctgatggaatagcatcaaggagaggaagggcatggagcatagagaaaatggaattgggccataatctttgcatttcccactgaagcttatatatctgcagtcttcactttaatcaaaatagcttaatttaggaaagaaagagcccactgtttttgctttataaaatcctgattttattgcttcctgaaattttttttaaaggagaaatacaaaccatacgttgcaagggccttcgtttgacagtttaactggggtcatgctaggactgtatagatattgctgattatgataggaaagccagtgggatgggtctgacaaggatctgttggcagcaagaatcaagggaccccctttggaatgatcccatcacaaggaagaaatggttggggacaatgtgtcatgtttgtgagtcagttgtgaattttaatacagcacaatgatggtcacttattgccctgcagaccctgaagacttctgcgtgacccaaagaaagaaacattaatagtgattaaaaaatgttaaaactttgttgtattaaaatatctgtaaggcagtgtagcagatgcaggtggcttcttattgtgatcatctatgacttcctggccgagagcctttttcctggagcaaaagaagcaagctgaggcaagctggaaaggcagaacattaattcacctggaagaagccctcagtcaacgacaggtggggattatccagtgatggatgaagagcttcctcacccttcgattgggataactctgagatgtgttctatgctgtctcccagagttccccagcagtattggagtacaggggtaactggctggataacacaccatttattagctttcttcccatcactataatatcttacttttcctatccctattccctgttcctgggatcgcctcctaaagaaactatttgcatgtaaatctctgtctcagggattatttcaggctgggggtgggaggaatcccatacctagacaggcactgaggatatatacaaggcatcataggtttggagtcagatctggattcaaattctttctcaccagtgacattgaacaacttaatttatctaagattgtttgttagagataatgacactgacctcataaggtcatattgtaaggaaaaatttgagaatgtataaagccgtgtacacagtggcttacacatggtaagtgcttaataaatgttgggtattatcattaatacagtatttataatattgttaatacagcatagcccaggtagagggcaaagcacaaagctgttttccatccttggggtgactgcagaagcaggttgatttggcagatgtgctgtagatactgtgtccctagtgagcagctgtggcatagcaatatcaatagcttagagcaagcattgccccagtgagccagggcaggagaggaggaaggtggtgcacaccaagtggtggctcaaaagatgagcaattggcagtgaacaatggtattgccaattgtgcttagtctcagtaagcacggatagctacagcaccaataacttcatgtctgtgtctagtatacacttgggtcgttggaatttcattagcctcactcttgagggattatgttcaaggctaccaagactaagtttctgatttcaacctgttttcccaaatgtacaagggactcttgcttttgttacatttatgaacctaatttgttattttaaggtctttcaaattggagctgtctcttctgtccccctttattccctatttgcagacaagaccatatttcagttctttggccacagtgaaagagaaactgagacaccaagaatctgaggcaggttaaaggatttcactcgttctctaatcctgattaattacagtgtcaggtttcacctgtagtgcttcagacttctcaaacagccttaggttccagagcagatagaaatgaggggccactcacatgtatacatatgtaacaaacctgcacgttgtacacatgtaccctagaacttaaagtataatttaaaaaataaagaaatgcggggccactttggctaggaaggcagacagcaggtagcattagttgttgcccatcccctgcaggtgcagcccactgctatgggggaagaatttgtttcagtctcttttattgcttcactcgagtcagaaatcaaggaccatggtaacatccaatcacaatctcctcttacctttagacactaatagacagatttctcctcaattgatgtagagagacatatgcatgtaacataacatgatttttgaccaaaagcaacttttaagaggggatagtattacaaatacaagggactgacccagcgaccttggcacacctgacattaagaaccagaatcacagtctattaatctcatctgtttccttcgagaaaggaaaatgtttaagaccttgtcagaaggtcttaggctcatgtaggggattttctctagtgggttccatgacatctgtatatggtttcagaaaaatccattgacattgacactttctggaatactgttagttcttctcaaggccatttgcatgaaagtaatgtatgttcatggcttttcttatgttagactgtgagctccttgaaggcagaattcagatattatttgtatctgctcagaagccagcatagttcctggaatgttgccatgtttagcaaaaaacaaaacaaaacatttgctgtttgtctgaaattcaaatttaactgggtgtcctgtattttttctggcaaccctattcctggcacatagctaacctcaataaatattgatgagtgagaggatgaatgaatgactaacacagtaccaacaaatggagaaataaactggtaaaaacttcaattgaccatataaaagacactcatctaaattatgcctaacaatcacagaacaacactgtgtctggttaacatactgctttttaaaatctgacagtctggctttaatgggaaatgcattttctatccatgctttgtcacccacttttactcagggtccatgtgggaagaatactaatctcctggtaatgaaggtgttttgttccaacaatttcacatcttaattccgcacatttctgatctcacatgtttgtttattagtgtgtaccagttgtacaagaaaattgattttaggtggtatatgggtttatcattctgaagtacaatcacctctgtatcttcctttaaaattgccaaaattgtgctgttactccagccaaaccctggggttttgggtaaagtcattcaccgtgattaaaccatcaggaccaattctgtttggataaaggtatatctgcagttagttcattgacagttaatcttaagaaagacaatatgcaaacaactctcatttcacattaattctgctgttgctcctttttctcttaactttgtttttctgagacagggtctggctctgtcstccaggctggagtaagtgatgcaatctcggctcactgcaacctctgcctcctgggctcaagccattctcccaattaactgatacagacacacaccaccacgcccagctaatttttgtatttttagtaaagatggggtttcaccatattgcccaggctggtcttgaactcctgagctcaagccattcacccaccctaggattacaggtgtgagccgccatgaccagccctcttttcctcttaactcttgacttgctgctcctcctctcatcctcctcctccacttctgttccactggtcatagctaagcatgagtcagagttactggaggggcttataaatacgcagattcctgggctccacccctaacagtttatgattccatgggtctagggtgtagcctgagattctgcatttctaacatgttctcaggtgccgctgccgctactgctagcctcagtagcactcaaagaattattgkcctatatcattcttttccttcctcttctccttccctttctccttttctttcagatcgatatttcatgtcctcacttttctgttcccagagcagtataatacaataatctcactctgtcttggccccatagatttgttttcctggtattctttcacctccaattggtaaaagttaacttacacttcctgttcaatgtagtttagcatcctgctgacatgtgatgcacagatctccccatccacttcggcaatatacgtgtagagaaactggaaggtgctgaatgggattcggggcaacccaccattgtggtcacatgataagacctcacacactatcttgagagttttggtaatagtctataaaagttacrtaaaatgaggagaaagttactcttccaggcaatattcctgagatccatttagatacaagaaagaaaacaaaaatattgctcttataaaatgaagtgggaacaatttaagattctagaaagcttgaaatttttacattcaaatgtcactaattcattctaaaaaatattgagtattgggtayctttatttttctttctttgttagaagactactcaaggaattaaatttataaattcctaaatactttaagatatttgttactttagtctgaataccctcactaaaggagggaagttgatttgcattctatataattagaattatttcttattaccctccaatcttatctctaaagggctgagataaatggtctagcctatatactccagcaagacacagtagaggagaagaaggtaagagaaggataatttccccaggaaaatagagtcccaggaagatactggaaaaaaggtcttgaacatcaagataaaccttcctccaaagcatctgggtccatctaaatagaatcacctagtgctttatttcattttacgtaatactaacccttttatygctggggaaatattggttgagaatgagtgccaggaattttaacagaagggttactacagaagcaaaccctccttacaatgaaacttgaacattaaaggagcatgctcagaactcatctcatgtctttaaataacccaccctttgaataaatgttacaagcaaaagagttgtgaaatgaagctcagcatacagatcttggtggtttactgaaactggtgatgtacggatcatcctgacacactcttccagggatcagtgaaagatcagtcctgagtggtgacttagggtgagtgaaaaagcagctgctgtatcttcccacatgattagtagaggagacttgtcctgccttagcagttgatgtctgctgttctcctctcatcctctcccagaacagaatgattgcctagatgaggcttctctaactgtggtatgtgttacccaggagcataagtctatgtcaggaggtactgaggatgtgaataaactcttccttgagtgatagttttacttgatggcaagtaatttaaacataatttataataattattaattttaattgagttaatatttaaaattygtttctttacatttagtaagcattgttattttatgaaacagaatcttcaataaaccacacgatgtcaaaaaaaaatgagtttgaggcaggccaccttcctttcctctcctctgtccctgggggtcctatcatggaaatcattgtgaaacactgcatcttctaggcacttccacttaattcagagcaggtgggagggcaggcatggggctaacaagtatatatgcggctatctgggaggatggtaagtcatgcttgtgagtgggagaatgctttggggtagatttgcaagcacactctgaactttataatttccacccacagctcacccgtttctgtaaaaaacaaacaaacaagcaaacaaaaacaaccctctgcacccctaatgctttgttctgttgccctctccatggggtggtggtatgggctgaattgttccccctaaaattcatatgtcaaagccttaaccccagaactggagaatgcaattgtatttgaacatacgacctttaaaaagataagttaaaatgaagtcagtagggtgtctttttaagaagaggagttaggacatagagagagccaccagacatgtaggcacagagggacacagttcgagaagctggccatttttaagccaaggagaaacgtctcagaagaaagcagtcctgctgacagcttgttcccagaacttctgtcctccagaactgagagacaacaaatttctgttgttcaagccaccaagtcatggcagccctaacaaactaacataggggctttcaactctaaacatcatcttttattgattattcaaacaataacccttcaaattctattgcctcgtaagatttttaaatatttttaaagatttaataaatggatgagtggataaataactgtactagagctatttggtaaactgacataaatctaaaggaaacagatcttcattctcttgcacaatatttttttggggatccacttcacagaggtagtctttaaacatcttgygagcttcattttcaaagtcagaggtgaaagccttgaaatgtgaataatttgctaaaaaaaagtcattctttccagtgaacatgattattttctacatacgtgatctcttccttttttaataatcagttcagtggaacaggaggtggcataggccagtccagaggaaggagtgctgaaggggggaggaatacaggtctgtgtgccatcgcattctgaataatgtgtattcgacgcagagagctcaagatggagtaaatgtacctattacctaccggagtaaaaattcctgttactagactcttctacaaggaacaaactggcttttctagatgacacagagatcctgtcttgccrttgaattcgcaaaggaaagagaaactctgggcttgcctctaaggatatatgaattaactaggatgcaaggtctccaccagatggtgacccctgacttagtctcagctataataaaataccttagactgggtaatttataacaacagaaatttattgctcacagttttggagtctgggaagtccaagaccaaggtgccagcagatttgctctctggtgagggcctgttcctcatgaatgatgccttctatgtgtcctcacttggtggaggggcaacttttataagggcactaatcccattcatgagggctccaccctcatgacctaatcaactcccagaggccctacttttaaggccatcatcttggaagttgagatttcaatatatgaattttgggaggacacaaacattcacactgtaccactgaccaaccccacatttaagatcccagaaacagtccagcatgatagaaatgaatataagggtattgattactggattcatagggcaccccttatttacagacttaacctccaggctgactttacctctaggggttctttgcacatggggatgatgaggagcaaagtcagatatgtcaaggcctcttagaattggaggagctcactgttattcagaggtaggcctgagggtgtctcagaggaagcagagaagtggggatagaatcacaggatgtcagaggtagatgaatctcatggaacattgaatcccacctccttgttttagaagggaagtagaaagatccaattcacctcatgatttcccctctctagtttgggaggcaggtacatcagaagaaacttagcatctacacggtgggctaagcagagggagggttggaatttgactttccaaagtcactctttgttactctgaggtatggggataagggaagggctcagacacatcacacactggtgaggggctgtgaagtagaccaccagagccagggagcagatagcacaccctggcggactcaaagaggcccttgacaccattgagaactgaaatgagccagctcgggaggcatcctcagactttcaccaatctgggagagacgagaccaaaaacttaagctgcargcagctagcgaccagacagayaggcattaccatggagaccagagatgccagagaagactgagggatgtgagaaacgactgctctgtggtcctctttccatctacattcaactgccatcttggagaagagagcgtggtgaggaaaaacctgagatactgggaaatgtacctttaggctgtttcagttactgcatcagactaaaatttcaggattggattgaatttatttattttcttatttgaccctttgtgggtggggtagacaagatcagaattaactgcagataaaattttaaaggtacattttcccccaaaacrtctccaaatgtggtgtgaaaaaaatctgtaaacctatgaaaatttaataaaatgtgttcatttttttatcttcccgtttgtgattttcccgtcctgattgacaactcataggcctctgctgcttactttcctttcctcctcagaggatagtgatttattcagtaataaatgctataaaggacaatgaagaaaaaaagccacaaatgtcctcttgttcacttctctttaaagcaatgataaacattgtaggggaagctataggaaaagttggactacaatatttctgctaaattttctcagaaacaaacgtgtcaaatatgcattccaagcatatttgagaagaacaagattatgtttagatatgctgaatgattcagactaccttttcataccatttgtttttggcagaggcaattattttctcaataattttcaaacttttatgtatctcagggattctttttaaaaaccatgtttttgattcattttattttaacaatgtttaacaatgtaagtccacatataagatacccaagctttaaatatctatacatataaactgatttcaacatctttggcttcaaaacagtaaaattgtttttccaatatcaaacaagtcaaatttggaaaaggcataaatctgtatgaacatcctgtatccatggagatgtcatgactaaattcagaaatagcctcatctctctttgtttttgctttcttatgtctgagttctgcatccaattctgtttattacatagttttctataagattgtaccccttttaaacagtgtctattgatatatattctaggtgtctggaagtctttttctacagtcggctcttggttgtctctgggaatatgaatggaaggagcrgagtgaaaataaatctgagggcaatattcataaataatccaagagctacactgtagtcaactctccccagagcctgaccacagtgtttccctctctcctcctcccaacccctgccactgcctgacgagcacagaaatgaccttgctttagagaggagaaggacaataggagaagaggcatgtttatcatcagccctgcagagttgaccgcgtgtatagatgcactgcccttccaggcccagagggagatttccccttcaggaacaaaaaacagtcaagctaacttacaactcccagagcgctgcaagcaagggctaaaaacttcagccactcgatctcctccgtgaagcgacccacattcatcacactattaaacagatctgttgggagattcaccactttccacatctgggccagctcctctgcacggatgatcagtctgccagcaacctgcagggcaggggacagacacaacacagaggttgtgggagaagttgagacaaggccctgagaaacaccctgtccccaggccaggtccacatctcccagcacatggcaaggggcgggagggggtgttaggaaggtaaagatggctctgtgtggcagttacctttgcaaatcctagtgaagagcatgctgaaatataatttattaattgtcaaactttaggtgtcagaattatgcaaaagatatacatttatattacattttaatttctggtgatgcttttatctgctattgtattcctaaattgttttattccttatatgacagatagaagagcctgaaaacaaaaccaaggggtagagggcttacctgagaccactaattaacggtaaaattagaacaagacataggtctgtttcttcccgattgcactgagttcttagctctagacctcaagtgcatccctcatgctttcccaggaatgatatggggtatgtggctgacccacggggatttgatctggctgcctaatgttacttgatcccaggtattttagagctctgtcatgttcactgcacaaggtgcttggtggacaaaaggagggaagatgactggttgttggccaccaatgcaacaagagcacagatgcccgatgaagtgctccaacacctttcctgactgtctgattctagtgaaatgctaagcctctgggaccaaggtggttagccaagccagtcctaaatcaccccaaaccgctctgtcctggatcataaagcagggtttggtggtgctcaaccatatttcctgggaattggccaaaccacaaactttctcaagccggaccctcctcatgcattcattcaccaggcagctcccaggatgatgtggctatgaagaggctcacagcctctccctaaaagctaaaagcaatgtctggacctgggataactggggagctaaaatatgcccttccccaaactgtgattggcatcatattatggtcttgatcagtaaggagacactgtcgagtgactgaggacctgcacttttctggagagacaagattagcattgcattgagcccctgtacattctgccagcttcaaggaaatctgggatgaccccaccaatgactcagcctgcagcctatttcaaaattattcccatttccccaagggaagatttactttcagtccacggtttagtgtattttagggtggkgctaagtggtcagctgactggcaggagaacagagggctttcgtctgtacccacccagcctcaacactgtccctacattctcctcaatgctgcagcagggcccttacctgagaatgcaggatctttaacagctcaggtgttagctctgcccagttacacaaagcgactcgctcrgaccgctctctcaccggaggcgtctctccacgggacagggcctcaaaataactacaagaaaaaaagtcagagagtaggaggatcctatacaccagtggcctctggctgttctagcaatccttcccccttcttctgagggaaggaggtagagaaaggaacctttgtaaagtggcttctatgtgtcattgtgtttagttcacttacatatgggaaaagtctgaatgtgttactctccacttagggcacagagaatgcttagagaatacaaagctttgttcttctctaaggatgaggaagaaccaagaannnnnnnnnnnnnnnnnnnncagtgcttttcatgtctggatagaatggagggggctcttaggtcatgccctcctttttcattgtggttaaactccaaactaagttttcatggatgtctaaaaaaattatagcacgtgatacaatacgagagcaagcagtctacaatagtggaatgcctcttccataaatgtcagggacaatactaagcaatgtcattttgcttactataaaacggcagcacaagaacaatcaaatgggtttgaaactaacgtataagataaagtctgtctatctgactatgccaaaataaattagtcttctgaagctaaagttcaatcttagaggcaatatataaaatttagaatggaaaactaaacagggcttattactaggcaaagcaacccccatttatgtttctttttatgagcaccactggcctattttccttccaattgtaaaagctgcatcctaatccagaccaggagcacaacactggctcagagactccgaaaggcccctcttaggtgccattttgtgtcttctcaaaggtgtccacactctccccaccatctgcccaggacacccactcacaacctcagcctgaggacatcttcccttccccaactcactggctttctctcaacggcctctctcactctcactttcccactgaaaccctcctaagcagggaatcatcaaacagtaaaaatagcctgaaaatggtccgtgaggtctagttatcttccaactcctgtctcaagtcctggttccccagtttcaagcaggcaagtttgtccaaggagcaatttcatagctgagaggctttctgtgcaaagctacttcaatccaggcccgcagcgattgttgtgtaagctccatctactgagcagcctctggaggtctctcctgaaagaaggcacccgtgtttgaggcacactgttttcagccatgcctgaggaccccatcactctgcctggcctttccccagaatgcagtgtgtactgtgaggacatcattatgttggcagaacaaatcagttcagagaaacaccaaagaaaataacaataatttcctcaaagatacaaagcctctttggttgggtccaagtatgagttttaacagcaggggaggaagtgtctccttaaaggagtgaactagcaggactggtcccaccccatccacccagggctgtcgcttccctcccccggctgcactgctgccatctagtggtgagacaggagaatgaagaaaggcagattaagctgcggagattcccagcccttctttccaccgagagtgggaaaaggcgtgcagggaggaggtgggtgtgcatacgctggtgtgacgcggtcatctaacttgctgcttgccccaggacacggcctattgacctggcgtcctactgctcaatctggctcgcttaggggaggcatcccatccttgcccggctagatgtagtatttatgtgtggattttaaagcatcaaagcaatgcaagagctaaaacaaagacgatgccagttagtcccgaccccctggctgcagccatgacaacctccgcggttttmcaggaccctctctccccgcccgtcctccaagagatgaaggcgagaaaggagcacgtactcggccccccactggatgaggtcctgcggctgcgcccgaatggcggctttggcaaactccttcagcattttcggcagctccggcgggatgcatgttggcttatctgtctgagccattgattggttgacctattctcaggagaaaaaatacataagatgaaaacttggactcataagatgagagcaatcctggacaggaggtcacccagcctctgtttgacactcaattttggggactccgcaagacaaatgcattctattgttacacaacggcaaggttagaaagccgtctgctaacccctactttttgttgtaaatagttatatcctttacgtaaaaattacacagtccttttttatttaaaaagtggaagtcaacaaaaaaatccctaatggtatcaccctaaaatattggatgtctccttccagaatttttcagtataaatatatatgtttgtaaaacaaaaaaataagattatgcaaaacagcttatttactcaaaagtatatcatgaacatctttgcatgtcatccagctcttattagctaggtaagaattgtagcaaaatttactctgaaccctctatgaattaacattaggttatttccatataaaaatagtcattaaacagccatttgatgagcgtctctgtttatagctgcatgttttttcaactctaattgtcaggcggaaaactcgtacattttctctcaaaaagttccaggacaaattgaaacaaaacatgaacatccataaaatatatacaattccatccacaaataaacaacagatcaaaagatttttttctgcttttagtagagaaagggacagactagatatgctaaaaagctgtccctcttcaaaacacctagaggccagacaaatctcagtacaagcctttcacattgccttgctgggcttgcagtgaagtgagagaaatcttccagtggccaatgaggtgaggaaaggggaacccgcagtgctgggcaaatgaagaaactagggctcacctgggcacatgtagatggcaggaacttgaagctttgagataaattgctaggcagggtggatagagaccaaggattaggctcacaaaaggcaaatgtctggactaaaggactccccttctgacctaaacttgagacccgcccagggactacaccctcagcgtgaaaaggtgtggctgaaaatatcygcctacaggctggggtaagcaacaaagaaacctgtctccattgctgcttctagtcaggagagaaacagtcccccaggagttggtagccacagactagttctaagttttccatttataccaacaccagcatggctcggaaatcccaagacaagaaactaaagtggtcttagattggtgggacttcatgaccttttactttatttatgttcttttatttggaggaaaaggatgataaaataatgattaattttagactttgcaaagtattagaaaagttttaacagtaataaccactaaatctgtacagaggaaaaaaggattttttaaaatttttttagtatttattgatcattcttgggtgtttctcggagaggggggaagaaaggaatttttwaaaaacacaaaaaagcaaacaaaacatgcctcccaatgtgaaatggcagcccaacgtatacctgccaagtgctgaagaatgtaggtcttaaaatagactgtatagtcttgtttcagggatttctcacttgtttttattggtatgggctaaacagggcttccatttcataaatgaaagtctccattacatgaatgaaaggctccagggcagaatctcagagggtttctatgagcggcttggaaccaagcacagacaactgcacatccctgtttgggttyggaattggaggtggtgggtttgggatgtggttactcttgtttggaatgcattctcctcctcttaacaggttgattcttcctttggaggtctgcttaaccttccctgattaccctgtcagttccattgtacatacccttccagagcatcacttacctatccttagtgtgattctttgagtaacatgtgtctcccccagcaaactccacggcaggactggtcagtttttgctcaccacaccatcccagtgcctagcccagtgcctggaacttagtgttcaataggtactagtaaaaatgaatgcgtgatagcagtctatgaagtgctagctataaaatgaacacgtgataggagtctatgaagtgctaggtataaaataatgcgtgataggagtctatgaagtgctaggtataaaataatatgtgataggagtctatgaagtgccaggtataaaataatgcctgacaggagtctatgaagtgctaggtataaaataatgtgtgataggagtctatgaagtgctaggtatgcccattggtccacatgacaattcacccagaggtatttttatatccctgtcgctgatgaaaaagcagaggtgtggctcctcggtggagggnnnnnnnnnnnnnnnnnnnnnnnnnnnnnnnnnnnnnnnnnnnnnnnnnnnnnnnnnnnnnnnnnnnnnnnnnnnnnnnnnnnnnnnnnnnnnnnnnnnnnnnnnnnnnnnnnnnnnnnnnnnnnnnnnnnnnnnnnnnnnnnnnnnnnnnnnnnnnnnnnnnnnnnnnnnnnnnnnnnnnnnnnnnnnnnnnnnnnnnnnnnnnnnnnnnnnnnnnnnnnnnnnnnnnnnnnnnnnnnnnnnnnnnnnnnnnnnnnnnnnnnnnnnnnnnnnnnnnnnnnnnnnnnnnnnnnnnnnnnnnnnnnnnnnnnnnnnnnnnnnnnnnnnnnnnnnnnnnnnnnnnnnnnnnnnnnnnnnnnnnnnnnnnnnnnnnnnnnnnnnnnnnnnnnnnnnnnnnnnnnnnnnnnnnnnnnnnnnnnnnnnnnnnnnnnnnnnnnnnnnnnnnnnnnnnnnnnnnnnnnnnnnnnnnnnnnnnnnnnnnnnnnnnnnnnnnnnnnnnnnnnnnnnnnnnnnnnnnnnnnnnnnnnnnnnnnnnnnnnnnnnnnnnnnnnnnnnnnnnnnnnnnnnnnnnnnnnnnnnnnnnnnnnnnnnnnnnnnnnnnnnnnnnnnnnnnnnnnnnnnnnnnnnnnnnnnnnnnnnnnnnnnnnnnnnnnnnnnnnnnnnnnnnnnnnnnnnnnnnnnnnnnnnnnnnnnnnnnnnnnnnnnnnnnnnnnnnnnnnnnnnnnnnnnnnnnnnnnnnnnnnnnnnnnnnnnnnnnnnnnnnnnnnnnnnnnnnnnnnnnnnnnnnnnnnnnnnnnnnnnnnnnnnnnnnnnnnnnnnnnnnnnnnnnnnnnnnnnnnnnnnnnnnnnnnnnnnnnnnnnnnnnnnnnnnnnnnnnnnnnnnnnnnnnnnnnnnnnnnnnnnnnnnnnnnnnnnnnnnnnnnnnnnnnnnnnnnnnnnnnnnnnnnnnnnnnnnnnnnnnnnnnnnnnnnnnnnnnnnnnnnnnnnnnnnnnnnnnnnnnnnnnnnnnnnnnnnnnnnnnnnnnnnnnnnnnnnnnnnnnnnnnnnnnnnnnnnnnnnnnnnnnnnnnnnnnnnnnnnnnnnnnnnnnnnnnnnnnnnnnnnnnnnnnnnnnnnnnnnnnnnnnnnnnnnnnnnnnnnnnnnnnnnnnnnnnnnnnnnnnnnnnnnnnnnnnnnnnnnnnnnnnnnnnnnnnnnnnnnnnnnnnnnnnnnnnnnnnnnnnnnnnnnnnnnnnnnnnnnnnnnnnnnnnnnnnnnnnnnnnnnnnnnnnnnnnnnnnnnnnnnnnnnnnnnnnnnnnnnnnnnnnnnnnnnnnnnnnnnnnnnnnnnnnnnnnnnnnnnnnnnnnnnnnnnnnnnnnnnnnnnnnnnnnnnnnnnnnnnnnnnnnnnnnnnnnnnnnnnnnnnnnnnnnnnnnnnnnnnnnnnnnnnnnnnnnnnnnnnnnnnnnnnnnnnnnnnnnnnnnnnnnnnnnnnnnnnnnnnnnnnnnnnnnnnnnnnnnnnnnnnnnnnnnnnnnnnnnnnnnnnnnnnnnnnnnnnnnnnnnnnnnnnnnnnnnnnnnnnnnnnnnnnnnnnnnnnnnnnnnnnnnnnnnnnnnnnnnnnnnnnnnnnnnnnnnnnnnnnnnnnnnnnnnnnnnnnnnnnnnnnnnnnnnnnnnnnnnnnnnnnnnnnnnnnnnnnnnnnnnnnnnnnnnnnnnnnnnnnnnnnnnnnnnnnnnnnnnnnnnnnnnnnnnnnnnnnnnnnnnnnnnnnnnnnnnnnnnnnnnnnnnnnnnnnnnnnnnnnnnnnnnnnnnnnnnnnnnnnnnnnnnnnnnnnnnnnnnnnnnnnnnnnnnnnnnnnnnnnnnnnnnnnnnnnnnnnnnnnnnnnnnnnnnnnnnnnnnnnnnnnnnnnnnnnnnnnnnnnnnnnnnnnnnnnnnnnnnnnnnnnnnnnnnnnnnnnnnnnnnnnnnnnnnnnnnnnnnnnnnnnnnnnnnnnnnnnnnnnnnnnnnnnnnnnnnnnnnnnnnnnnnnnnnnnnnnnnnnnnnnnnnnnnnnnnnnnnnnnnnnnnnnnnnnnnnnnnnnnnnnnnnnnnnnnnnnnnnnnnnnnnnnnnnnnnnnnnnnnnnnnnnnnnnnnnnnnnnnnnnnnnnnnnnnnnnnnnnnnnnnnnnnnnnnnnnnnnnnnnnnnnnnnnnnnnnnnnnnnnnnnnnnnnnnnnnnnnnnnnnnnnnnnnnnnnnnnnnnnnnnnnnnnnnnnnnnnnnnnnnnnnnnnnnnnnnnnnnnnnnnnnnnnnnnnnnnnnnnnnnnnnnnnnnnnnnnnnnnnnnnnnnnnnnnnnnnnnnnnnnnnnnnnnnnnnnnnnnnnnnnnnnnnnnnnnnnnnnnnnnnnnnnnnnnnnnnnnnnnnnnnnnnnnnnnnnnnnnnnnnnnnnnnnnnnnnnnnnnnnnnnnnnnnnnnnnnnnnnnnnnnnnnnnnnnnnnnnnnnnnnnnnnnnnnnnnnnnnnnnnnnnnnnnnnnnnnnnnnnnnnnnnnnnnnnnnnnnnnnnnnnnnnnnnnnnnnnnnnnnnnnnnnnnnnnnnnnnnnnnnnnnnnnnnnnnnnnnnnnnnnnnnnnnnnnnnnnnnnnnnnnnnnnnnnnnnnnnnnnnnnnnnnnnnnnnnnnnnnnnnnnnnnnnnnnnnnnnnnnnnnnnnnnnnnnnnnnnnnnnnnnnnnnnnnnnnnnnnnnnnnnnnnnnnnnnnnnnnnnnnnnnnnnnnnnnnnnnnnnnnnnnnnnnnnnnnnnnnnnnnnnnnnnnnnnnnnnnnnnnnnnnnnnnnnnnnnnnnnnnnnnnnnnnnnnnnnnnnnnnnnnnnnnnnnnnnnnnnnnnnnnnnnnnnnnnnnnnnnnnnnnnnnnnnnnnnnnnnnnnnnnnnnnnnnnnnnnnnnnnnnnnnnnnnnnnnnnnnnnnnnnnnnnnnnnnnnnnnnnnnnnnnnnnnnnnnnnnnnnnnnnnnnnnnnnnnnnnnnnnnnnnnnnnnnnnnnnnnnnnnnnnnnnnnnnnnnnnnnnnnnnnnnnnnnnnnnnnnnnnnnnnnnnnnnnnnnnnnnnnnnnnnnnnnnnnnnnnnnnnnnnnnnnnnnnnnnnnnnnnnnnnnnnnnnnnnnnnnnnnnnnnnnnnnnnnnnnnnnnnnnnnnnnnnnnnnnnnnnnnnnnnnnnnnnnnnnnnnnnnnnnnnnnnnnnnnnnnnnnnnnnnnnnnnnnnnnnnnnnnnnnnnnnnnnnnnnnnnnnnnnnnnnnnnnnnnnnnnnnnnnnnnnnnnnnnnnnnnnnnnnnnnnnnnnnnnnnnnnnnnnnnnnnnnnnnnnnnnnnnnnnnnnnnnnnnnnnnnnnnnnnnnnnnnnnnnnnnnnnnnnnnnnnnnnnnnnnnnnnnnnnnnnnnnnnnnnnnnnnnnnnnnnnnnnnnnnnnnnnnnnnnnnnnnnnnnnnnnnnnnnnnnnnnnnnnnnnnnnnnnnnnnnnnnnnnnnnnnnnnnnnnnnnnnnnnnnnnnnnnnnnnnnnnnnnnnnnnnnnnnnnnnnnnnnnnnnnnnnnnnnnnnnnnnnnnnnnnnnnnnnnnnnnnnnnnnnnnnnnnnnnnnnnnnnnnnnnnnnnnnnnnnnnnnnnnnnnnnnnnnnnnnnnnnnnnnnnnnnnnnnnnnnnnnnnnnnnnnnnnnnnnnnnnnnnnnnnnnnnnnnnnnnnnnnnnnnnnnnnnnnnnnnnnnnnnnnnnnnnnnnnnnnnnnnnnnnnnnnnnnnnnnnnnnnnnnnnnnnnnnnnnnnnnnnnnnnnnnnnnnnnnnnnnnnnnnnnnnnnnnnnnnnnnnnnnnnnnnnnnnnnnnnnnnnnnnnnnnnnnnnnnnnnnnnnnnnnnnnnnnnnnnnnnnnnnnnnnnnnnnnnnnnnnnnnnnnnnnnnnnnnnnnnnnnnnnnnnnnnnnnnnnnnnnnnnnnnnnnnnnnnnnnnnnnnnnnnnnnnnnnnnnnnnnnnnnnnnnnnnnnnnnnnnnnnnnnnnnnnnnnnnnnnnnnnnnnnnnnnnnnnnnnnnnnnnnnnnnnnnnnnnnnnnnnnnnnnnnnnnnnnnnnnnnnnnnnnnnnnnnnnnnnnnnnnnnnnnnnnnnnnnnnnnnnnnnnnnnnnnnnnnnnnnnnnnnnnnnnnnnnnnnnnnnnnnnnnnnnnnnnnnnnnnnnnnnnnnnnnnnnnnnnnnnnnnnnnnnnnnnnnnnnnnnnnnnnnnnnnnnnnnnnnnnnnnnnnnnnnnnnnnnnnnnnnnnnnnnnnnnnnnnnnnnnnnnnnnnnnnnnnnnnnnnnnnnnnnnnnnnnnnnnnnnnnnnnnnnnnnnnnnnnnnnnnnnnnnnnnnnnnnnnnnnnnnnnnnnnnnnnnnnnnnnnnnnnnnnnnnnnnnnnnnnnnnnnnnnnnnnnnnnnnnnnnnnnnnnnnnnnnnnnnnnnnnnnnnnnnnnnnnnnnnnnnnnnnnnnnnnnnnnnnnnnnnnnnnnnnnnnnnnnnnnnnnnnnnnnnnnnnnnnnnnnnnnnnnnnnnnnnnnnnnnnnnnnnnnnnnnnnnnnnnnnnnnnnnnnnnnnnnnnnnnnnnnnnnnnnnnnnnnnnnnnnnnnnnnnnnnnnnnnnnnnnnnnnnnnnnnnnnnnnnnnnnnnnnnnnnnnnnnnnnnnnnnnnnnnnnnnnnnnnnnnnnnnnnnnnnnnnnnnnnnnnnnnnnnnnnnnnnnnnnnnnnnnnnnnnnnnnnnnnnnnnnnnnnnnnnnnnnnnnnnnnnnnnnnnnnnnnnnnnnnnnnnnnnnnnnnnnnnnnnnnnnnnnnnnnnnnnnnnnnnnnnnnnnnnnnnnnnnnnnnnnnnnnnnnnnnnnnnnnnnnnnnnnnnnnnnnnnnnnnnnnnnnnnnnnnnnnnnnnnnnnnnnnnnnnnnnnnnnnnnnnnnnnnnnnnnnnnnnnnnnnnnnnnnnnnnnnnnnnnnnnnnnnnnnnnnnnnnnnnnnnnnnnnnnnnnnnnnnnnnnnnnnnnnnnnnnnnnnnnnnnnnnnnnnnnnnnnnnnnnnnnnnnnnnnnnnnnnnnnnnnnnnnnnnnnnnnnnnnnnnnnnnnnnnnnnnnnnnnnnnnnnnnnnnnnnnnnnnnnnnnnnnnnnnnnnnnnnnnnnnnnnnnnnnnnnnnnnnnnnnnnnnnnnnnnnnnnnnnnnnnnnnnnnnnnnnnnnnnnnnnnnnnnnnnnnnnnnnnnnnnnnnnnnnnnnnnnnnnnnnnnnnnnnnnnnnnnnnnnnnnnnnnnnnnnnnnnnnnnnnnnnnnnnnnnnnnnnnnnnnnnnnnnnnnnnnnnnnnnnnnnnnnnnnnnnnnnnnnnnnnnnnnnnnnnnnnnnnnnnnnnnnnnnnnnnnnnnnnnnnnnnnnnnnnnnnnnnnnnnnnnnnnnnnnnnnnnnnnnnnnnnnnnnnnnnnnnnnnnnnnnnnnnnnnnnnnnnnnnnnnnnnnnnnnnnnnnnnnnnnnnnnnnnnnnnnnnnnnnnnnnnnnnnnnnnnnnnnnnnnnnnnnnnnnnnnnnnnnnnnnnnnnnnnnnnnnnnnnnnnnnnnnnnnnnnnnnnnnnnnnnnnnnnnnnnnnnnnnnnnnnnnnnnnnnnnnnnnnnnnnnnnnnnnnnnnnnnnnnnnnnnnnnnnnnnnnnnnnnnnnnnnnnnnnnnnnnnnnnn

SEQ ID NO: 97238 - DNA, 66981 bp, Homo sapiens
  misc_feature (1)...(66981): n = A,T,C or G
aatggggaaaggattccctatttaataaatggtgctgggaaaactggctagccacatggagaaagctgaaactggatcccttccttacaccttttacaaaaattaattcaagacgggttaaagacttaaatgttagacctaaaaccataaaaaccctagaagaaaacctaggcattaccattcaggacataggcatgggcaaggacttcatgtctaaaacaccaaaagcaatggcaacaaaagccaaaattgacaaatgggatctaattaaactaaagagcttctgcacagcaaaagaaactaccatcagagtgaacaggcaacctacagaatgggagaaaatttttgcaaccttttcatctgacaaagggctaataaccagaatctataacgaactcaaacaaatttacaagaaaaaaacaaacaaccccatcaaaaagtgggcgaaggacatgaacagacacttctcaaaagaagacatttatgcagccaaaaaacacatgaaaaaatgctcaccatcactggccatcagagaaatgcaaatcaaaaccacaatgagataccatctcacaccagttagaatggcaatcattaaaaagtcaggaaacaacaggtgctggagaggatgtggagaaataggaacagacttttacactgttgttgggactataaactagttcaacccttgtggaagtcagtgtggcgattcctcagggatctagaactagaaataccatttgacccagccatcccattactgggtatatacccaaaggactataaatcatgctgttatagagacacatgcacacgtatgtttactgcgggactactcacaatagcaaagactgggaaccaacccaaatgtccaacaaggatagactggattaaaaaatgtggcacatatacaccatggaatactatgcagccataaaaaaggatgagttcatgtcctttgtagggacatggatgaaattggaaaccatcattctcagtaaactatcgcaagaacaaaaaaccaaacaccgcatatatctcactcataggtgggaattgaacaatgagaacacatggacacaggaaggcgaacatcacacactggggcctattgtggggaggagggagcggggagggatagcattaggagatatacctaatgttaaattacgagttaatgggtgcagcacaccaacatggcacatgtatacatatgtaactaacctgcacattgtgcacatgtaccctaaaacttaaagtataataataataaaataaaaataataaaaataaaaaataaaataaaataaaataaaaacctgggcttcgggaggtggaggttgctgtgagccaagattacaccattgcactccagcctgggcaacaagagcgaaactcagtctcaaaaaaaaacaaaacaaaaaaacaaaacaacacaaaactgggctttgaaattcagagtacacagcctgtgttttggtaactgtgtaatcctgagcaaatcccttaaacaatttcaagccaccttttactcgctaagaagtaaggatagtatcaactacctcagtggagttgttgtgattaataagaatataattaaagtgcttaggaaggacagcttccatatcaacttaacatgttccaaactaaaaatggctagactatccacacagattaaatcaagttaaatttccctaggccacagggaatttgtttttcttttcatagagagagtgtcttgctctgttgtccagactagagttcggtggtgtgacttggctcagtgcagtctcaacctcctgggctcaagcaatcttcccacctcaaactccccagtagctgagactacgggtggacaccaccatgactgactaatttttgtgttttttgtagtgacagggtttcaccattttgcccaggctggtctcgaacttctgggctcaagggatccacctaccttgggggcttcctaaagtgctgggattacagatgtgagccaccacacccagcccacaggataattttttttttttttggagacagggtctcgatctgtcacctaggctggagtgcagtggcgcaagctcggctcactgcaacttctgcctcacaggttcaagcaatcctcctgcctcagcctcctgagttgctgggactataggcatgcaccaccacgcctgtctaatttttgaatttttagtagagacagggtttcaccatcttagccaggctccacaggataatttttaagagagacatcccattgaactatttcaatggagaatcatattctgttattaatactagtttcaactaacccttttatttgaaatcagtggttatcaacccaacagatttaatactctttttataagaaatatttttatatccacagtaccatactataaggaaactctatacaccaatctataaccaatctatgcatatattttggggggaaaatataaggcccttcctgtaataaaggaaaagtaaaagtcagtcaaaagaaaatacgtactttaggttataaatactcaggtatgactacatattgtaagatataacaaagtagcacctagatccaaatctgtgaacttagagccttcctgctaccccagggcttaaggatgcctgggaagtacctgggctcgacaccaaagtagtaccacagcatactactggacacacttttctctccttttcggtttggtctatacattgtacttgaaccccgttttcattttttgttgttttacatcctcaacagttgtcagaacacaacatatggcttcagaaacattcaacaaagaacagcagaaaaatgtcaacataacctgtttccaggattatttcctactattgtattctccttccctgccccatacatgccatgccccagactaatagttctcaagcctggttgtaaggcagaatcatctagggaacgttttaagaatactgatcctgggccccactcctaaaggttttgtctcaggtggtctggggcagccagattaggcatcacacaaatttttaaagctctttaggtgactctactatgcagcaaaagtccctattatatatcctgccaatgctcatcctgcatggagaggtccctgtgccacttattgctcagcctgtttcctttgcctaaaacaccctagggagctgtgaagactaaaataagggagtgatatgaggactttacaatccaacagttttggggtttaaatctcagttccagtatttcttaggccccctgacctcagaaaattctcagactcagtttcttcatatataaaaagtgattaagccaagtgcagtggctacagtggctaatacctgtaattgcaacactttgggaggccaaggttgggggactgtcagagcccagaagttgaagacaagcctaggaaacatagtaagaccccatctctacaaaaattttaaaacttagccaggtatggtgccatgcacctgtagtaccagctgaggtggatcaattgagccaggaggtcaaggctgcaatgagccatgattgagccactgcacaccagcctcggtgacaggacaggaccctcaaaaaaaaaaaaagtgattaatggtgccctgctcacacagttaatgtatgaactcagtgagataattaatgcaaagtgttctgctttcagggctggcataagagttcaattaagtactggcattcataataaatcccctatttagaaaaatgactcttataccaatatgaggaacggactcaagtgagtgaaggtggaggcagtgtggaatattgggggtataaaatctaaactaagaaggcaaaaaaattgcaagaagagaacagaatgaatgaaagttattacagaaaaaaaaatcaaaaggacccaacaaaatatattggatacagaatatgagagtaggaaaaatcttaaatagctctctgttttgagccagcgtagctaggaaaagtactgccatgagaaataggtgacccctgacgaggagcaggaagaaatgaggaaatcacttttagaagtgtctttgaggaaataccataggatattcctctgaatatgcccagcaggtagctgaacaaatgaaactagagctcaggaatgaaatcaagctgtgccactttgttcaaaatctctgcattctaaaatcctccttcctgaccactaccttctctcctccatcacttcccactcacgctgaatctccttactcaatctctagaggtcttaggtaagagttctcaaactggcagccccccacgcattgtatcacccaaagaatgtttcaaaaattttctgaattagttgtcaacatttaaaaattgtaagagttcacataaatttcaacttccagctcctcttgcaaaattggaaatatctgaggaaaaagtgagcccatgttcccacatggaaacaataagctgaagccgaatagcagctggcgttattagggaaggagtatggctggtctctggagacttctgagcgtgggacctcctaggacctttgtttcttcctttgatctccatagtccatgagtcagatcccagcctcacctccctaccccagcccagacccacgtgtattttaatcatatcaacatttaaggactactgtgcaccaggcacggagccagagaaacaaagttgaaaagaaggcaccctctgccctctgtctaccctgtcagcctcataaccagccacaccagcatattctcaattccatgagccacatgtgctttccctgcatcccaaggctttgcacatgctgttccttctgcccctacagctaagcccaaacccccttctcctaatcatccttcaagtctcaaatgatatttcctcatggaggccttcccagactccccattaagtagcatacaatcatcccctttcacgtgttccatggctctttcccccttcttgtactttctccatgtctatctctaagaccagacttcatcttgttcaccaattaatttccagcatctagcatagccagacaagtacttccataaaactttccatatgtctcctaggcacgttttgttccaacatggctcatcttgccagcttccccctgcttcacttcctccactcttgtttccaaggtagaatcggacaggctactgggcactctcttcttaaatttaaaacagttttaagcgggaggtgcgtggatcaaattcaggatgttaaaagattgtactgactgcagagtggagaaaaaaacaagaaaagtggatgcgaagagaccagttagattacttcagtaaatcgccactccagttctagaacaacttgggattctacacatctaactgcggtgttgtgttaccacatttcatggcactttccacgccttcacacacacagcggcaaactaccgcgaaacctccggacccagctgccctccacgagacgcgttcggtgatatgcactcctccccaatgcgagactccgagaccccaaactccctcggactctcccagttgggtccagggccacactcggcgcagccaagcccgccctacccgaggtcgcacacgggccgctccggggtcaatggttctttggaggaccaagaggaccaaggcaacagggtaattcattaggggaggatagttaagagggagcgaaaggaagaagaaatcatgaaatgcaatgcccggccagggaactccgaacaaggaacagggaacaaggtttaccaaggcgaatcctggaacactcccactacagctgcccccagcgcttcaactaccggcttaaatgaaccacgccccttgcgcgacaaagaaaacgcactattcctgcgaccagctggggaagcaccccgctaccttttaccagaccagccaatgagttcagtgaaaccttcgatcaagacagtcacgctccgagtggccaatgaaattgaaggctctgccctccatgcccaactctgattggcttacaatccaggaacaggcgttaacccagggaaggcagtggcaagatggcgtccctggatcgggtgaaggtactggtgttgggagactcaggtgagcggcttaccctacctctggggctccagacacttttgagttacccagtaaccctccccttagcttccttccctcaacttcctggctcctcggcccgtggctgaagtccctcccagggcctgaagactacacttcccaggggactttgctccgtgtgacgacgcggtggcggcggcgtcgtcgcgcgggtgggggtcgcggagcccgggtcttttgccttcgcggctttccgcatcggtctcccaggcgaccccagcctagagtgtattgtcaattcttttattaaaaaaaaaaaaaaaaaaagcaggcattgagtattgtatggggttctatgttaagggtacagaagttagtaggaccgtgccttcaagagattttgttcattaaggaagtcaaacgtgcactgagaaacgtgcactgagaaacgtgcactggcaagcgcttcgcatgtattaactcatttaattctgagacagtcctgttatcccattttacagatgagagtagtgaggcagagagatgtaaatgacagaatccttttgaacgcggagtccacgaacttaaacgctaagttataattatgcagtgacatattgggtagtggtcctgttttattcttaactgagcttaatttcctggttctcgtttgatcttcattgaaaacctattatgtcctagactgtacaatagagaaattaaagtaagagttttattctgaagcagctaggatttaacgctgagcccaatttaatcctagtgttaaatatatatatatttttttaatctcagtggatgcaaaaagaattcttttgacacctgggacatttgagaactacagctggcgtctggatttccagctcccacctcactgcccttatcttttcttccataatccccaattcagctctccttagtaacttcaataaatgctgaccttgcattttatagaagcgctcctctggagttggcctaagagcatgtgttgtgagcaaagacgttgtgctagatgcttggaggtggagaggcttgaaaacttaatagaaactaaataaaattgtgggcagcaaatataggttaagaatgttttcacattgccctgaggattatttgcattatgaaatattttacagagagcattatttaatattcccctaagaaagttgccttttgaaacttaatgaacataatcacaatttatgtcgacttcatttctatcaggtagcttgaagtggtgccgaagttaatttaataaaatcactcagttttacagataaagtaattgtggcctaaagggacttggcaagagtatcactgagtagaatttacaatccagaactaacagacttcttcatgatacgttaagtgggtgttttgtgtcctttataattccattttctattgtatctaacaatcccttcatattacaaactgttgcaactagtcaatttattttctttccaacaggcactgtattaggttctggggttataactgtggaattaatgcgtcatataacagggatagaattagcagctacattaaatgtggaaaagtaatcaggcaattgataagcttccctactgcccgcctcccctgttatggtttagttgtaaagcagaagacacagctgtgatggccaggaaagtgattgatgttgtcacacattcactaatgttaacctttatgtgcaaagttagttattgtctttttatctttttaaaaggtaattttgtcagtctccttttaactgcgatttaaaagtacacagtctgacagtttagaatgcactttttacacttcctcagcctttctttcaaacccgaaagtttatttttaaataaaggccatttcccttataaaattttgagggtttcacaaatatataaagaaatgacttagccagacaaggtggctctagcctataatcccagcactttgggaggttgaggcgggtggattgcttgagctcagttcaagactagcctgggcaacatggcaagaccctctctctaccaaaaacagtacagaaagttagccgggcatggtggtgcacgcctgtagtcccgctactcaggaggctgaggtgagaagatcacttgagcccaggaatttgaggctgcagtgagctaggatcgtgccactgcactctagcctgggtgatagagtgagaccctgtctccaagaaaaaaaaataaaaagaataagttgatatttggtgatttgtttttatcctattgagatatttggtaatttggtaaggaaccctgaaagtctcactaccatacggttttctctttctttcagagattagggactagtttaacatattaccaaacagctgtatttggagctgacatttatttatattgggccttttttacccccaagcaaatcaagtgcattcttttgatcaaatttagttctaaaggtgaaaacatagaatcagaatctcccaaaattcttaaagaaatgaaattcgccattattccctagcacttcaactgttcttactgtttagggtttcatcccttcttagctaatacttatcacccaaagcagttaattcatggagagctatacaattctactgcctggaaatgtttaccctaacacaattaagctaaactaggcctcaagtgttgcatcaagctgataattaagtggatagatacattccttgaacataaacaaacctatttacaaatacagaatcaacaatacatcctaaaagttacagatattagacacaatgcagtaaattcaatgacaaatataattttgagtatttaaaaatcttaaatgtttctatataaaaaaagtaataaaagggaagcctgagaaaatgtttgattcaattacacatacgtaaaatgattaatatatttaatagataaagagctcatataaattaatgacactaaaacctggtagataaaggtacagagtagatcaacagagaatttatgagaggaaaaacaactgatttgccagaataatcataatgataatctttgatctttatcagaaagtaaagaaatgcagactaaagcaagctgtcactcccccactgcccgccaccaccgagacggattgttgctctgtcacccaggctggagtgcagtggcgcaatctcggctcactgcagcctctgcctcctgggttcaagtgattctcttgcctcagcctcccaagtagctgggattacaggcacccaccaccacgcccagctaatttttgtatttttagtagagacagggtttcaccattttggccaggctggtctcgaactcctgacctcgtgatctgcctgcctcagcctcccaaagtgctgggattacaggtgtgagccaacgcacctggccaagatgtcacttttattcctttatcaggttaacaaggatgaaaagccaactacatgatactgttgaggtgcaacaagacctgcaggctcaagtgtatggctggtggcagtataaccccatgaaagttatttctcaatgcatatcaagaactttaaatgtttccttttaagtactgagtttactcctgggaaggtatactaaggacataattttaattttaaacaaaggtttaaacagaaataacctttcactagcatatcaaaaatttcaaaacaccctaaatatctaataataatggaagaatgattaagtaaatttttatgcctactttctgaagtactatggagatactttaaatgtttatgaagattttggaataatatggaaacttttaataaatactaattaaggttctgatctaaatactagagataaaaaagctgcgtaagaaccctcaaggaacttaaaattaagggagtggttccaagatgaccaattaggaacagctccagtctacagctcccagcgtgagcgacgcagaagacaggtgatttctgcatttccaacgaggtaccaagttcatttcactggggcttgtcagaccgtgggggcaggacagtgggtgcagcccactgtgtgtgagccaaagaagcgcaaggagtcagggaattccctttcctagccaagggaagcggtgacagacagcacctggaaaattgggtccctcccaccctaatactgtgcttttccaatggtcttagcaaacagcacaccaggagattatatctctgacctggctcagagggtgccacacccacggagccttgctcattgctagcacagcagtctgagatctgcaaggtggcagtgaggctgggggaggggcgcccgccattgatgaagcttgagtaagtaaacaaagaggccaggaagctcgaactgggtggagcccaccgcagctcaaggaggcctgtgtgcctctgtagactccacctcggagggcagggcatagcctgaaacctctgcagacttaaatgtccctgtcggacagctttgaagtgagtagtggttctcccagcacagagtttgagaacagacagattgccccctcaagtgggtccctgacccccgagtagcctaactgggaggcaccctccagtaggggcagactgacacctcacatggcccagtaccccgctgagaaaaagcttccagaggaatgaatgatcaggcagcaacatttgctgttcagcaatattcgctgttctgccacctctgctgctgatgcccaggcaaacagggtctggagcggacctccatcaaaatccaacagacctgcagctgagggtcctgactgttagaaggaaaactgacaaacagaaaggacatccacaacaaaaccccatctgtccgactccatcatcaaagaccaaaggtagataaaaccacaaagatggggaaaaaacagagcagaaaagctgaaaagtctaaaaatcagagcacctctccccctgcaaagaaacgcagctcctcgccagcaaaggaacaaagctggatggagaatgactttcacaagttgagagaagaagtcttcagatgatcaaacttctcygagctaaaggacgaagttcaaacccattgcaaagaagctaaaaaccttgaaaaaagattagctgaatggctaactagaataaccaatgtagagaagtccttaaatgacctgttggagctgaaaaccatggcacaagaactacgtgatgatgcacaagcttcagtagccgatttgatcaactggaagaaagggtatcagtgatggaagatcaaatgtatgaaattaagtgagaagagaagtttagagaaaaaagagtaaaaagaacgaacaaaggctccaagaaatatgggactatgtgcaaataccaaatctatgtctgattggtgtacctgaaagtgacagggagaatggaaccaagttggaaaacactctgcaggatattatccaggagaagttccccaacgtagcaaggcaggccaacattcaaattcaggaaatacagagaacgccacaaagatactcctcaagaggagcaactccaagacatgtaattgtcagattcaccaaagttgaaatgaaggaaaaaatgttaagggcagccagagagaaaagtcaggttacccacaaagggaagcccatcagcgtatctctcagcagaaactctacaaaccagaagagagtgaggaccaatattcaacattcttaaagaaaagaattttcaacccagaatttcatatccagccaaactaagcttcataaatgaaggagaaataaaatacttgacagacaagcaaatgctgagagattttgtcaccaccaggcctgccctaaaagagctcctgaaggaagcactaaacatggaaaggaacaactggtaccagccactgcaaaaacatgccaaattgtaaagaccattgaggctaggaagaaactgcatcaactaatgagcaaaataaccagctaacatcatgatgacaggatcaaattcacacataacaatattaaccttaaatgtaagtgggctaaatgctccaattaaaagacagactggcaaattgtcaagacccatcagtgtgctgtattcaggagacccagctcatgtacagagacacacataggctcaaaataaagggatggaggaagatctaccaagcaaatggaaaacaaaaaaaggcagggtttgcaatcctagtttctgataaaacagactttaaacaacaaagatcaaaagagacaaagaaggccattacataatggtaaagggatcaattcaacaagaacagctaactatcctaaacatatatgcacccaatacaggagcacccagattcataaagcaagtccttggagacctacaaagacacttagactcccacgcaataaaaatgggagactttaacaccccactgtcaacattagacagatcaacaagacagaaagttaacaagcatatccaggaattgaactcacctctgcaccaagcggacctaatagacctctacagaactctccatcccaaatcaacagaatatacattcttctcagcaccacatcacacttattgcaaaactgaccacacagttggaataaagcaatcctcagtaaatgtaaaagaacagtagttgtaacaaactgtctctcagaccacagtgctgtcaaactagaactcaggattgagaaactcactcaaaaccgctcaactgcatggaaactgaacaacctactcctgaatgactactgggtacataatgaaatgaaggcagaaatgaagatgttctttgaaaccaatgggaacaaagacacagcataccagaatctctgggacacatttaaagcagtgtgtagagggaaatttatagcactaaatgcccacaagagaaagcaggaaagatctaaaactgacaccctaacatcacaattaaaagaactagagaagcaagagcaaacacattcaaaagctagcagaaggcaagaaataactaagatcagagcagaactgaaggacatagagacacaaaaaacscttcaaaaaatcaatgaatccaggagctggttttttgaaaagatcaacaaaattgatagaccactagcaagactaataaagaagacaagacagaagaatcaaacagacgcaataaaaaatgataaaggggatatcaccaccgatcccacagaaatacaaactaccatcagagaatactaaaaacacctctacgcaaataaactaaaaaatctagaagaaatggataaattcctggacacatacaccctcccaagactaaaccaggaagaagttgaatctctgaatagaccaataacaggcttggaaattgaggcaataattaatagcctaccaaccaaaaaaagtccaggaccagatggattcaaagctgaattctaccagaggtacaaggaggagctggtaccattccttctgaaactattccaatcaacggaaaaagagggaaccctccctaactcattttacgaggccagcatcatcctgataccaaagcctggcagagacacaacaaaaaaagagaattttagaccaatatccctgatgaacatcaatgcaaaaatcctcaataaaatactggcaaaccgaatccagcagcacatcaaaaagcttatctaccatgatcaagtgggcttcatccctgggatgcaaggctggttcaacatgtgcaaatcaataaayataatccagcatataaacagaaccaaagacaaaaaccacatgattatctcaatagatgcagaaaaggtctttgacaaaattctacagccctttgtgctaaaaactctcaataaattaggtattgatgggacatatctcaaaataataagagctatttatggcaracccacagccagtatgatactgaatgggcaaaaactggaagcattcactttgaaaactggcacaagacaaggatgccctctctcaccactcctattcaacatagtgttggaagttctggccagggcaatcaggcaggagaaggaaataaagggtattcaattaggaaaagaggaagtcaaattgtctctgtttgcagatgacatgatagtatatccagaaaaccccatcgtctcagcccaaaatctccgtaagctgataagctacttcagcaaagtctcaggatacaaaatcaatgtgcaaaaatcacaagcattcttatacaccaataacagacaaacagccaaatcatgagtgaactccccattcacaattgcttcaaagagaataaaatacctaggaatccaacttacaagggatgtgaaggacctcttcaaggagaattacaaaccactgctcaacgaagtaaaagaggacacaaacaattggaagaacattccatgctcatgggtaggaagaatcaatatcatgaaaatggccatactgcccaaggtaatttatagattcaatgccatccccatcaagctaccaatgaccttattcacagaattggaaaaaactaaagttcacrtggaaccaaaaaagcgcccacatttcgaagacaatcctaagctaaaagaacaaagctggaggcatcacgctacctgacttcaaactacactacaaggctgtagtaaccaaaacagcatggtactggtaccaaaacagagatatagaccaatggaacagaacagagccctacacatctacacatctacaaccatctaatctttgacaaacctgagaaaaacaagcaatggggaaaggattccctatttaataagtggtgctgggaaaactggctagccatatgtagaaagctgaaactggatcccttccttacaccttatacaaaaattaattcaagatggattaaagacttaaacgttagacctaaaaccataaaaaccctagaagaaaacctaggcaataccattccggacataggcatgggcaaggacttcatgtctaaaacaccaaaagcaatggcaacaaaagccaaaattgacaaatgggatctaattaaactagcttctgcacagcaaaagaaactaccatcagagtgaacaggcaacctacagaatgggagaaaatgtttgcaatctactcatctgacaaagggctaatatccagaatctacaatgaactccaacaaatttacaagaaaaaaacaaccccatcaacacgtgggcgaaggacataaacagacacttctcaaaagaagacatttatgcagccaaaagacacatgaaaaaatgctcatcatcactggccatcagagaaatgcaaatcaaaaccacaatgaggtaccatttcactccagttagaatggcgatcattaaaaagtcatgaaaaaacaggtgctggagaggatgtggagaaataggaacrcttctacactgttggtggaactgtaaactagttcatccattgtggaagagagtggggcgatttctcaaggatctagagctagaaataccatttgacccggccatcccgttactgggtatatacccaaaggactataaatcatgctgctataaagacacatgcacacgtatgtttactgcagcactattcacaatagcaaagacttggaaccaacccaaatgtccatcaatgatagactggattaagaaaatgtgacacatatacaccatggaatactatgcagccataaaaaatgatgagttcatgtcctttgcagggacatggatgaagctggaaaccatcattctgagcaaactatcgcaaggacaaaaaaccaaacaccacttgttctcactcataggtgggaattgaacaatgagaacacttggacacaggaagggaacatcacacaccagggcctgttgtggggtagggggaggggggagggatagcactgggagacatacctagtgtaaatgacgagttaatgggtgcagcacaccaacatggtgcatgtatacatatgtaacaaagctgcacattgtgcacatgtaccctagaacttaaagtataataataaaataaacaaataaataaataaaataaaacatatttctttatacagggcattcttctccactgcaaataaatcaacagatggcatcatttttttaagatgaataaaaatccaacatccaatcaaaaaaaatcaaagttaataaaacctataaataaacacatgtaataatgtgttttaagtgctctctaggaaaatgtacagggtacagtggaggcccagagaatagtggatgctatgcttagttctccctatgtgggttcagaaaatactttataactagaatgatgctgactctccaaagattaattcaccaggccaatgggtgagggaagggagaggatgggtaggatattccagacagaacaagctatggaagcagacgcttatgttgttttattgtttttaagtatactgtgtatataatcacaataaccacctgctcatagaaaaacttttcttgtggaattaaataaaccttcatgttgacagtagtcttaaggtgatttttttttgtagacagtgtctcgctctgtcacccaggctagagtacagcagtgtgatcatagctcactgcagcctccaactcctgagctcaagggatcatcctgcctcagcctgctgagtagctaggactacagacgcaggccaccatgcctggctaatttctttaaaatttattttttgtagagatgcagtcttgctatgttgcccaggctggtcgcaaactcctgggctcaagtgatcctcctgcctcagcctcccaaagcactgggagtacagacgtgagccaccgtgcctggccctcatttgtgcatactttctagattgtaaatataactttttataataaaaaataaacaataggttcctacacagtatgatcaaagagatgatctaaatttttgataaaactagtgatttgtaaagataccaaccatgcttgtcataatggaaccccaaaaatgccgttaaatgaatgagtgactccacacatggatgtagaggaagagctcattccctttcctcttcatacaaatctctcaatgctacccttagaatgaataactagatttccctgagcctaagaaatctaaaagaagaccaaatggtgacttaaagggccatgatgtagaagaggtagtagaccttttttccaaaaggtaagtcttggctaagtggttggctgctttttttaaatcactatgtgggacaactggagtgtctaaatttagaattgtgaaatggtgaatccctctcactgacagtattcaagcacagtctggaagaccctctaacaggatgccatggaggggacctcagcattggtgtgcaggagagagggattacttctcagatctgttaagattctacaactctaaaataggctaaattgattaaatcattcaaaaggaaagggattcattaatatgaaattgacctggaccagtggttctcaaagtgagacccctggaccagtatcagtatcacttgggaacttgttagaaatcttgggccccaagacagacccgctaaatcagaaagtctgggggtggagcccagcattccatgttttaactcaccctccgggtgattctgatgcaaatttgagagaaccgctgccctctaccatcttcattttattcagtgaagcttatattgttggtatggcattctaacaactatgctttacttaacattattcctgtgtagtattagtcttactctttccaaaacagatttcagccttgtctcttatgtgactagagttcttgtatctcttacaggtgttgggaaatcttcgttagtccatctcctatgccaaaatcaagtgctgggaaatccatcatggactgtgggctgctcagtggatgtcagagtatgtgtcttttatattttagtttttcaataatgtactaaagataactgcttcaaattacatgatcaaattacagtactatggtcaagatcaatagtaatagctgggatttattacattcatactatgtgccaggtactatgccagttgctttacatgtcccttcttatttcacctttttaaaactgagatgtgtagatgcagaaactaaggcagagkcaagatttgaacagtttttctgatgccacagacttcagttttaatcactatgccatatatctagagttcacatagcatcctccgtaaataattctgcctaagcttgtgctattaagactgccaactttcagctagaaatataatgtaaaggcaaaagctcctggagcttcatgtctgggtcatttgttccatcttgtgtttaggaattaggtatagttttaattaaattaaatatcttcccagatatcattggtctttgctaatgccagctagttctgacaagtctctcatctgctggcacacctctctcctttgagttaagacacacatacggaaggcaaggtagttggctagattgatagttattttccttctgttctttgaagctattgttccatagctctgatttacattgctgctgattagaaatcttccgtaagactaattattatttctttttaatgtaatttcttctttggttgcttttaaaatattttttgtgtttttttttaatctttgatattttgttgttttgctaacctatgtctaggtgtagatttgtttttattcatcctattcagaagtagtcatggttctcatctctttatttttcagaattttaagccattatctgtcttgcctcrtttcttctatcccttcctcttgactttctatgagatttttgttcttcataactgttaatatttctccttgctgccttctggatgatgtactcatatctgccttccagttaactaagaatctcttcaattatatctaatctgctttttaatatatctatacagtttttcattccaagtacctatactttttaatttctagatgttccttttagttctttttaaaatgtaaaaattttccaaaatgtcctgatccttcattatggtgtctgctttttattttaataatttccaacatacttattttatggtttcttttggattattttattttttctggaggagaggtagctatgctccttgctgtatatgctactctacttcatggaaatgtatctccttgtatggcttgtaattctttaagatgatcacatcttcaacaggatttttttcctctccctttggaagtcctgtatgctgtattgtgaaagtatccctatacagcgccttttcatttctgtcattgccaagaccgtaaggatttcaatttctcagctcagataatgtaaatctagataatgtaaattcctccagcatctgattgtagcacagacctatagtttccatttcttgtggactatttatcttctgtctaccttctgtctgaggtccctgacagaaagtttttgccgtttccctgagcctatggacaatgtttttcttgtcttgtcttctctcttttcactgactgggcacctcatcaaaggtccggatttcaaaaaggcatctatagtctagtcttcatcactcactcacatatacttttgccttgaatgctggaaaacaggtctgctattcctgaatgggcattaagactccaggcaccaacccctgaagctatatctgaatctatgtcagttcccacttctcactctgattttaagttttttcttcatttctagcatttggggatattcctttctttctcctaactttctcttgagctagtcttctctgcctctcctctctgtactctttctctctgtctcaaaatatttttatagcatttctataagtttgaagtaggagcggacctattttgtgtcatttttttttcttttttgtttattattattatactttaagttttagggtacatgtgcacaatgtgcaggttagttacaaatgtatacatgtgccatgctagtgtgctgcacccattaactcgtcatttagcattaggtatatctcctaatgctattttgtgtcattttagccaaccatcttcctaaattcagtggcaactttatttaggtttgggagacccaatagcaagttctggacaaattttccctttggatttttctagctccgattctgtgaaagagcatgacatattgaaaagaaacttagatttaaacactcacctcctgagtcaattgcccttcgcttctgaaagagtgaccttagactaatcagtttacctctttgaggcatggttatatcatctggaaaacagaggtcaataatatgtgctttattgagtctacaggtttgtaggaaggatcagagaagcttaataaatgggaagttatggtctagtcctttacaatgtgaagttgtaattgaactttagtccaattttctgccccttcccttcctcctgccctactccttttcctatccccacccagtgcccattctattcatgttgttcaccttttgtcttggttttctttcccacttgtcttattgaattagctgaaactccagtacaatgttgaatagaagtggcaccaacaagcatctttgtttcattcccatctcatgggaaattttcagtataacactatttagtaaagtatttgctggaggattttttatgggtatatttgattagattaaagaaatgtccttctattcctattacaatgagagtttgtatcatgaatggatattcaattttaccagttgcctcttcatgataatcatgatttttctgatttattccattactgtggtaaattatgttgattaattttttgaatgttaaaccmaccttgcaatcctgtaataactctaacttggtcttgtgctgctcttttcatatatcactagatttaatttgctaatatttttcttagacatttgcatctaaattcattggaaagattgtcccatcattttcttttcttgtaatctcattgtgggttttctatcaggcttatgctaaccttataaaataagttgggaagtattaatttctgtatctgttctctgaaagattttatttaagattggtattttttttttcttagatatttgaaagaattcacaggtgaaaccatctggacctaagtttttctttgcgggaagtttttaagtaacattaaagaaaataataaaataactatattccttcttgtgtcaattttggtagtttatgtttttgaaagaattttatgtaaattgacacaaaaaaattttttccgtcttactgtttttcaataagataattgaacaatattccctttttcatttctggtagaatgatttgtggcttttctcttactttcttgatcagtcttaccagaggtccatcaaagaccagtttctgccttgttgattttctctattgtatgtttgttttgtgcattgttagtttctgctcttatctttatgaacatactttctttgggtttaatttagtgtcttctttctaacttgttgacatcagtaattgcttaatttttttcagacttttttttagagctctaagactctaaaatttctatctaagcacagcgttaactgcattcctaaaatttttttcattattattcagttcaaactattgtctagtttccattgcaattttttctttgactcatgggttgtgtagaatatgcttctcaatttccaaacatttgacaatgtttattatcttttaatgattgatttcagttatctttcattgtgcttagagaacatacactgtatgctttcatcctttgaaatttgttgagatttgctccatgtccagttttttttattgktttatttatttatttatttatttaatttatttttttgagatggagtcccactctgttgctccggctggagtgcagtggcacgatcttggctcactgcaacctctgcctcccgggttcaagcgattctcctccctcagcctcctgagtagatgggattacaggcacaacaccaccatggccggctaatttttttgtacttttaatagagatggggttttgccatgttggctaggctggtctcgaactcctgacctaagatactctggccggggattacaggcatgagccactgtgcctggcccgactttttttgttttatacagatggggttgcaccgtgttgccccagcctagtctccaactcctaggctcaagcaatcctgcaaccttggcctcccaaagtgctgggattagaggcataagccaccatgccgggccctaaactcttcttttgaataaaagcacagatagcaaacaaaattaaatttgaaataaagaggtttttttttaacagaaatcaaaaggcttatatgttctccaccccttgttataaaatgcaccttaccttgggcaagcaaattctacctgtcttgaaaaagcaataggaaatactgctagtctcttctctatgagacagaaaaacttttacccagaggtgttgagtaggccagacatggtggctcatgcctgtaattccactgctttgggaggccaggtgggaggatcacccgagcccaagttaaagaccagcctgggcaacatggtgagacccccgcctccataaaaaaatgttaaaaaatttttttaatttagtttttttctttaatttttttattatactttaagttttagggtacatgtgcacaacgtgcaggtttgttacatatgtatacatgtgccatgttggtgtgctgcacccattaactcgtaatttaacattaggtatatctcctaatgctatccctccccgctccctcctccccacaataggccccagtgtgtgatgttcgccttcctgtgtccatgtgttctcattgttcaattcccacctatgagtgagaacatgtggtgtttggttttttgtccttgcgatagtttgctgagaatgatggtttccagcttcatccatgtccctacaaaggacatgaactcatcattttttgtggctacatagtattccatggtgtatatgtgccacattttcttaatccactctaccattgatggacatttgggttggttccaagtctttgctattgtgaatagtgctgcagtaaacatacgtgtgcatgtgtctttatagcagcatgatttataatcctttgggtatatacgcagtaatgggatggttgggtcaaatggtatttctagttctagatccctgaggaatcaccacactgacttccacaatggttgaactagtttacagttccaccaacagtgtagaagtgttcctatttctccacatcctctccagcacctgttgtttcctgactttttaatgattgccattctaattggagtgaaatggtatctcaatgtggttttgatttgcatttctctgatggccagtgatggtgagcattttttcatgtgtcttttggctgcataaatgtcttcttttgagaagtgtctgttcatatccttcactcacttgttgatggggttgtttttttcttgtaaatttgttggagttcattgtagattctggatattagccctttgtcagatgagtagattgcaaacattttctcccattctgtaggttgcctgttcactctgatggtagtttcttttgctgtgcagaagctctttagtttaattagatcccatttgtcaattttggcttttgttgccattgcctttggtgttttagacatgaagtccttgcccatgcctatgtcctgaatggtattgcctargttttcttctagggtttttatggttttgggtctaacatttaagtctttaatccatcttgaattaatttttgtataaggtgtmaggaagggatccagtttcagctttctaaatatggctagccagttttcccagcaccatttattaattagggaatcctttccccatttcttgtttttgtcagatttgtcaaagatcagatgttgtagttatgtggcattatttctgagggctctgttctgttccattggcctatatgtctgttttggcaccagtaccatgctgttttggttactgtagccttgtagtatagtttgaagtcaggtagcgtgatgcctccagctttgtccttttggcataggattgwcttggcaatgtsggctcttttttggttccatatgaactttaaagtagtttttttccaattctgtgaagaaagtcattggtagcttgatggggatggcattgaatctataaattaccttgggcagtatggccattttcatgatattgattctgcctacccatgagcatggaatgttcttccatttgtttgtgtcctcttttacttcgttgagcagtggtttgtaattctccttgaagaggtccttcacatcccttgtaagttggattcctaggtattttattctctttgaagcaattgtgaatgggagttcactcatgatttggctctctttttgtctgttattagtgtatgagaatgcttgtgatttttgcacattgattttgtatcctgagaccttgctgaagtagcttatcagcttaaggagattttgggctgagacgatggggttttctggatatactatcatgtcatctgcaaacagggacaatttgacttcctcttttcctaattgaataccctttatttccttctcctgcctgattgccctggccagaacttccaacactatgttgaataggagtggtgagagagggcatccctgtcttgtgccagttttcaaagggaatgcttccagtttttgcccattcagtatgatattggctgtgggtttgtcatagatagctcttattattttgagatatgtcccatcaatacctaatttattgagagtttttagcatgaagggttgttgaattttgtcaaaggttttttctgcatctattgacataatcatgtgatttttgtcattggttctgtttatatgctggattacgtttattgatttgcgtatgttgaaccagccttccatcccagggatgaagcccacttgatcatggtggataagctttttgatgtgctgctggattcggtttgccagtattttattgaggatttttgcattgctgttcctcagggatattggtcaaaaattctctttttttgttgtgtctctgccaggctttggtatcaggatgatgctggcctcataaaatgagttagggaggattccccctttttctattgattggaatagtttcagaaggaatggtaccagctcctccttgtacctctggtggaatttggctgtgaatccatctggtcctggactttttttgcttggtaagctattaattgttgccccaatttcctagcctgttattrgtctattcagaggttcaacttcttcctggtttagtcttgggagggtgtatgtgtccaggaatttatccatttcttctagattttctagtttatttgcgtacaggtgtttttagtattctccgatggtagtttgtatttctgtgggatcggtggtgatatcccctttatcattttttattgcatctatttgattcttctgtcttttcttcttcattagtgttgctagcggtctatcaattttgttgatcttttcaaaaaaccagctcctggattcattgattttttgaagagttttttgtatcattatttccttcagttctgctctgatcttagttatttcttgccttctgctagcttttgaatgtgtttgctcttgcttctctagttcttttaattgtgatgttagggtgtcaattttagatctttcctgctttctcttgtgggcatttagtgctataaatttccctctacacactgctttgaatgtgtcccagagattctggtatgttgtgtctttgttctcgttggtttcaaagaacatcttttatttctgccttcatttcgttatgtacccagtagtcattcaggagcaggttgttcagttcccatgtagttgagcggttttgagtttccatttctttggcatctgtgatgctagtgttagccagttttgttgtaagtgttagaaagaggacacatagaactaggaagctgaataggaagatgattataatggcgtgatcatggaaggcgattagctcttctgttataggggatgtggcatcttgaaggcctagttgggctgcgtgtgccattaagatatatgggacttaacctgtaacttaactttgacaaagttatgaaataatttttctaatatcttgttgaaaaagtcatagaggttatgaggttggcttgaaaccagttttagggggttggattccttcctttttcgtctaggttttatgtagactggttcttcaaacgtatggtagggtggagggcagccacataaccactctaagttagtggaaggttgttcaattattagaactttccattttgaagcaaaggcctctcaggttatgaaaattattaatattactgctgttaaggagatgaatgagcctacagatgataaaatatttcacgtggtatatgcgtcggggtagtcagaataacatcggggtattccagataagctgagaatgtgctgtgggaagaaggttagatttacgcctacgagtatgtttcttaatcctgagttctcgtttgattgcactgtggtctgagagacagtttgttataatttctgttcttttacatttgctgaggattgctttgcttccaactgtgtggtcagttttggaataggtgtggtgtggtgctgaaaagaatgtatattctgttgacttgggatggagagttctgtagatatctattaggtccgcttggtgcagagctgagttcaattcctggatatccttgttaactttctgtctcattgatctgtctaatgttgacagtggtgtgttaaagtctcccattattattgtgtgggagtctaagtgtctttgtaggtctctaaggacttgctttatgaatctgggtgctcctgtattgggtgcatatatgtttaggatagttagctgttcttgttgaattgatccctttaccattatgtaatggccttctttgtctcttttgatctttgttggtttaaagtctgttttatcagagactaggattgcaacccctgcctttttttkttttccatttgctcagtagatgttcttccatccctttattttgagcctatgtgtgtctctgcacatgagatgggtttcctgaatacagcacactgatgggtcttgacaatttgccagtctgtgtcttttaattggagcatttagcccacttacaatttaaggttaatattgttatgtgtgaatttgatcctgtcattataatgttagctggttattttgctcgttagttgatgcagtttcttcctagcctcgatggtctttacgctttggcatgtttttgcagtggctggtaccggttgttcctttccatatttagtgcttccttcaggaactcttttagggcaggcctggtggtgacagaatctctcagcatttgcttatctgtaaagtattttatttctccttcgcttatgaagcttagtttggctggatatgaaattctgggttgaaaattcttttctttaagaatgttgaatattggcccccactctgttctggcttgtagagtttctgccaagagatcagctgttagtctgatgtgcttccctttgtgggtaacctgacttttctctctggctgcccttaacattttttccttcatttcaactttggtgaatctgacaattatgtgtcttggagttgctcttctcgaggagtctctttgtggcgttctctgtatttcctgaatttgaatgttggcctgccttgctagattggggaagttctcctagataatatcctgcagagtgttttccaacttggttccattctccctgtcactttcaggtagaccagtcagacatagatttggtcttttcacrtagtcccatatttcttggaggctttgttcctttctttttattcttttttctctaaaattatcttctcgcttcatttcattcatttgatcttccatcgctgataccctttcttccaattgattgaatcgactactgaggcttgtgcattcgtcacgtagttctcatgccgtggttttcagctccatcaggtcctttaaggacttgtctgtgttgattattctagttagcctttcatctaatctttttccaaggtttttaacttctttgccttgggttcgaacttcctcctttagctctgagtagtttgatcrtctgaagccttcttctctcaaatcatcaaagtcattctccatccagctttgctccattgtcggtgatgagctgcgttcctttggaggaggagaggcactctgattttcagaattttcagcttttctgctctgttttttccccatctttgtggttttatctacctttggtctttgatgatggtgatgtacagatgaggttttggtgaggatgtcctttctgtttgttagttttccttctaacagtcaggaccctcagctgcagatctgttggagtttgctggaggtccgctccagaccctgtttgcctgggtatcaccagcggaggctatagaatggcggatattggtgaacagcaaatgttgctgcctgattgttcctctggaagttttgtctcagaggagtacctggccgtgtgaggtgtcagtctgcccctactggggggtgtctctcagttaggctactcgggggtcagggacccacttgaggaggcagtctgtccattctcagatctcaagctgcatgctgggagaaccactactctcttcaaagctgtcagacagggacatttaagtctgcagaggtttctggctatgccctgcccccagaggtggagtctacagaggcaggcaggcctccttgagctgcggtgggctccacccagttcgagcttcctggctgctttgtttacctactcaagccttggcaatggtgggtgcccctcccccagcctggctgctgccttgcagtttgctctcagactgctgtgctagcaatgagcgaggcttcgtgggcgtaggacccttcgagccaggagcgagatacaatcttctggtgtgccttttgctaagaccgttggaaaagcgcagtattagggtgagagtgacccaattttccaggtgccatctgtcaccgcttcccttggctaggaaggggaattccctgaccccttgcgcttcccaggtgaggcgatgcctcgccttgcttcgactcacactcggtgcgctgtgcccactgtcctgcacccactgtctggcactccccagtgagatgaacccagtacctcagttggaaatgcaggaatcatttgtcttctgtgtcgctcacgctgggagctgtagactggagctgttcctattcggccatcctggctccaccctccccacgtccagttttatggtcaattttgataaaaatttcatatgcacttgaaaacaaagtatattttgtaattgttgggtgcagtgttctaaatatgtgttaatcatttgttaaatcttctccatctctgttgggtgggtttttttggtctgtttttttcatcaattgctaaggaataagtattataatctccaacagtaagtgtgaatttgtctattcctcattttaatcctgtccatttttcatttatatactttgagattatattactaggtgagtactaatttatgattgtttgaacttcctaaaggatttaacattttgttattttaatatgtccctccctatatctggtaatacattgtacctcgaagactattttgtctgatattaaaatagttaaagccaacttatttttagttagtgtttgtgtggtttaccttatttacatatttcaactttcatctttctgtgtcctaatatctatgggatgtctcttataagtaagatatagctaaattttgttttgatgaccagtctgacagtcttagtatttttatttgattcttgggccttgcccccagatattctgactcagagttgattggtgcccaagcatctgcattttaagaagcatcttgatgattctcttataggtgaataatgccttgagaaatactgggtaaggagtgcaatcatattgccaagtggatatcaaagtgtttaatgacaggacttatagagcagaggtataagactaagaatgagatgctaataggaagctagtacatattaacgataagacaaggagggaggggagtatagctgatggtccagagcatctaaagaaggcagatttttaatataagggtagaggagtaatgcactagaagtagctttggagtgttagcaaggcatttcctattttctgaactccaaggtaattagaatattgaaaagtgaacagcatctatctgagaggacataaggagaagttgtgttttcaaggtagaggcggagatttgttaatagaatgagattgaggatagggtataatggaattttgtaaccatggagtaagattccaggagaaaagtggaaatatttggagaaggaaacaattaggagtttaatgatgggtagaggaagcaaaagcagtctgrgaataagaatatgagagaccaattaaggacccaatatgtatagtaacagaggataactgggatataaatgtcttgagtgtagctggtggcaaagtttccaaaagaaactttatctcagcagtcccctgtatgtgagagtggagacttgattttgtctgcaaggaatgcttttgtgcaaagtcccagagagcaggccaacatgagattactagttagttctcaagacactgaccaagttttagaagtaatagcagtaattccgtttagaaacttctgctttgggactgggtgcggtgggtcacgcctgtaatcccagcacgttgggaggtcaaggtcggtggatcacgtgaggtcaggagtttgagaccagcctggtcaacattgtgaaaccccatctctactaaaaatacaaaaattagctgggcgtggtggcacacacctgtaatcctagctactcgggaagctgaggtaggaaaatggcttgaacccgggatgcggaggttgcagtgacttgagatcaggccactgcactccagcctgggcaacagagcgagactctgtctcaaaaacaaaacaaaacaaaaagacaaatgtcatataattacgttactgggtttactggaatgagtgtggcactaattgattcctttaaagacagtcttacctgaattgtgttattgtggaagaatgggacatgggctgaaaatgatttgctttactgttcattgtatcttaagccagttgacttctgtcttgtttttttttttgttgtttttttttttgttttttttgagatggagttttgttcttgttgcccaggccggagtgcagtggcacaataattttggctcactacaacctccacctcccaggttcaagcgattctcctgcctcagcctcccgagtagctgggattacaggcacccaccaccacgcctggctaaatttttttgtattttgagtagagactgggtttcacaatgttggccaggctggtctcaaactcctgacctcaggtgatccacccacctaggcctcccaacgtgctgggattacaggagtgagccaccatgcctggccatgtcttccatttttgagaagaatgcactgcgtgagtgataacataagtaaaaggcatttttaaatgataaccttaagttgtcatggacatgtaaatcactttgactgttgttataataaagtgaacagttcttttctatagaaagaataactaaagcttataaagcctttacctaaataacttgggagagcactgttacctgtagcagcttttatattgcagttatagtttttgttttagtgaaacctgtgcgaagggatctccagaattagtgtagattgatgaatacacacttttcaaaactcttagaaacagttgcctctttttttttcttttttttttaattttattattattatactttaagttttagggtacatgtgcacaatgtgcaggtttgttacatatgtatacatstgccatgttggtgtgctgcacccaacagttgcctcttttacttcaaatctattaagagccaaccaaaaatagagatgatagcagtgatgatgtaattgtttaatcttaagtaccaggtgaagctaatgagtttaatgtatgtactcagtaattactaacattttggatttactgtttagtacagaggtgttcataactgaattgaaaagaaaaggaagaaaagtttaattttgtggtattcttcattcattcctgtctttaactttgctgtcccaagtctaatgggagtaaatacaaatacatggctactcttaattatgaaaacaagacttaatgaatttagaatttagtcttttcacaaactataaataaggaaattgatttgtcatttctagttcactttaatggtaatttaactctctaatttacacattgcatacaattgatatttattgaattcctctttggacagcctaacaatgtacagacactgggaagaaattagaggaatagtctctatcttcactaagcatatgaggtgggacactttttattgcttactttggctaggcatccatttacatactaattcatttaattctcacaacaaccctatgaggcaggtactgttagtgcccctattcatttagcgtggaagcaattgaagcacagaggcactacatgacttgtcctggatcatatagttagtaagttatggaactgcgattcaaacccaggcagtctgcttcaagaacctgtgctcctgatcactactctgtactgcctcttgttccagaacagtattaagaaaaaaaaaaatctgatactgttcaatatagtagccaatagcctcatgtggcaatttaaatttaaatttaaattgattaaaattaaaaatctagctcctcagttaaacaagccacatttcaattgctaagtagtcacatgttgctaatggttaccgtattggacatttcgttctttctttttttatttattattattattattattttgaaaaagagtctcattctgttgcccaagctggagtgcagtggcaccatatcggctcactgcaacctctgcctcccaggatcaagaattcttgtgcctcagcctcctgagtagctgagattacasgtgcgtgccaccatgcctggctaattgttgtatttttagtagagacaggtttcgccatgttggccaggctggtctcaaactcctggcctcaagtgatctgcctgcctcagactccaaatgtgctgggattataggcatgagccaccacacctggcctgtattgggcatttctatggctgtagaaaattccatgggacagcactgatatagaaaacaagtgttatagtagttcaagaaagtaagtgtaaaattatcctaggcactaatgattgaatgggtggcttaagtaagtggctagatggactgtccccaagaagagggccatattataggtgaaaaagaargaaacaatagtaagttcagttctggacatggtgaaaggaggtatctgtgagctagccacctggagctgtcctggaaatgaaatgctgaagctcaaaagacaattctgagttggaatcatatttatagaaataatcccgaaccactagaactgatgcaatttctaaaagagaaaatttagaaaaaggttggggtatatttagagagttgatgggaaaagaggggtcagagaaagactgattaaagaaataagaggatagccaaaatgaacgacaagagcaaagagagatgagaatttcatgaaagagggattgatttttagtaagaaacagtagcaatataaggactgagacaggaaaaaaaaatactggatatgttgtaaagtctctgctgacctttgaaagtgcaatggaatatttgtggcagaaaccaaattatatgactggcagagaggaaatagagacagaggtttaactcaatttttcacgaagtttagacgttaaataaaagagtgaatgggtacagaatggcagggaaagtgaagggcttttttttaattagaaaaaaataagcttgactgaaggcaaaagagcagtaactggaagtgaagagacagcagtaacctttacactattcatttgttcatttcttccttcaatacatatgttacatacctccttggtatcagacactgtgcaaggaactggaagtatagcagtgaatgagataaattaatttctgctcctgtggtatattctcctagtatctctttttcacccttctctctttgttaccaactccctcctaagacctcctacctcccttcctctctttaataatgattctgcaggtacaaatactaaaccaaacttattagcatctacaatatccactgttctttcttgatgtgtatcattttttttctaaatatgtttctgcattttaaaagttacaaacaatgggccaggcgcggtggcttacgcctgtaatcccagcactttgggaggccaaggcaggcggatcacaaggtcaggagtttgagaccagcctggccaatatggtgaaaccccatttctactaaaaaatacaaaaattagccagacgtggtgacatgtgcctgtaatcccagccacttgggaggctgaggcaggagaatcgctgaacccagggaggcrgaggttgcagtgagctgaaatcatgccactgcactccagcctgggtgacagagtgagactccatctcaaaaaaaaaaaaaaaaaaaagttacagacaatgaatgaactcttcaaatgaaacaaaaccttatgtacataggtcttgattttgttttcaagaaaaagtcaaaagctgaataaatgagaaggtccaaagtggcagcatcgttgaggagtactgttcctttttccatttgatgatcagctgtactgttgcttcctttattgttaagaaaatcctttattgtatagctgtaaggtctgtaatgactttaagtatcagatccttgatgacctgctttaaatataaaacacacttctcatagtttggcattacctcccatcatgttgggttctcagtatagcaccaaagtactacttactgtgtcaagagcaatacttgttataatgtcaagctttcccttggaaattactcacacatgtgaaagatgtaacatcataactagaagctgtaagctactgatttaaaattgttgggattcattccatgtgaattgggttaaacttagccagtattaagttggaaaggaaagaagacaccttatcttctgattttaaaaggaaacaggaaaggatttgactaggaaaggtaatttgtggtagagaagagtttagatgagtgagtcagtctggcttgggagtatgcatagcctgaaaggtgctggctaacaggtttggtacaatgcaaggctaagagggtatgctgcctagaaatttacattggatgatggctattctcagaggagttatagtcctttagaggaggcaacattaggtacttgaaataatttagagaaaaaaaatggtgtactgcagtggttgccaaacttaatcatgtatcagaatcacctagggaactttaaaaaaaaaaaatacagactcttgagccccatcccagaagtttcaaggacagtccaggaatctgtattttttaacaaacttcctattggctttgatttagtttgctcttggaactgtactggagaaacactggaattcggtaaataataaactgaacataataaaaacctggaggatgagttatcctaaatttattcatgtatttaataaacatgtctaagcatctaatatatgctagatattatgctattttctagggctaaaggatgaataatacatggtccgtgcccttacactcagagtctagaagaagagatatcagtagataaataagacagtgtgcttagtgaaatgatagaggtgtgtaggatgctatggaagcaaataggaggagtaccaaacctgctctggttgatttgggcccagaaggaaggtaggatcagaaagacttaactgaagtcgctgagctttttcataacagataacttactctttataagacctcatactgctttttctcattgttttgcttagaaatcttgctaaaacatatgttttttctgcttggtttaacttttttactgctaacttgacatgatcacatattataagttatttttgccatataacaaaatagtgatgccttctattgtaatatgcagaattaatttccattatcccaaatggtcctcaactgctgcaactgtgctattctcatttttctgtcatactgtctttgatgtcagtctgataattgtcttcttaatgtcaatgtggctgtttatagagtagcatatttatttaaatttttccttggccaaaaggatttggacaaaaaaattgtgaataagtaaaagtgtaaagcattaagttgaatgtagtatgtgagttttagtgcattttatgacatctattttaactactgagctatcttgtttttttaattattatgtcaaagccagtagatactttagaaatcacataatacaattctttcattttataggcaaagaaactgaggctccaagataccagggacgatcagtggcaatcaaggagtagaatctaggcctcctgatactgtaatagtcccattctatgaaagcagcagttcttaacgaggggattacagcagaatcgtttggagaattgttcaaaatacacatgcctagtatttaatcccaaaggtcctgattcagtaagattggcatgtatatttcttaaaaaaaattaattcttggaaaatgccgatgtgtactcatgaaccagcatactttaatctgcttgccatatatcataatttgtttctgaatagttatacagtacaggcagtaaatgcctatagagcctagacatgagaaaaagagagtctttggagataactgtgagtgagaaagtcattggagggttttgagcaaaagagcgtatgatataacttgcatttttaaaggatcactctagctactgtatagaaaacaaacagggaggttgggggatgcctctagtagggagatcagtcagagaccattatatcaattcaggcaaggagatagagactttgacctgggtggtaatagtggagatagggagaaatgaacagatttttgacatatttttttaaagtcaaagaagcagaacttgttggcaaatgcaataatgcaatatgaaaggagtcaaggatcagtctyaagtttttggcccaagtaactggaagaataaaattgccttttagatgaaattgccacaagaatgagtattgatagaaaagaaaagagactgaagaactaaaccttgagacacattagcaattagaaatcagagagataagaaggacccaaatggaagctgaaaagcactagccaatgagataggaagaaaactagaagagtgtgatatcccagaagccaggtgaaaaatgttgcaagacacgaggtggatcaaatggtggagtaaaatgaaaactgttaattgaccattggagttaacaatgtggaggtcattggtgaccttgacaaggaatagttcattggggtcattagggcataagttcgatagaaatgagttcaaaagagaatgtgaagaaaaggattaccgctaagaatagacaactctttggaggacttttgctgtgaaaaggaaaaggaaagtggcatggtagctggaagaggacttgaggtcaagagaaggattttttttagatgaggaaaattatgccatgtttgtatgctgagaattgaattgtgtggtgaggattatccagctgagaaggaaaatttgatggtataagggagagacgggagaactggtagaattacatctttaagcaagaaagtggggatgggatctcatgcacagaaggaggatttagccttagggacataggcagcctaagaaaacagcaagaaggaaagcagattatgtgggcacagatggagaaaggcagataaatacaggaagaacaggttgtagaagctcctttctaattgcttctgcactaggaagcaaagttagttttaactgaggatggggaagagatattagaagtttataaagaggaaaaagtatgaaatagttatctggaagaggaaaatggtaaattaactgtggaattgattgaaggacagctccaaaggtacacttaaatttagaaagaatccattcatcttgaatgcgtatttttccgagctccacattcggttgctgggttgtagacatgaaagagggtaaaaggtggatataaccaagagtggaattttgtcagatgaatacaatgtgagagaggggcaaaggagtgactgtatgatggatcatgaaatttatgcttagttaggagggaggtgaggcttcggaagtggaacagagagctgtgaaagatgttaagattaattaactataaggtcctctggagtaaaaattattaaagtattaaagagagtaagcttaaaagataagaggtagcgatcagaaagtcagagtaagatgctgaaatgctttaaaccggaataagggtacttactagtttgtttagtggctatattaattattttaattgattgatttgttaggttcatgattacaaagaaggaaccccagaagagaagacctactacatagaattatgggatgttggaggctctgtgggcagtgccagcagcgtgaaaagcacaagagcagtattctacaactcygtaaatggtaaarcatttttaaatttctatcttatattaatggtctaagagtatagatcatctgatatgtaatgccatagcatgccagactcatcttaatttgagaaagatataatgtactcacaacccttgatttaaatctgcatagtacattccagtttgcgtttctacattgtaaccatctaattcagaacattaaacattaagtgtttctatttatattattgtcataaactaaatattgagaaataaaatcatatttttggtacttsacataaaacatggaacttaaaatgttgtcctctggggttgctctgtctccagtgagttgagtaagtacagtaggaccataggagtcccatagtcttaagccagataacacagagatagagggatttctttcatctgccccttagaaagagccctaaggctctttctcagctagttataaagagctgcttaagggggtctttatgggtgcagaaattttatccagttatagatattcaaatacctggagcagacttccagatggagctgtgtaatatacgacataatttcctttcatagagtacctactctgtgtcaagagactaaactgcttatacctgtgatttgccaatagagtttctttcttagtctttttaaaaattcatttttaaaacctgtttttactgtgaaacataatttcaacttctgtttgattaatataccaaaggatttggcatttccctcctggtaaatgcatagccattaatagacttcatttatgctgtgcttagatctcactcaatattaggtaagcattgcatttattcagtatgttcattccttatattcctcttctgatgtcttcccagatcatgaggtgttgtagactctacaaaaagatgtagagaaggttcttttcattggatacatattatagaatacagaatgagatgtgtcagttcagacccatatcctatttagctcagaattctatctgaaaatgtmagtcttaataaagaaacaaagcattcataaatgagacaaaaatagttataagatgaccttgatatatgccatcatcatgcaaaaaggtatatacaatggtatatatgaatagaatgcatataaataagaaaaacaacaataagactaagtatagtgtgaggtgacctcttagagaaggaagtgaaacctagtttagacttatactagagtgatcaacttgtatcagtaaaattacttgtcaaattaagatatctatctgatctggcacagagaagtctgaatatataacacctttgatatttaggtatttttgagacagaggtacaataaaaattatgaataaataatagagataaataccactcaaatcctagaagctatggaattctgagttgtaaacttgtaagtgctgaagaagaaatccatctaatctatatttgtttatcttttctgtacctactattcattagtgatttgtctcctttaatattattgaaagaattgcatatatcctatgttgattttgcagataagactgaaatatatttccatttcttaaaagtaaaaaaaaaaaactgcatttattgaaaaacctatttctgtgttctttcaccttagctctggaacattcttcctggtagaagcactcaaagttctttattccatctactatccttagtttcctaagaaactgaacataaggatcactctatccaaatgcacagtccatattcttagcgataactttcttcccttaataccctacattcttccctctctaatagcctaggctagtaatccttcagaaggaaataatgaagtgtctttacttctctcccttaagattaagatatattatcatatcaccctgactcctttcatctcrgccccaccttgattcttctagcacatgttctacaaagcaataactctcagcccaaatgaaagagaaagaataggggaaaagggtactcaaatgcccttaaaagctcaaaagtcttacctaaagatcctcagtaaagtcttccctgtccatctaatagccaacttaggcctttgtaattcttttactcccccgtccaaaattctcacccatagttttgccatatttatagcctggggaaaaggaaagggagaaaatatatgccagttttttgccctaaaatggagattttattctgcttaccaccagtctttactgtcagattacctgagtgcaaattctgacttaccatgtgcccaaggacaagttactctacttctctgaactttagttttctcttgtgtataaagataataataattcttcataggactgttctgaaaattaaattagataacacatgtaaagcacaatatttagtacattagtactgaataaatattagctgtagtctttaatggtggttctttattcctttttttaaatctgtgccactgatgctgattaaaacccctcattgaggaaggaagagtgggtacaattggatattagggcaagtgtcagatctctattagtttcagacaccagaagagatgcaggtttatctaagctggctggaacaagtcagctatagcttgtacaagccctttagttacacagatggctataaaaactgtagaagccagctaattctacctcttctgcttttctttttcaaattgacacataccacctcttgaagatggaggaatcattggtttcatgtcctattcacaatctgggtaatatagaaaagggttgggagtttgaaacctgtagtgttttgaccataaggtgatatcctaaattctagtgggcatcaaagtttttcctcttttgtctatatcttgctgtaataattaattccctgattttcctttctatctaggattttaattgattctcttcagttgtattttattgtatttctgggcctcgttacattttgttatttttctcaatctatcaaaatccgtgcatgtactttctactatccatacttctttactatttaatgtctcacccactctcttatagtggcatatttcttttgctctaataactaaatctcttacaggtaggaagcttacataactaatcattattcaaagaactagaaaattagacatttgaatagattagtctcagatgatctacaggacactattttgtcagctaaagaatagcaattgggtggatcatgaggtcaggagatcgagaccatcctggctaacaaggtgaaaccccgtctctactaaaaatacaaaaaattagccgggcgcggtggcgggcgcctgtagtcccagctactcgggaggctgaggcaggagaatggcgtgaacccgggaagcggagcttgcagtgagccgagattgcgccactgcagtccgcagtccggcctgggcgacagagcgagactccgtctcaaaaaaaaaaaaaaaaaaaaaaaaaagaatagcaattgtatcaaatcagtactattttagtagattttcattacctaatattacttttagtgagtataagtaatatatgtatgtactggtatctatggcagtactgtgtacagtgaagaaacaacataactttttgagtgaataatttcatatgtacttgaagtagttttgattctcttgattaataaagtggttctacaggtaggaacaggcatggagtaggcactcaggaagtgttgaatgaagtaaagatctgctaaaagtttaatgggatttcgtcagcccttgtaaaataaagagttataaaactgacagagaaaggtttatggctatttataaatatttgtagagaaaattttaaaataattgtctctgagttgttagtcatactagaatgctagattcattaagcaacctaatgcttctgtttactaagcttcatttggccaattgtgaaatgaagaggaattgttaagggattaacattgttttctctgattattttaggtattattttcgtacacgacttaacaaataagaagtcctcccaaaacttgcgtcgttggtcattggaagctctcaacagggatttggtgccaactggagtcttggtgacaaatgggtgagccaatttcacaattggtttgaaagattgtagcaatcacaggaatgtacttccctgaataacannnnnnnnnnnnnnnnnnnnnnnnnnnnnnnnnnnnnnnnnnnnnnnnnnnnnnnnnnnnnnnnnnnnnnnnnnnnnnnnnnnnnnnnnnnnnnnnnnnnnnnnnnnnnnnnnnnnnnnnnnnnnnnnnnnnnnnnnnnnnnnnnnnnnnnnnnnnnnnnnnnnnnnnnnnnnnnnnnnnnnnnnnnnnnnnnnnnnnnnnnnnnnnntttcttcctatggattgtgcttttgatatcatgtctcagaactctttgcctaatcctagatgatgcaggttttctcttatgttttcctctacagattttatggttttacatttttatagtaaaacatttatataaaacattttaagttttataggtttgcatttagatttatgatctaagttagttttgtacgagatgggaggttttggttgaggttaacgtttgcatatgaatgtctaactattccagcaccatttattgaaaagatatcctttctccattgaattgcttttgctcctttgccaaaaatcagttgaccatattagtatgagtcaatttctggactctagttctgttccattgatctatgtgtctgtcccttcaccagtactacgctgtcttaattatagtcttaaaattgagcagtatgattccttctactttattctttttcataattgtttagctattatagtttatttgtttttccacatgaatttttagaatcagcttgtctatattgacaaaaattttggttggatttttattagaattgcattgaacctattgatcacattggagagaattaacatctttattctgttgcatcttccagttcatgaacacaatatatctctaaatttatttagatcttcttttatttctcttaccagcattgtgtagttttcagcatacaaatcctgtgcatgttttattagatttataccaaaatatttaatattttttaagctattgtaaattgtttttttgttttgttttgttttgttttgagactgagccttgctctgttgccaggctggagtgcagtagcacgatctcagttcactgcaacctctgtctcccaggttcaagcaattattgtgcctcggcctcccaagtagctgggatacctggctgatttttgtatttttggcagagacagggtttcaccatcttggcaaggctgatctcgaattcctgacctcaggtgatccacctgccttggcctcccaaagtgctgggttayaggcatgagccaccatacctggccataaatggtatatttaaacttcagtttcaaattttccattgctagtataaaaaaaaatagaattgattytgagtgctgacctgtatcttgtgaccagagttttttagtacaatccttaggatgctctacatagacaggtttatttcttccttttcaatctgtgtgcttgttgtcttatttcttgccttttcgcactggcagcaacttccaaaagggtactaactaggagtgataagagtgaatatctatgtcttactccaatcttagggggaaagcattcatttcactattaagtatgatgtcagctttaggttttttttgttgacatcatttatcaggttgagaacatttctttctatccctaatttgctgatagttttgttaatatcatgaacagatactgaattctgtcaaaagccttttctgcatcaattgatatggacatgtggctgcttctttaggctgtcagtatggtggattacgttcactgattttcaatactggtggattacattcactgattttcaaatattgaaccagccttccattccttggtcatggtgtattattcattttatgtgttgctggatttgatttgctaatattttgttgaggatttttatccatgttcatgacaggcattggtgtgtagttttctgttctcataatgtctttgactggttttggtgtgaggataatgttggcctcatagaattaattggaagtattccttcctcttctattttttggaagaaattgagtatatttggtgttatttcttctttgaaggtttggtagaatttaccaagagaccatctgggcctggaggtttcttatttgaaaggtttttaaccacaaagtcaacttctttagtaattaggattgttcaagttatttatttcatcttggatgagtttttgtaatttgtgattttcaaggaattccatctatttcattaaattttttaatgtatatcaatagagttgtttatagtatttgtttattgtccttttgatagttgcacagtttgtagtgatatgacctttttcattctgattttggtattttatgtcttctctttttcttgtcagacttgtagaggtttatcaattgtattgatttttttccaaagaagcaacttttggtttcattgatttttctctattgtttttccatatacagtttaattgatttctactcttatttctttccttctgcttgcttttggtttattttgttctctatagcttcttagattactkactggataccttgcatttttgccaatacaagtattttaatgctataaatttccctctaaacactgctttagctgcatcctgcaaatgtttaaatgtattacttttattttcatttagttcaaaatattttctaatactccttgagattttcccataggctgtttagaaatgtgttgtttagtttccatgtatttagaggctttccagttattytttgctattgacttctagcttaattttattatgatccaagaacatactttatatgatttcacttattttatatttgtgcaacacccggtatgtgacctgggtgttgttgtctctgttgtttcagttttcagtgtctttggtacactaagtaggatcaaatccatgcatgcacagctttggcaatgagctcaagcattcacgaactacttcatggggttgctttctcacacttcaccctgtctacagtctctgccatactttgtgatttgctggggctccctttttcggtccccaggccaaattttctcatgcacttgcacaactgcacctatgtccagggccaagtggtagaaggacaaagaataaaagcaatgggagtttgccccactgtcttgagatacagttcyatcagtcagaaaaatttcccttctgggcccggcgcggtggctcacgcctgtaatctcagcactttgggaggccaaggcgggcggatcatgaggtcaggagatcgagaccatcctggctaacatggtgaaaccctgtctctactaaaaatacaaaagattagccaggcgttgtggcgggcgcctgtagtcccagctacttgggaggctgaggcaggagaatggcatgaacctgggagacggagcttgcagtgagccgagatcaygccactgcaccccagcttgggcaacagagtgagactccgtctcaaaaaaaaaaaaaaagaaaaatttcccttcctctgtatttgtaagcaggygttcccaacccctggtccatggcctgttaggaaccaggccacacagtgggaggtgagtggcaggtgagtgagcattaccatctgagctccacctcctgtcagattagcagaggcattagattctcataggagcgtgaatcctattgtgaactgtgcatgtgagggatctaggttgcaggcttcttatgataatctaactaatgcctgatgatctgaggtggaacagcttcatcctgaaaccatcccccaaacacctgtccatggaaaaattgtctgccatgaaactagtctctggtaccaaaaaggttggggactgttgtttttgagcattctgcttgtgttatagcctttgccacaactgtcatgaaattgctcagaagctggcttacaacagaaggaaaaatattgtatttctacactatctccaagtattcgtgtgtcccctttcttgtttcatgagccagaactataggccttcttctggagtattctgttcacacttttgggttttaagctgagttgcattcagacaaggggatatggaaggaaactgctaattcaatggttcttcacattgcagtcttccttaatatgctcactattaatttttcagagtcctcaaatagccacttcatgtatcctgtccaggttttatagttgcattcactgggaaagacaggatagagtttgcttattctgtcttacctagaacagaaccccattttctatcttttgattgaagcaagtctttcaaaggctttgttttctgtgtggaagtctaattgttatgtgaaacctaaatatagtataagtttgagtatatatatgtagattccagcaagacctaataaagaataagcacaactaatttaaaacctatatttcaaagcctcattgatatttatttcctatctcaattcctttcatcactgatgtcttcattaacctagcttgttctctattttctactaaaatttctacttaagaaacttatccttaaatttagggttaggagacagcatattcatatcagaaagaaatctgcatttttgtcagggaattcagtaaaagttctatacccatttgcattttgacactacagtttcattttgattctatagataaacctgcaaatgtataaaacaaccttaatacattggtgtgctttgttggtgcattattgtatagcatcaaaaaatttggaaacaaccctagtgtccgagcaacgaaagattcattgaataaataatggcatatccacatactggagtagtattcaatgtttaaaaaagaatcaggaagatctctatgaactaaaatagaaagatctacagagggtacattattaggtttaacaaatcaaaatgcagagaatatatatcgtatacctcctattgtataagaaagaaaagaaataatatgtatttatatttggataaagaatcagtgaaaaataagaaactaataaaaatggtaacctatagggggccaggggagatgggtggatgggtacagtggtaggagcaagactgcttagcatatatcttttatatcagtttgagtttttagccatatttaaacaatttaggtaaattttatattatgtagtttttaccacaataactttttttaactttttattatagaaaattttaaacatatgtaaatacaaagaatggaaaatgaactcccatatacccgttgcctagtttcaacaattatcaacatatagctagtcttgtttcatccatatctctacccactttctatcttctcccactctcaactggattattttgaaccaaatgttaaaacatcatatcatttcatccatatatactttaaaacataagggcttttttttaacatgacaccatataattatcacagctaaaactttaataataattctttaataaccaaatattattttaatttccccaattgtctcataaatgttataattgattttttcgaaatagtatctaaataaggtccactggttgtatttggtttcttaagtatcttttaatcttaggttctccctttttggttgttttttttccaacctcctagcactttatttgtagaagaagatggctgtttgtcttgtacagtttcctatattctggatttgctgattgtctccctgtattgtcttttaaacttgtttctctgaattctaaatcttctctgaagtgataattaaatatagtggtctgaaagatgcaagtttttttgtctttatttttccacccagtattatgcatataatatgatacctggctgtgtgtctctttgtgatgttaaggagctatcagccttatccatccatgataaagttcttcagaagtttaccaaagaagatttcaagattaaattttaaattggatgctgcaagattttatgaaaaagttaaaaggaaagctaaaaagagaaataagagagcaaactatatatgtatgctttatatgtgtcagtgtgcaaggaattgtgcaagactatatgagagatgtatgtacatcaaagatgatatttgatagaagatatgcaaaactttgtatgtgagacagaaggaaacagtcctaaaggaaagacactctcaaaacttcattccctaacaaagcgaattgtagctttgaaccatgtctctttaattagagttgctgttgatatgaataatcaaaggtcttgatcatgctattattggctttgatgcaataaatagaatggtaatatttttgtgagatgggaggttgtatagtaaaacacttgtgttccgaggctgaacagtttgctgaggcgctgtaagattattgtgaagggcataaatacttagtaactttgccccctaccccaatttagaatttctgtaagagaaagaaaagtagtgttaaaggaagaaaaaaagctatgctcgactgggttgtagtgattggattatgcaatattgatttactgtcataaattgtgcacaaccagattttgctgactgttgtaagttgagcttataacgtgtcagaaatccaaatctgttttatttctaatatgtgagtagaatttaaattaattcaacagcaatggcctctgtgttcttttcagtaatgagaagtatcatttacatcaccactctgttctttggataaataaattttttaaaaaataaggattgtaatagccagtgatccaaggccactaaccctaagtggttcttattgcccgtcctctatctcccatggctctcatttcaggaaacaactacttggtactaagttctttccttttactattcattttgcatttcagctgtttccttccatttccatgtgtttaatccacctttcccaggctatagtatcacctatatttgatttattctargcttcagcttccctatttctattttcttattcttcttatttctttactattcagacagaaatgtgtattgtagatatagaattaatgcataccccaaaaggtacccaagaagcttgccattttctcttctagcacaaggcttgagtgccatgctaggcttttgggtttttgctacgatgaggcttaaatccactctctgcttctactctgaaatattcctgagctgttatgttaaccttagaagacacagctacattggaagttaagtccactgactgtaatatacttgatgggcacttagttgttcaattattcagtattgttcaatattcaataaaaacatgggaccaaattttgagaagttagatgaatagctggaatctgatgatgaggatggattgataaaagaacaagtagatggaagaagttggaaggaaagtaggtttgtaggtgaaggcagcaaaaatcagttaattttcagtaaaatagtgtaacttagttgcacttaaatattacacatctacaccagaaagatacattctattcacctcttcattattatttatcacagggattatgatcaagaacagtttgctgataaccaaataccactgttggtaatagggactaaactggaccagattcatgaaacaaagcgccatgaagttttaactaggactgctttcctggctgaggatttcaatccagaagaaattaatttggtatgtattttcactaatgcatgcttgtattattatcgggtaaagacaaaactgaagacatattcaaataatatattctagtgaaagaagctttatacttgaaatcaggctatttggattctagtctaaacgtagtcaagattggaatcaacatatctagactgagagatgtgcacagtcacttcagccttttatgttggtctgttggaatgttccaactttattctatgaataatttaaatcataggcttctttttttgaaacagagtctcgctctgtcgcccagactggagtgcagtggcgcgttctcagctcactgcagcctctacctcctgggttcaagcgattctcatgcttaggccacctgagtagctgggattacaggcatgtaccaccatgtccagctaattttttaaatatttttagtagagatggggttttgccatgttgcccaggctagtcttgaactcttgactggatttgccctccttggcctcccaaagtgctgggattacaggcgcgagccactgcacctggcccatgggctttttcttgagaaaggtttttaaaatcacaccaaaattaaaataaattgattaaagtggcactataagcatattattcttgcttttaaaaagcctcttagcttcttaaactacaaattttaccttaaagggcaacgtaacaaatacatgaaaaaattgcaaaccttaaactaggagtgcttcataaggactaatttatgtacacttatgcatatatagaggattgagtcccttgatgagataactagctcaatgagaactgagcgcgtaaaaaagctaagaaatggttgtcatgtaagcctgttaggatcccagaaaaagatcctggccagcaatttcagtcatggtcatgttgttcacaaataggatttctgcaactgtgcactggcattccagaaatgcagtggtggtggtgtaatagtactagtgagcaacatttattgagcacttacgggttgaaaactgttttagttatttacatacattatctcacatgcatcatcttcacaatcaactctataagacaggtactattactatcctctttttaaagataagaaggagagacgtaacaagaccaaggaagtttacccaggtcaattagggtattcagattcagagcctgtgctctacagttaagcctcttttgcacttaattaatccttcaactcaccttgagaatttggcagctgaaaaaactcttagaaatcatctagaccaacagttacccaaatctgattgtgtatttatattaccaatagtacctatggaaaattttgaataaccgtcccacagctggagctttttattcatcaagcctggcaggaggaccaggaatctgcagttttaacaaataactcaggtgcttctgatgcctttattctatgaatcaatgtttatgaacactgcttggttcagccccacctctacccccagcttctgcctgccattccattgttttttacattctgctttgcagcggagagcccctcatttttctcagctgccacaatggaatatttgatgtgcataccccaggtagtcagcactgaaccatgatattccaaaggattcttgctatatagatatataatattcttgttgaagaagtgctgagattactttgaacattatttccaaagagaaatttaccattgaaaacacttaatttgtttcagcgcttactttaatatattttagaatgtatctgtttctagtgcctgtgggtttctctgataatcgcgtgcakgtgtgtgtgtgtgtgtgtgtgtgtgtgtgtgtgttattcctacttgccttacaaagccaaggccatcttttaactgtgagtcagatgtaaaggtactcaggtagtgagactttagcacatacagtctccaaagagttcaaatataacatgtttttggcctttatcagtgtacagcttcaagaacacagcacacataacaataggagagggtcagagaatgcagggaagaaaaaatgaggaggaaaattgaatacaagagtttcaaaaagaaatagcaatcagaaattcagcaattaaatataaagcctcaaataaaaactaatgtaacattattagtgctaacaycagttactgtataaatttccttaaaactgtagaaaagtaagaattaacaaatgtatacatcaaaggtggaatcagagttaataaataactgcctgaatacatgcaaattgtttaaattataaataggtgaaccattacttattttctaaaatcctgttaggcttattgtaccctgtaaaaacttttctctgttacgtatttactttgaagcgatcatattgaagtatcttccctagttaatagtcctttctcaagctcagtcaagctatttggagctattaattttcaggcttttccctcagccatgataaatggcagatggctctttcagctctaaatttctyatcccaaaaatcatagtgtttctctaggctggtcgacctgaaattatggaaccatagaattaaggttttgggggtgtttttttgtttgcttgttgtttgctttagtttttgtatttagtacttcagctctatttagaattgtctcaaacttttgacattctgatgactagctaatcaatatctattttataaaacatttctaccacagatctaaggtttgtctcttatatgccccaattgctgtagaaatgtgttcaaacactatttcaaataccatagttagtgcaatgatgtttcagtctacataatccatatatggaattatctttattgtggtaagtgcttgttgtgcctgaaaattcaatctgctagcattttcttagattgaagagaggaggactaatattttactacccagtatgtccaggtatggattatttaatttttcacaaaaatcccgtgaaataaaatattgttatccccattccacaaatcagtaagcccaaatttaaaggtttagtaccctaaccagtgttacacagagtagaaatgttgggatggatattctgatttattgcttgctggctttgaagacccctaatttctagtactctgtgatctttgacaactttgttgtagcctctcttttttgtggttttagagaatgtattatcatttctggctaaaatttaaagtgtgagccttgaaatgttgcatatgaataaaataggaggcttcattagaaaggaatcatgtgggcctggagattgcaaaaacagaataaatgtaataatagtaatttcagtaatttctaggggcacagagggtctatagctaaaagacaaaatttcatacttgcaaaggagcttacatgatagcccttatagtttggtcttaggtacatttcaggtaaaaatcaaagtactctatctctcaaggtcacaagtcaatggtgacaagcaaaaaaaaaaaaaaacagctagactggaattccagcggatagtaggccttttaaggttttaaagttattgtaatgattaatgttccagatcgttttgtcccttctgggcccattttttttccctataataaaattccatcaaagagtagtaatatatctttattatcaaacaatagtagtagatgtttattaccaaaaataatatatctttgtggcctaccaaaagatgtagtaccttgcatctaaagagaaatccttggcaattgttctgtttgttctttgcacctctaaatccttattttcttgctttctccaattcatatgaactgcatagtactaaattagttgagcactggtgattaactagtactaaaagtgaaatgcttactgtttttcatggctctctctctctggttttcggggtaaatgtaggtaggtcactccagtagtaccttggttttgatattagtaaaatattagtaatcttgtcttcctctatgaattatttgatgatgaatacactgatttggtatactctaaaattgtttaaattacaaagattaagtgaccttattttcctttaatactttcctcctttgtgcaccataatttgaaaattatttgaatattttgtgagagtattgtgcctaatagtattatgcctatagaaatatgcaacaggataagttatgaatagcaacgagcttgggtttcctaactttcaattgtggatcttatgttttatcttctaggactgcacaaatccacggtacttagctgcaggttcttccaatgctgtcaagctcagtaggttttttgataaggtaatggtttcaattaagttatttttaaacttaatttatatattatgagagtttaaaatttttttgtagaatcctatgacctttatttttttgtccaaaacttcacagcctggaataatccttgttttgatctctcttatctgttggtataattgcccaaggcctgctgacgtatttattccatcaccagtgttctctaagtaaagggcaaaagctactggatttaaatgggggttttaaaaagatatctaattcctctctttaaaagaatttctacttacccattttctagctctttttttcacttattcaccctcccacccccataaaggcactgaactgaggagattctgcttaaagccctgagttctttttgctctcctagctgttaatattctctacataaatgttactgttaccttttaaggtaatgtcttcttgatttcctagtgtttccctctcagaaatatttgcattccaattattgactctctgctaacattgttttattgtcctcagctggaaggaaaatgtagaatgactcagcatactggtaaattagagcactctttgtctttccttcacaaagccatacaactttattgcacatagtattgaccaagtttaagttgtttgtccaatgctcacattgcatagtaaggtaaaacaggatgtctttctgcatgtattattgaaaaaggttaattcctgtgttatatttctttttaagtgacatctcctaagaaaatcatcttccccatagctcttctttatcaatcatttttttcttttaactatttagggatttaataattggcccttttgttcagcattggataagccccacctttagataatttgggatttaatatttggcctttttatcagcactagataagctccagcaccctcctcgattaatattaggccactaggaaaattttgcttcactgcaaaacttcttaactgatatgtgggaaatagggtacagatgtgcctagatgctgatttccctcagttctcagagcagccagggtcctcagggtgggggggttgggtgattggcaaccgcttccattttctccagtgtgctatacaaatattagcattttctacgtgtgccatgacatgaaaaatgttgtgcagcactgcaaggagccagattttttgcccacattgttttcaaacttaaaatataagaatttccatttggtttagatctatggccccatcaatacaaaattctgtcccttatgagcaacatcttatagatctgccctgacctggaaagatcccacagtatgttgtttaaatttaaaattttattagttctaaaattaaaaaataagatatactaaattacatcctagagaaactgggttattgattggtataatccgagttgtcaggcaaggctttattttttaaaaaatcaggagtacacattgcaagtcaggggtaaagaattatgaccaaaaccaaaaaggtaacttatcttttattgcctgaatcacaacaaaatgtatgtgggttaggaggttggccagacctccagactgaggtggttgcctgaaaccaaaggagctgacaaccagatttcacccagttttctatacatcagttcttccagaatttagcataaagatttattctccagccgggcacggtgcctcacgcctgtaatcccaatactttgggaggccgaggcgggcagatgacgaggtcaggagatcaagaccatcatggctagcatggtgaaaccccatctctagtaaaaatacaaaaaattagctgagtgtggtggcgggcgcctgtagtcccagctactcaggaggctgaggcaggagaatggcgtgaacccaggaggtggagcttgcagtgagccgagatcgcaccactgcactccagcctgggtgacagagcaggactccatctgaaacaaacaaaaaaaaaagatttcttctccaaaaggaagtctaactccttctccagcctctttcaactagtagtaattcctcacgctccagaataatcagattttcctgtcctgccatagagaggaaagggaatcagtctccttcttggtttttgtgggattgttttaagatgtacactaatgataaaccaacttttctacctctggggtaagtgaatgcaactttgccctggtgtcttgtggctaaaaataatccagctatagtctccaagacagcaagaatctggatgaatggctgtcgcaccagagagagcaagctggtcttggtcttggatctggatgaatggtcttggtgttgaatctggatgaatggctgtggcaccagagagagcaagctggtctgttctcattcagaggaactcttagctgcataatttcagatttgaatgtcttagagttcatctccagctgatctgtattattatccgattaacttttcttatcacagcaggtctatgtaaagaaaatacagctattcctcaacttgcgatagggttatatctcagtaaaccccttgtaaattggaaacattgttagtcaaaaatacatttattacacccaacttaccaagcatcgcagcttagcctagccttccttaaacatgctcagaacacttatgttagcctacagttaggcagaatcatctaacacaagcctattttattaaaaagttgtgaatggctcatgtaatttattgaatactatactgaaagtgaaaaaagtgcccattgtatgggcactcaaagtacagtttctactgaatgcatgttgctttcacaccaccataaagtcaaaaaatcgtagtcaagccatcctaaatcagagaccatttataatacttcctctgtaaccattgcagtttctcaagtgtcagaacagaatttattattcttgaaaatgtttttcatcatctggaaacatggtgctctttagggtttacagcagttttgggaaaaaatgaaaacatggtgctcttaaacttagtacatttggacatatattttgagggtttcttttcaataatggtgatggatttgtgcagatacatctgctgcttgaacatgttttttctacttatcaaatgcaggtaattctgaaactactgaagtaagggtgcagttagttaaaaaaaagtagacaatttacaacagtcattagactgcttttgatgttgtgtcatctgtctatattgaggacatatagaatttgtcaccacttactatagggatgtggtggtttgctatgttaaacagtcccctctttaagaaatagacaagactattgtagcaggcaagtgctttttttattttatggatgctgtttagtaccttttgggactgactgctaggaaacttagagtcagatttgctgtcatactctaagaattgcataggatcttatatcattctatcattatttagtttttgttattcatttattttttgatctatcattaatgcgttttggaatgaggcagrcttttatggaaatactctcacaattctgatctcattaacaccagatttttagctgactgtactacatgtctactgctatggaaaagattcttagtttggatatattccttttagtaccattagtggtcgttgcagttagccactttttgcaggtatgtgtgctaagcctttaaaatctttgtttttcacaggtcatagagaagagatactttttaagagaaggtaatcaggttggtatctcttttcttgataaaatagattcttaaattttgataggtgatttccaaatttaagttcagaagtagttttaaaaagttggggaaagccctttataggcacaagcaactgatttccttctatcctgttaaatacaaaaggagaaaatcagaacaaagggaaaataaggatctaggaaacaaatataatctaggaataagattacattataaaatagaagaagaaaataatttgcttgggactccaagagtatacgttcagggtctgtcacaatacaaataatttctataaaagtctagtaggtattatgagatttaccttcattctttctgatttagatgacactatcaccaatttgttgggaaatgttttccatttgggtaagatttatttttattatttaatctgtggttttctgagtaaaacctcagaaagttgtttttttaagaaacagcaggctgacatacagaaatggaaaagaagggaaaaattactattagtatttgaacttttattgcttgagacttaatgcaattatctttcttgcctacagattccaggctttcctgatcggaaaagatttggggcaggaacattaaagagccttcattatgactgaattacactcatcctttggaagagtgagcaagcagtggcagtttttcacagctcatcttgctgtgttcaattattaccatcacagccttttaacaaaatcatcttaaaatgctacccttcagccttaccctttaatggaaaaatgaaaggaagtgacaatacgggaggtccaaactttgtccctgttctctgtgttccttacctttctgtccctgtgtatagattatgtaaaagccttgtgtaaatatgagatgttgtcaaaatgatgcagtaaatgagcaatgacagtgtactgcagagaaaatttactcttgcctagaactggagggtttttatgggtctgtaattttcccacactcattgctgaaagcttaattaagtacttcaaaaacgtatctccattgttttaccttcttgaggggaacggtcttgttaaccagccctgagttgtctaccccaaacaatctctgtcattttcaaagatgcaaaatggtgttattkaattgtctccaccattgtcacacacaggaatgcctaataatagcaacccttgtctccctcttctctcctttgcaaatggstcagtgactggaagaggcggactaatagccagagttaaatataaatacaaattaataatacatagagaacagcaataccagaaaaaaagaattctggtaaaatgatgtgaaaaattgacagctccctcactcttaaggttgctgctatatacagtctaggttttctgtttggaaataggtagggtaaaatctaagacctgcacaagggcagtgagagacatttacagcctcctctctatttgtttttttaaggaaaagtcaactcctgaaatgtcccttagctataatcagaaaactaagaatattattctgtgtcaacaatgtatttatggagagaagtaaaaataagttccacagcaacacatttacatgaattatgaactaggattcttggatttcataatcactccaaagctttttggggatggtgtgtgtgtgtgtgtgtgtccgtaattgttcatcattactttttttaacctatctttttgcttgcttaatcttctctgccccagttcttcctgagtatatgaatttgatttctaaaaacaatttattcaacactctatcacccgtattctctctctggctctgctgcaggtctctgcactcctgattttgctccatacttttaaataacaataataaatatacagttttcatttctcatttaaaaaataggtggaaaacaccaaattcactttctgttccattttaattaggtttcagaagtatcttggaaatcaaggtatgctgcaagaggatattaaaataagaatgttagagagtccttttagaaaggcagtcttgggaatttggaaaaggatttttaaagcagctttcatcagctagactgttctccagcctttctttacttcctctttgaaaggacatagccctggtttctttttgacacaaaggaaagctatgcaaatcatgatctgtatgtagaattggtcacaagtatgttgttgcataggctgtacagttgggaaktagaaaccaaatgctacccagagacctaacccaattaagctctttgtatttctccttcaagaaataaatcttccttccttctttcttcctctttcttttaattttaaaaaaattcatcctgatttttttattttctatcttatttaaaaaataaaaataggccaggcgcggtggctcacacctttaatcccaacactttgggaggcgggtggatcacttgatatcaggagtttgagaccagcctggccaacatagggaaaccctgtctctactaaaaatacaaaaattagccaggcctggtggcacgcgcctgtaatcccagctacttgggaggctgaggcaggagaatcacttgaacctgggaggtggaggttgcagtgagtcaagatcgtgtcactgcactccagcctaggtgacagagtgagactccaactaaaagaaaataaataaataaatatataaatatataaataaataataaaagtaaactattgctgatgactccagggtcaatctggaaaaattaacagtattcctcaactccattactttctgcagccaagcttgattccttgaattatagttttctaagaaaaaatagtttttaataatctaaggtaaatttgttgcaattattagcagcagcataataaggctttttgcgcaaatgaatgttattagctagagttattcaaaaaagaatgaagcacaatttttgctaggacttcttgagaactattcataaaaatgcttttagataataaacaagtataaatgtcaaaatatttttttaaaagtataattggccaggtgctggctcacgcctataatcccagcactctaggagactgaggcaggaggatcacttgagctcgggagtttgaggctgcagtgattcatgattgcaccactgccttccagcagcctgatgacagagtgggactccatctctttacatatgtatatcttactctcttgatgggacaagttggtagaaataaagattttttttttctgttgtgatttcggtgtctgaccaattttctgactcattgtgaaggtgaccagatatgaaggcatatatatgactactcctctgtcccttaggtgtataagacttagctggaatccaactaaagatttgggctggtctctccatcttaacgttgatgggattcaggacacataaccccaaaatattgcaccctgttatttgagaaaactgcagaagcaaggtttctcataccttccccttaccccttctcccctgaagcaggccataaaccctaagtgactgttccctgaagtagatcataaaaccttcattccataggtaccctttatcctcacagatacagagacaccaagaagaatctggacaaataggacttgctaagttctccacagtttattaccattagattatgtccttttgtcctctgattatacttctgcataagactgtacataaaaatacacaagttttcctatttcttttttgtcttcatttctgaagattcctgtcatgtaaaacttacagtaaataaatgtgtgtgcttttctcaataatctgtctttcgttataggtgcctcatttgtgaacctagtgatgggtgaagaaagaaagctcttctccactacagtgctctaagaaaagctattcccaaaagagttgatccatattagctttagctcgggttcttagaattcctcaaacttgaggcattcatgatataatccaggtgccctgacacttgtttttctgttcattctgacatggacttcatggaaatgatgtgcagggacatcagactgaggtgaagagctcctaattgctccttgtaatcagagtttctgagtcctcatttcaatagtttgcagtagcacccaccataggtaggaccttgtatgggttactagatggtggcttaattgaattttttaaagcacaggtgacatcatattttaagaagtttaaaggtctaacagggtgtctgcattggtttaatatatgttaaaattcaaaggaggagtctgttttggggaaaggaggagaaggaaattagaaattcatttctccgcagtcccaagactgagctaaatcactgtggtgggagaggaagggtcgcaggaagtctaaccctgtgtctcaaatatttcacagcatgtttgcctacacaaaatatctgatgttagggtcagctggggctgctccatagcatagtaaaggaattggacatccagttacaattaatctgcacctccattaaggactcacatggagggctttcaaactctgaagtgtgtaagaatcccctgaagtgcttgctgaaaatgcagattccacgatttcctctctcttcccttactctcccctttctatatgtataggataaggccaggattttgtatttttaacagacaagccagatttttctcatgcagataagtcaggatctagcctttaagaaagacaaataaactcatcaaaaagtagggaatatagattgtgaactctgtactttatgagtgccattatagcagaattcatcaaagcgcatctttgactgcctcaacctgatctcaccttaatgaactgatccactcctccccactcaaagctacatatgccaaattaaacatgagatgattgtcatgtcttctgttggcaaaacaagtatttgtctttcatgtattgctatcatttttattactgccactgtttttcccctgggttctgtttttaatccaaatatatttatttctaaccagtgccttgccatcttacacacagccccctctctagtactgtgttttctcagctggctaatcactaagctttaccgaggtcatcaataactaatgacaaagaatggaacccctaaactccaaccaaggtgtaaaacctcgctcagtaccatcaagtatatcaggtaatctctccgttccatctttttctcggagacatctgtcctggagtcctctgatgcctaactccgttttggagtgattactctgtagacctgtcacaccctgcttcacattaccttgtagcaattcctggatgtaatgttttccactttctatccaactcttactctatgggacttggctcagacatagtcttctctgggaagccctccctggctctgctcgtctgggctacgtgcccactagtgcttcccctagatccctgggctctttcctgtcagagcacttacactatgttgtgatggttttcaaaaattgttaaataaatgaatgtataattacattaattaaaatgaaaagccattagacatagaatcagaacttatctgtagctgtgtaagttatttattctccaatcccagcaggacatgatggcttatgcctgtaattccaatactttgggaggctgaggccagaggatggcttatgcctgggagttaaaggctgcagtgagctgtgatgatgccactgcactccagcttggatgacacagcaagactctgtctctaaaaaaaaacattaagtcaggtgcaggggttcacgtctgtaatcccagcactttgggaggctgaagtgggaggattgcttgagcctaggagttcaagttcagcctgggcaacatgacgagacctcatctctactaaaaaatttttaaagtagccgggtgtggtggtgtgtgcctgtagtcccagctactcaggaggctgagatgggaggatcgctttagcccaggaggttgaggcttcagtgagccatttttgtgccactgcactccagcctggatgacagagaacctgtctcaaaaaaaaaattaaataataaaataatattttaatatcccctgtgtgtattctctccttttagaaggaatccctaaagtttagtgaaagatgtattcaactttaaatattttcaagcccctcaaagtaattttaatccagtcaaggaactgttaacactttcttaccccttcagaagtctctcataccttaggaaagaactgaaacacttcttaaatctgccttcacaactggttcaatggaagtaacatagaaagtttgttgaaaaataaggcagtaaagatttccctttgtcttttattagctcccatttgtttatctaatgaccaactgctaacttccaagatcaatagagattgaaggcccaaggtactcataaacttagatacacaggagatattttcttcgaattcagtttcagagtctgcatgttataggaatagtgaaaacttagcctcaataaagctagggcctccacctaccttcctcctaggtttgcatatgaattccagaatagtttatataatgccacaatgccatctgtctatgctgacatatgctgaggtttcctatcagctgcccggtccgtaggcatcagtccacatggtttgctaccagcatgtttcctatcaacatgtcccctttggtctggcccagtctgtgctagcacctcatacacaggcaataattctgctgctactgcagtatgctggagcctggggacccttggaggttgtttaagcccatttatctaaagcagagggtctcaaactagcagcctgtggccacttcaaatatgcacatgtttttcaacctgcatgattatatcagttatttatcactgcttaacaaaccaccccaaaatttagtagtgtgaaatacaccattctatttgttcccaattctgtggctcagcagttcgggccagatttaactggtggttcttctgctggtcttgcctgggatcacacatgttctgcagtcacctggcagccagactgcctcattcacatgtctggcagttcctgtggggcttgcagggctgttgcctggacctctggaggccagcccagcttctctgcactgtggtctcaggctgcaagaatgggccctgtcctaaggcacaggcatgtttcaaactctgtgtcatgtttgctactagccaaagaaaaagaccctacctcttgatgggaggaacagcaaagtcacattcaaaggggcacacatacaaggataggaggaattggagcattttttgccatctaccacagggtggtttctctgtctctctcactctaattaccaatggttaaaaattggagcttcatcttatcttgaaaaatcagctagcctactttattcacttacacttcctccctcatctgttggcatttgagttgtgataatgcctaatttacaagattgtttttgtgaagttagatatggaaaaatctgacaaaagcagaaactcaatatatgttttctcctttctgaacaccactagtcatgaagctgctacctgccaatgaccaaggagagcggccaagatgaagaacaagggagtcatagaggaggtggctggagaataatcccttggtctgttttagaagtatagaggcattaggaaacaaaactcttaaagaatttataagaaaactaaacgtactttaagaaattaaaaggagcagtaggaaacatatcagtttgctctaagtgaaatatctcaggctctgaatggttcacccaagaacctgagctcattcctgggaggcacctgcagaaaactggttctggtcctggtccctgtcttcaggtggctgtgtgtaaacatcttaccccagtgtacacatctgcagctggtaaatgcctgggggttttctcactgctctccaggagactcagcactgccctgttccttcctagcctgagtcaggactgagcagagaatcctccaccacacacagcaggcactatctgccacagttcctttccccgatagcttcaaattctctgccttttgaaataagcctacttttaactggaataaataattggtcaatctctacctcaggtgaagaggaaccaagcctctggaaacacttaggaacaaactgtaaaaaccaaaggcaattgtgtaaccggttaaataagcttgctggactttgtccctgtgtatgagttagacaattctttcagctagtttgagtgacgcactgaccagtgaagcgcagtgaagcagtgggaaccggaatatccaaagagtggtttgaaggagaaagaagcattgtggctttatatcctctgggcctgggtttcctgaagtcaccacacatagaggagagagaaaatggctgagttaaaggtaagaaaccatctgacaagtttgctatggcttcttcagccaaaatttatggaagtttctgagaacttcagggtatcagagttggaaaagacttagagaggccctggttcaaacccctgtgttcagaggcttccctgtggtgtctgtgggcacagctggagctgaagaacaagggaaaggtgataaaggaaagaaatg

SEQ ID NO: 97239 - DNA, 136256 bp, Homo sapiens
gccgtcgcaacctcttagctggctttaaaaatactattaaatgtttctattccgaggtaaaaatttaatcaagagtaaaggacaaggagcgaaagaacaggcactcgtgcactgaaaagatgatttttaaaatctggaaacataaacaacttactggtgagctccaatcccagaaggaagcgctttaattctattgtaccggaggtccagccaagtcaggttcggaagcaactgaaagaaatcttgaggaatcacacacagggcattcctttgcagatgcaattgcttccatggaaaagagaatcagagaatgttttgttaaccaactaatttgtaaaacatgatatatccaaaatctatttccaaaagaactactaacaaccagaaccgtatatactaagttaaaaaacaaaaacccaatctcttacccttaaaagatgtaaacagtagacaaaagaatcagaaagaaaagaaccaggactccttccggcggcctttggagccggaactgacttcctgaagagccggcactctgctgctgacccagcacaccactgtttctatcccaaagcctttgacatggtctgaattccggggccccacactcagtgtctcggccgtttctccagtgcctgccgcagcacctggccctcggcagcccccgaaatcgcctgcttactgagcaaatagccagagccatgtctggtctgggggactcagcccaactcaatcattaaaatgaaactaaaagacagggacagagatgtctgccgtggtgttctctacgatcagcagcaaacaaagcctcagcgagcagcatttcagaagcagattgacacatcaactcggtggcgttgtaaagtcgtgacaaataagggaaggtggaagatgaacgtatacacgctgattttagctgtgtaaaatgcatataacattcacacaattttacagtcacagtgtggaaggatcatagctaatttttacaatactgtcattaatgctgctagttgtttatactcacattattatatgtatttatatccatatctgtatttcctgagggagtagaaacagatgttcggaacaatgatctcaaagccagactgcctggatccacatctaggtttcaaaatctattggctgtgtgaccttgagcaagttcctgaacctctctgtgctccagtgtcctcatctgtgagacggggcaatgtgggcaagcactaaagaacagtgcgtggattggctgttgtgattacgttgccttctctatgaaacacacactgcacattgcacagagcaccacatgcctccccattccgccctcaacaccgtgtccctgatccaaatcactgacagattccaactggagaaacactgactggaaaaatcacactcttcagaaaggcactggaaacactatcttatctctgttaggaaattgcccgagtcactgcttgctggcagctggctcggtctccagaaagcatcctggcaatcacaggtcacagtgtgtgcccccacgtatatgggtgtgcaccccccacatacaggcatgtgcatgcctccacgtgctgcctttctcgggcctctgcaggagtggttttacacttcttggtcctgttcttccccccccagggcaagctgattccagtgctcagctttgaaaccatgtcgttctcaatgccagtaaaaggaatctcagaaagataacactcttcttcctccccagcacctctggaaatgcaggcaccacctgtgacttggagctggttatggttgaaggaaataatatatacagtggtccatttccaagacaaagtgccttgaattggcttaggtcagcaaactacagaaaaacaggatgtactaggcccctacttggatagccgatgcctgcttgttggccattccccaccccttagttgccctcacccaaaccaaagaagattagtctaagatgaaagtttactagcccgcaaaatagctcgttttgtccgttcttatcagcctgcccagctacttaggtcataaatcaaatacttgaagagcccctgagctgactgggattgcaatgcattgtgggccacgacaaaataaagcaggacaaccctaaagaaaatacctacagcccctgcccaacaaccaatagggaacgtccaggaagactgcgaccctatagtactctgcctatgaggaaccaggggaggaacctgcaccgtacagcccctacccaacaaccaataacgacatccaggaagactgtgaccctccccatagtactcagcctatgaggatctgggggagggacctgcgccctacagcccctacccaacaaccaatagacgacatccaggaagactgtgacccccccccatagtactcagcctctgaggatctgggggaggaacctgtgccctacagcccctacccaacaaccaataggcgaagtccaggaagactgtgacccccatagtactcagcctatgaggatctgggggaggaacctgtgccctacagcccctacccaacaaccaataggcgaagtctgggaagactgtaacccccatagtactcagcctatgaggaactggggcaggacctgcgcaccaggggataaatggcttgttgtaaccctgctgggtgtgcctgcccatcagacacccaatcttgcaagaccgtcattaaaaagtctttcttccactgttctctgagtccattctttgggtttggatgggtaagtttgtttctcatgtggtgaacagtgaggtggctatgtcacaatacaaattccatctttcctattaggtcctgggagcctcatgtgaggatgggggatctctggaagtgctgtttatgactttagagactgcagccacagcggcagaaagtctaccactctgattaccacatttaaagactctatgccatggtaataaaatttatactgacatttgtcttctgaaaggtataaacagttatcaagtttcttcatcaagcctgaagacctctggaatttcctccttctccctttgtgcataaaggtaacagaaacctcagggctctgctggatcccttattcagggctgaggatatctgttcattaaaagtgacacctgtgtaacaggagccaggacaaggcaggtccctgtgaccagtgcctcaccctagatgtcagcatgaaggaaagaaagagcaagaccagcgctgccgtgacagcaaagacaatgcaaatgtagagtttataacttaagcagccactaaaaatctaaatatgtagctcttgtagaagcactcaaaaatgtcaatctggccaggtgcggtggcttacacctgtaattccagcactttgggaagctgagacaggcagatcacctgatctcaggcattcaagatcagcctgggcaacatggtgaaaccccatctctactaaaaatacaaaaagaaagtcaatcaatatcataactatgttccagacactgaactttcacattattcattttcacaataaatgatgtgaaaacatgatcattccgacattccagattaaaccaaatgaggtttaaggaaattctgtgagtcccagcagggacaagtgctgcagggggaaccctcaactgtctaacatcaaacctgtgccctcacagaagctttctctagaaatcacatggacaagacagcatctactgcggactgacccggagaagggccgggcacaaagtaaaaccagtgtgtaacatgagcaaaatcatgggtgagaacaaagtttttaactgctcatgttgcctgattttctttaaggttttgtgttttaattaagagaccaagcgtgtttggcagtagtttctaccacaggttttgagagatgaactgcaaggaagagaacagacaccttcatctaaatagatgtactatttccattggttggtccccatcatgaatttcccattttgttgtgattggcgtatgaaactatgagttaacctttcctctatttaattttagaattcatcaattccaaagagaaagaagcctacaaataaagcccaggggtacattcccatttctgtctataggggacctgtgggcacacagcctgaggagcagccccacttacttgaaggctggggattctaaagacctcctccaaacggcacagaccactttcactcaagtctaaaatcggtgaggaggaaaagatgatgcctccaacacccttgtgaacatctttggagggggtggcaggcaagctcctagtctgaccagcaccctcctccagatcagcagcagccacagagggaacttcgtaggagctgcttccctccatccgttctcttccagggacagcagctcatcctccttggtctggagtcacctggagacacgggaaagggaaacgtagaagcaactaattataccgaggcaaaacagaatagctgtgtggcagatctactgtaatgtaacttgctttaaaagctatcatttttcctaagcagtagcaaaaatttgacttttaaacatgtaaaaaaaaaaaaaaggaatacaaagaggttcagattaaaattctctgctctcactttgtacaatggagttccaagatttaactcctggaaaacgcaaaggcgcacaatagtaatgatcattttagggatgtaaacagatcggaacatttcaaagcctgtaaatcaactgcaacgcttccatgaaatgactaggggcgggtggaaatttgcactgtttcttacctctggtgtggttctgtgccatttgaactatgtttttagtttcttgaggccaggaagcctgtcttttgtttaccattttgacccagtgaccagaactaagtctggcttacacccagttaagcaccggggaaaaacctgttaaattaatctcgaattttcgttgtccagcaacacttttactcagaagtattgttcaccaaaatctcattcagcgaggcacacttccacttgcaatttccaaacaatttattcggcaataagaatcaacgttggaatgcatcagttcacctaattcaagtcactcaacagcccaatgattggcatatgaggcgcagatcagttagggaactgttccaggggcgcagttaattggggggtagaggcgacaccgggacccagcagggttcaaccccaggcagcctgcattccatggaagcccgcgggctttttcacggtcagttcacttgttttctccgaatcacggaacttaaaacagaggaggggaggcttcaaacctcagaacagggaaagtatcttaaaaccagaagtgaaacaacagcctggactcacacagggcccaggcagcgcaggctccgtggggtttccgaggctgccttcaagggatccccacgcacgcccacccccgctccctgcctcgatttccccatccgggcgaggctgagttgggtccgacgctctgggcctcacattccaggcctcagaagggcagcctttgcggtcagcatcgcggctggagctaggcgacagggcacgacgggccgaggcaccaccttcctgccgccgcccgcctcgagggctcagcgagctggccgtacccgccccgtctcacctgccgcgtccccgcccactgaagcgctggcgagccccgccgctgagagcagcagcccgacaatggaggccacccagccaacgcggtcgccatggagacgccggtacggaatcccgcaggcgccacgctgagcgcgagtgtgtctgtgatgcgcctgcgcgaggggtgtggtgcgcctgcgcgcgggggtgtgcgtgttgtgggggtttgtgcctgcgtgcgggggcggggtgtgggtgcccctgcgcggcagggggtcgggtgtggtgcgcctgcccgggagggggcggggtgtggtgcgcctgcgctggggcggggggttgcgcttgcggtgggggggttgtggtgcgcctgcgcgggggtggcagggggtggtgcgcctgcgcacgcacgcggccaacggtagcatccgtttttccgcgcccgcggccttgaaggggtggtggtcgacgggcaagtagagaccgcgagggtctggaggggcgaccggcctggcacagaggggaaggaagagagcgggatgctaagtgccgtctggggagccggagggcccggggcgggcggggctgctcgaggacagccgagcagaaaagarttgctgctgaggcaccacctttggagccgccctcgctgcctgtccttcccgctgggctcactccccgcgtctctcctggggcttcctggagccacttcccacaggagctgcttgtccccaaatcttgcctcaggacttgctgccaggggaacgcagactcagagcgtcctctttggagaagtaaggctgcctctggacggaggagtgaggggggcgaggaaacgcagtgagtgtcctgaggaagggttttgagaatttggaagaagatgaaatgacaccgggcgggaggggaggtgctcgcgtggtcctgtggaaccctggagtcccgtgcaccttcattccaggatccaactgataatgaaaagtagcaccctctgtcccacccagaaacactctggaaacccggacagtttagctggagtctgccatgatttcacttttttttttttttttttttttttgaggtggagtcttgctttgtctcccaggctggagtgcagtagcgcgatctcggcccactgcgacctccgcctcccaggttcaagcaattctcctgcctcagcctccccagtagctgggactacaggcgcscgccaccacgtccagctaatttttgtatttttagtagagacggggtttcatcatgttggccaggctggtctcgatctcctgacctcatgayccgcccccctcggcctcccaaagtgctgggattacaggcatgagccaccgtgcccggcctgattccactttttaaaggaaacgacataattatgtggagaaacgactatccactttgaggggatttacgttttatttttgtgaagagatcacagtaagaaatgttttttaggccggacacgatggctcacgcctgtaaccctagcactttgggaggccagggtgggaagatcgcttgaggccaggagttggagaccagcctgggcaacccagtctctacaaaaattaaaaaaaaaaaaaaaaaaaaatgctgggtgtggtggcacacacctgtagttccagctgtgtgggagggtgaggcaagaggatcgcttgaacctaggattttgaggctgcagtgagttatgattgtgccacttaatgtcagcttcggtgacagcgagaccctgtctcaaaaaaaaagttttcgtacatacccaactatctaccaatcaggaagctgaaagcacaaccagtaccttctcaggagcgtggggaggccarccacccgggcagagcaaggagagaatgaggagtgacatgggtgttgccgtgagtggcgaaggggatggaagatttcagcacgatgctatttctaacaagtttcagcattccagtatctcttttcacaaataaaacatttactaaccatttgagcgtattccctcttgcttgttattgttgcctcaggtttttgtttcacatttttcatgctacattaatttttgtagtcagtagttaattgtatgtacgagcatgttttgccctttactgtgctcagtttttgcccagccagattgtatccattggtagccttttggcaagtattcttgggtgagcctcccaacgtaggaacgaatgaagtgttcgtgttgatctgattattgagtggctgtggagctggtgccgcgttccttgttgagtcatttcctgtcttgattttaggaccttcctccgggcagcgactgctgctaccctgccgagaagtttgctgcccgtggcattgctacttccatgaaggaaatctatcttctcttttcatgtctttgttctgaaatttcgctgtggtatttctgagtataagttggtttggctgtgttgcctggcgctggccgtgtcttctcacctgagatagctaagtttcagttcccagcccttcccggccatctgtcctcccgtggcacctctgcaccctgacataattcttgttctggatctcctaaaagggagtagcttgcacccattcagtgtcttctccatctctcaaactgcgcttcccagtattggtctctgtgttctcagtttacgatcttccagtttactagttctgtctccatccaattagtttgtttaatctgttgagtttttaaataaaaccgcattggtctctatttctaattttcttttttgtgtctaatttcttccagtttttgttttataatctgtttttaatgttcacggctgttttctttctttatctaccatgagaatcccaaacacctctatttatttattttatttattttttgagacagggtctcagtctgtcacccaggctggagttcagcggtgtgatctcggctcactgtagcctttgcctcccagattcaagcaatcctcccacctcaacccctcaagtagctgagactacaggcatgtgccrccacactgggctaatttttgtattttttgtagagacgggttttaccatgttgcccaggctggtctcgaactcctgagctcaagccatccacctgcctcagcctcccaaagtgctgggattataggcgtgagccactgccagtcctgagccactgcccggggtagacacatttattttaaactgtgctttattgttttcatctcccctgggcggaatttaccagttgatggctgatactgttatctgtcttcttggagtcctgtgttttgaaatctaggcttgcaggcttctgcagagggggcttatgttctgtttccctgagtattcactgtgtgtcatgctctggcaggagcctccgtccagccttttggggtcatgcttgggtgcttgcctggccttgccgttgggaactgtagatccagtcctggagccagcaagaggctgggccgaaggctgtcctcgtctccatctccagatatcgctgcagaagttgtatgttttttcacattcctttcatggaagtgaaaccgcctttgcaaaattataactgaggaaattatgacagtgaaagagatcagacctaaccgattccatcttgcttctaacttttaagctgtccttgttcattcctgggcataggccaaactaaccttgggaaggaattcagttcatggtttgactctgaaacaaaatgggtaatagccctttcccgaaaatacccccttcttgcccagggaccaatctgcctttgcaggactaacaaattaggtacaatattagacattacaggttaggggtcctgcagcctctggctccaagagtctaaacctccccaaattgctcctgggtataacatcactattgtaaaacccaagatcagagcttgagatattttgcaaaccctgcactccacagatcagccgacaccacccagacctgtaatctcgctccggcagttcgggcacccacccaggagcagaaaacagcaaggaaacctcacttcgaccccctatgagtccatctccaacctgaccaatcagcactcctcatgtcccaaagccccaccctcccaattatctttaaaaactctgatcccagaatgcgcagggagactgactgagtaataatagtagaactccggtctcctgcacagcccgctctgcgttaattactctttctccattgcaattcccctgtcttggtaaatgggctctgtctaggcagcaggcaaggtgaacccatagggcagttacagaggcaagagacttattccagccctggttttcagcgatgctcttggctgttctccactactctcaggcactttctgccccctcactcttcagggacagccctcccaagcacctttccctctttctgggcccagagcccccacaggcccaaagtctgggtcctgtgagctgctatgtgtttctgattcatttttggtctatgaagtgttgstggtttttaaatttttgttttaaaaattacctattataggccaagcatggtggctcacacctgtaatcccagcgctttgggaggctgaggcgggcggatcacctgaggtcaggagtttgagaccagcctgaccaacatggcgaaacccccatctccactaaaaatacaaaaattatccaggcgtggtggtgcatacctgtagttccaggtactcgggtggctaaggcaggagaattgcttgaacctggtaagcaaaggttgcagtgagccgagagcatgccactgcactccagcctgggtgacagagcaagaccctgtctcaaaaaaaaaaaaatttgttttaaataaaaattacctattgtagccatggttggggagaattgtgggagggcctctgtattagtttgttttcatgctgctgataaggacatacccaagactgggaagaaaaaaaggtttaatggacttaaagttccacatggccggggaggcctcacaatcatggtggaaggtaaggaggagcaagtcacatcttacgtggagggcagcaggcaaaaggagagaaagcttgtgcaggggaactcccctttttaaaatcatcagatttcatgagacatattcactatcacaagaacagcctgggaaagacctgcccccatgattcagttacctcccaccgggtccctcccacagcacgtgagaattgaagatgagatttgagtggagacacagccaaaccgtatcagcctctaagcttgaacttgcaataccatcttgcccagagaaagtaatattttccagtacaggaaataaaacagttttactctgctttagtttttttatgtaatcccttattgtgaagctgccataagttatgtgtgatgtttttccagtaattaatattcttctacattgtaaaccaaaaacaaaagtctgagtcccccaaccagctgaatggacccctcttctctgtcaaggggattccaaagaaacctgaaactagttcagaccatgaccagcagtggaggactgagtgcacctcctagttcagactgtgaccagcagtggaggactgggcgcgcttcctagttcagaccgtgaccagcagtggagaactgggcgtgcctcatgatactcctctccttttggggttagacagactcaccagcattaacattaaaatagagatcttggctgggcgaggtggctcacgcctgtaatcccagcacttggggasgccaaggcaggcagatcacttgaggtcaagagatcgagactagctggccaacatggggaaaccccatcactactaataatacaaaaattagccaggcgtgcacccataattccaaccacctgggagtctgaggcacaagaattactcgaatccagcaggtggaggttgtagtgagccgacatcacaccactgcactccagcctggtggcagggtgaaactttgtctcaaaaataaaatagaggttttaagactgacagaacagactctgtagcaataagataccaactccaactgactctggcgtaatatcacatggcagataaggaaatcaagataattacccccaaatttgtttatttttcatatctggaaatggccctgcaaagctgtcttttgtggggcggagatttgtatctgtgaagaatctaacataactggatctttacccttccaggcctccccgatcctgaagagatgaactgatagtctagcaccctttgaaggtctacataggaaaccatgttagtccattttcacgctgctgataaagacataccggccagcgtggtggctcatgcctgtaatcccagcactttgggaagccaaggcgggcaggtcacgaggtcaggagatcgataacatcctggctaacacggtgaaaccccgtctctactaaaaatacaaaaaattagctgggcgtggttgcagactccgatagtcccagctactctggaggctgagtcaggagaatggcatgaacccgggaggcggagcttgcagtgagccgagatcgcgccactgcaccccagcctgggcaacagagcaagactgtcttaaaaaaaaaaaaaaaaagacataccaaagactgggcgatttacaaaagaaagaggtttcattggacttaagttccacctggctggggaagcctcacaatcatggcggaaggcaaggaggagcaagttgcgtcttacccggatggcagcaggcaagaacttgtgcagggaactcccccttttttttttttaagacggactcttgctctgtcacccaggctggagtgcagtggtgcgatctcggctcactggaagctccgcctcctgggttcacgccattctcctgcctcagcctcccgagtagctgggactacaggcacccgccaccacgcctggctaattttttgtattttttagtagagatggggtttcactgtgttagccaggacggtcttgatctcctgaccttgtgatccacccgtcttggcttctcaaagtgctgggattacaggtgtgagccaccgcgcccggccggggaactcctctttctaaaaccatcagatctcgtgagacttattcactatcatgagaacaacatgggaaagacttgtccccatgattcagttacctcccaccgggtccctcccacaacatgtgggaattcaacataagatttgggtggggacacagccaaaccacatcagaaacatcagaatttaccatcaattgtttctaacagtagccaccaatgagacttcatttaccactaagaacttgatctctacaaccccttatcttaacccagacactccttcctgttgattgattccaggtctttagataataattctttcaaccaattgtcaatcagaaaatctttgagtccacctatgacctgtaaggtcactctcctgcatctctccccatcccactttcagttgtccttcctttctagaccaaaccaatgtatacctcacaggcattgattgatgtcttatgttcccctaaaatgtataaaaccatcttgcaacccaaccaccttgggcacatctcaggatctcttgagactgccttgggccatggtcactcatatttagctcagaaataaacctctttaagtatttgacagagcttgactctttttgtcaacaacatcaaaagaaaggcagtctttttttaaaatgtaaaatatactttatagaaagttgaatgtaaggacaatacacatttctacgtaagtttacagatttcaaaatggcctaaaattgttttttggaagatgttcaaaatgcccctggcagctgattccatttctgctctgctgtgcctgctaaaccaatcatcatacaatgtgacaactgaaatacattgctcttccttgaaaagagttcagactgcaaagtgaagatgacctctgtttcctcatataggtcttctgagagcacaccccaggactgggattttgccaggaagatgtggaatggtgtggaaagacaagaagctgcagccttcaggctgccatgaaaaagctgggggtgtgttctgtggcccatcaagagggggtgtgtaatgaattgttaatgaatttctcagatgagccaaagtggtgaacttgtctcagtacccagggagactcagactcatccccagctcttggcctccattttcccagctgctgtgattggagtgggtccctggaattcatatgctggaaatttggtccaggtgtgggtgtgttgggaggtggggtttaaggtgtggttaggccattaagagattaatgctgctctttagggactgggctaattcttgagggagtgagtggcttcccgctctctccggacagcattaastgccacaggttgggttattataacatgaggccacccctcatgttttgtcccactcccccttccacttcgcttctgtgtcatgatgcaggacaaaagcaccaccagaaactgttgccgttctcttgggcttcccagccttcaaaastgagtcaagtaaacatctttcctgtataaatcataacccagcctcaggtattctttgtagcaacagaaaatggaccaagacactggccttgagacttgggtgcaaaatggtttagctccatccatcaccccatcccaagccaatctcatggcctgtgagcctccaatccccatgcaccccaccttctatcttaaattctttaacctgaattcatgtacctaacatagacacaggttttggggattcagacatggacgtctctgagggccattattctgtctgccacaattagatcagcacatctcttggaaaggaactgtctttattggaggaaatacattgacgaggtgccagggtgggcaacagtctgtgaacattggtattggcctaggccagtgagaacgctagggatggagtcttaagccagccagtgatggcactattcagtccatacagttaagagatatcaaggatgggtgaccaggaagccaagggcaagcacctcagtaacaatcatgattcctggcccatttccagacttgagccaggttttggacccagaatgcactgtgcaaggagaaattgatttggtggaaaattacatggtaagcctattgtaaggggcaggaagaattcccaagaggttcaacaaaaactaagcaactgaaaacgtcattatttcagtaaggacaagcagtaggaagggaaataatcatagtacacagaatgaaagggtggtgagtccgacgcagggcagcacttagaccagggaagagacatcctccttccctgggctttgcattttagagggcctgcatttcacagacacagaaccagctatctgttctttttggtttcgtaagaacactctgggattgagtaagcgatcaaatgtgttcaggagagggacgcacgaaccaaactggtccctgggccagagagaatggggctgagacatgcacatgtttgtggagagagcagagaaccacgacctccaccccaggacactggagaaagtacagagtggccactgcagatgaccccaaatgggtgtcaggcaggagggcttcccagatcagggtgcctcctccccctgctgggtggtatggtcctgggaagggcttagtaattccagggcttctaagatgctggcaacattttacttcctgtgctggtagttacactggcgtgaaatttggttgagatgcatgcccattacctgtgtagtttcccacaggtatgctatgcgccagtgcaagagtttatacacatccttaggagaaaatgtcagtgaattttactttgttcttaggctaagaaaggatttttaaacaagatataaaaacaccataaaaataaatattggtaaattcactatactagaaataatcctgttcatcagaaagataccataaagaaaattaagtcagccaaaaactgagagaagatactggcgactcttacatccaatgaagattagtatccagactataatccgataaagatagtatgcagcattcctatgattcaatagggaaaagatagagatacatttatagtaataggtaaaaagatataaaccaatagctcacagtagaggagaaataaatggccaataaaaatataaaagatgcttcactttactagctgtcagagaaatgcaatttgatccaagattgtatttcagatgagtgagtcttacactcactcaactggcaccagcaaagcagctgccttgtgttggtgagctggtgaagcccacggaacccgctgctgtgagagggtgttcgtcaatatcttgggagcatctggggactcctgtgcagggttgaattctcaagtgcaacagccccacaattccccctttggactccagtagagaagcagatggaggcgtgcaccaggacacaggtgccaaaatgtgccccgcgggatcatgcatttaagcaaaagcactggaaaggccaggacgggagaaagcacaaatacgtcacactgaagccagacaaggaagcatcttacagcctcaaaatgaatgamcaaccctccgcctcccaggttcaagcgattctcctgcctcagcagtagctgggattacaggtgcctgccaccacacccggctaattttttgtatttttagtagagacagggtttcactatgttggccaggctggtctcgaactcctgaactccagccatccacccaccttggcctcccaaagtgctgggattataggcatgaacgaccatgcccggcccttagatggaaattttaaagaggttacagaccagagggtgaatgaagtggctctgggactagtttggggaccctctggggagctggccttgggtcatcttagacattgtcccagcaggctatgtggagggtgacgtgactccagttggctagtctcaacagaattccacataacaaaccatcccaaaattagtaccatgaacgccaagcatttacctcttactctgcaggtgggctgggcttggctgggcttggctgggcttggtcagtcttggctctgggccacagatgcagcttgcatctattctatgggtgtctcattcttctgtgacaagcaggtcaccatgtgcctcccatgaacatgcaaaggtgcaagacggtagctgtgggaggacatccagggcccacttcgctggcatccccccaacatccctttgaccagtcaggcctcaccgtgttccatcccactctccagttgggcctctctgctccctcccacctgacaccccattggccaaacaaaccacacggcaagccagtcccaggatggtgaggtgcactgcacccaccccaaggccatggcagggtatggagatgtcatttattataagatggacagataagctggaccaataatttacagattccagcagagggtgaggacacccagatgcgccaggactgtaggaaatcacaatgatggcaacgccttggccttcctggggacagggagccctatttccaaatatagtcacattctgaggagccgggggttataacatcaagtctgcccttgacctcacacaagccaggctcctccaggccctctgctccaccaggcctcaacrtggcgcacaaaggattgaacggacgccagcatcatttgtaagaactccaggccgcatcccaagggtgacctagccccccaaatgcctgcctgagaaaacttaagctgcccaaaggatctcttcttggctccagcaacccgagaacagggccccgtgccccagcctctgcgggggtgggacctcacttccataaccgtggccaacaaacctattatagacgggtctcctgtggacccaccctcttcccactcttaagttttcacttccccagctctcctgagccccagcggacccccacccctcactgtccctttaaaacccrcagtcaccgcygtgcagattcaagctgagtcaggtcacgctagactcttccccattgcaacagttatgactaatcacagtctgccctcaccactctggcaatgggctgtgtttatctttaaccagcatgaaagtggaggacacattcagccatagcacccatcctgcacaccccccaccatcccctacctgccccctccccagcctggattgtgggatgttcctgaatttttctcttgttttagaattttatcattcacacgcgcaatgtgccatctagtttttcttggctttataaacctcataaaaatgtgccatactgtatgaggtctcctgtaacttttttttttttctggaaacagctgtttctaagactttttctcattgttgcttgaacctgggaggcggaggttgcagtgagccgagatcgtgccattataytccaccctgggagaaagtgtgagactccatctcaaaaaaaaaaaaatccatctaaggtgcaatagatgagttttatattatgtaaattatgcctcaatagagatgacaaaaggaaggggaaaaaaaaacccttggctacaagccattgtgaagacacaataccacaatttttattcaatttacagtaaatttataccatccccacactcccactttaggatgagtaccctcagcccctgcattcccacagctgtctgcagtccattccgctctcaccccagccctagggaagcactgactctacacatttgcctggacaatggggtgcacattttaggtaaatggagtcagacagtatgtcgtcttttcatctggttttatgtagaataatgattttgaggtccatccgtgtagtagaaggcatcagtatttcattcctttttattgctgaataatattctgttgaatggatatactatttgtttatctgttcaccagatgatggacatttggactatctacagtttggggctatgaaatcatgctgctatgaatattcatgcacctatctttaagtcatatattttatttttcttggctagattcctggtagtgaaattactgggtcatatggtaagattatgcttaaatttaaaataaatgaactgttttccagtgtagctgtatcatgactgggcgtggtggctcacgcctgtaatcccagcactttgggaggccgaggtgggcggatcacctgaagtcaggatttcgagaccagcctggccaacatggtgaaaccccacctctactaaaaatacaaaaactagccgagtgtgatgatgagcgcctgtaatcccagctacttgggaggctgaggcaggagaattgctttaacccaggacgtggaggttgcagtgagccaagatcacgccactgcactccagcctgggcgacaagagagaaactccatctcaaaacaaaacaaaaaacaaagtagctgcatcactttaacaaaatatggactccagttctgccacatccaacccttggtattgtctgttttttttttttaattatggcaatcctagtaagtgtgtagttgtatctcatggaggtttaaatttttacttgcttcttcagaggtagcaacagttggcaggaagaagaaaaaataaactaaaagcaattttaaaaattttatttgcccagtgactcataatgtttatcacattttacatgtgtatcagccatgtagccatttgtatgtcttatttggtgaaatgttttttcttttcttttcttttcctttttttttttgttttttgaggcaaggtctcactctgttgcccaggctagagtgcagtggcgcaatctcagctcactgcaacctccgcctcccaggttcaagtaattcccctgcctcagcctcctaagtagctgggattacaggtgcgcaccaccatgcctggctaatttttgtatttttagtagagacaggttttcctatgttggctgggctggtctcgaactcctgacctcaagtgatctgcccgcctcggcctcccaaggtgctgggattacaagcgtgagccaccgtgcctggttttccaagtcttttacctacgtttttattagattgttttctttctctctctctctctctttttttttgagacatagtctccttctgtcgcccaggctggagtgcagtggcgcgatcttggctcactgcaacctccacctcccgggttaaagtgattctcctgcctcagcatcccaagtagctgggactacaggcgcctgccaccactcccggctaatttttgtattttaagtagagaccaggtttcaccatattggccaggctggtctggaactcctgaccttgtgatccaccctccttggcctcccaaagtgctgagattacaggtgtgagccactgtgcccagacttttttttttttttttttttgagacagagtctcacaggctggagtgccttggtgtgatctcggttcactgcaacctttgcctcctgggttcaagcgattctcctgcctcagccccccgagtagctgggattacaggcacacaccaccatgcccggctaatttttgtatttttagcagagacggggttttaccatgttggccaggatggtcttgatctcttgaccttgtgatctgcctgccttggcctcatttttatttttttagacagtgtctcactctgtcatccaaactggagtgcactggtgcaatcctgactcactgtagccttgacctcctgggctcaggcgatcctctaacctcagcctcccaaactacaggcacatgccaccacaccatgtgaatttttaaaaatttttgtagagatgtcattatgttgccaggctggtcttgaacgcttgagttcaagaaatcttcccggccaagtgtcctatatgttctgggtacaagtcctacaccagaaagatgacttccaacctttccccttgtctgttttcttaattgtgtatttttgagtgccaaagtttttaactttagtgaagaccaatgaatgaattttatgcctcattcatgcttttggtgtcacatgtaataactcttggcctaactagaggtcatagagattttcccctgtgttttcttctagaaattttatagtgttagctcctacatttaggcctctgattcagtttgagttatttatgtaagggtctaggtttattgttctcatataaattttcaattgtctcagtactttcagttttctttgggaaggagttttaacttacaaattcagtttctcttgtagataaattatatttttcaaatagtttctccattttatctgagttacaaatataatgtactggtactacattttcacaacatgcctttcttcatcttttaagtatcttttttttttttttttttgagatggagtctcactctgtcccaggctggagtgcagtggcatgatcttgactcactgcaacctctgcctcccagcccaggttcaagtgattctcctaatttttgtagttttagagtcggggtttcatcatgttggccaagatggtctcaatctcttgaccttgtgatccaccagcctttgcctcccaaattgctgggattacaggcataagccaccgcgcctggactcttttaagtatctttagattctagaatgatagccttttcttcatttctaatattctaattcctctttctccttattctgtaatcctggggctttatacattttaatgactttttaaaggatcactgatttgctttgctgattttcctgatcttttagacaggatctcactctgttgcccaagctggagtgcagtggtacgaccatggttcactgtagcctcaacctcccagtctcaagggatcctcccgccttagcctcccgagtagcagggactacaggtgcatgccaccatgcctggctaatttttttatccttattttttgtagagactgggtctcactatgttgcctaggctggtcgtagacttctgggctcaagcaatcctcccacctcagcctcctaaagtgctcgggtgacaagtatgagtcaccgtgcctggccttatttttttaactttttatagctcatctttactctcttctcccatgaacaaaacttcccatctttgctacattggcttatagtagtgatttttaaggtatgtaatttattttttaaatttttttttacaatttattttctttttaattggcaaataaaaatgatatatacttatggcatgcaacaagatgtttcagaatatgtatacattgtggaatggtttttttagcttcttaagacagaacttagaaaactgatttttaacatctcttatttttctcatacaggcatttaaaactagctgcatctcatacattttattagtttgggttttataatcattccatttgaatatttttaaatttccttgtgattcattatttgataatggattattgtttaatttccaaatgttggactctcttttataattgatgcttaatttcattgtgttcagataacacattatatattatttcaatcctttgagatttattgaaaattttcattttgtttcaggatatgacatcctatttaatatttcttgcacacttgaaaataatgtgtaatatgcagttattggttattgtgttctatagatgtcgatcaggtcaacttgcttaagagtgttgcccaaacttctatatccttagtaattgcgtatgtgtgtacctgttctagcaattcctgagatggaagtgttaagctctactactatgactgtgcgtttgtctatttttctctccggttgtcaagttttgctttatatagtttgaagtcttcttattaggcgcatacatatttgggattgttaggtattctttttttgtgctatctatttatttattttacttttaagttctgggatacatgtgtagaatgtgcaggtttgttacatagctatacatgtgccatgctggtttgctgcacctatcaacccatcatctaggttttaagccccacatgcattaggtatttgtcctaatgctgtccctccccttgcccccaaacccccagcaggccttagtgtgtgatgttcccctccctgtgtccatgtgttctcattgttcagcttccacttatgaatgagaacatgtggtgtttggttttctgttcctgtgttagtttgctgagaatgatggattccagcttcatccatgtccctgcaaaggacatgaacttattcttttttttttgagatggaatttcgctcttgttgcccaggctggaatgcaatggtgcaatctctgctcaccgcaacttccgcctcttaggttcgaatgattctcctgtctcagcctcccaagtagctgggattacagacatgcgccaccacgcctggctaattttggatttttagtagagatggggtttctccgtgttggtcaggctggtcttgaactcctgaactcaggatctgcctgcctcggcctcccaaagtgctgggattacaggcatgagccactgcgcctggccaaactcaatcttttttatggctgcatgttaggtattcttaaataattgatccttttatcatttgaaatgttcctttttatctctaataatattctttgtcttgaagtctacgttatctgatataaatatagctacatcacctttcttatgattattatttgcatggtatatcttttttccatctttttacttttaaattcttttttagtgtttaggttataattcatctttatatttaagatgcagcttttagaatcagcatatacatattagggtcttgcatttgtatccagtctgatggtctctatcttctaattgaagtgcgtagtccatttacgtttactgtaatgatgaactctaccactctgctctttattttccttgtgtcccatgggttgttttcatcttctcctggtgattttagttacattgtatctcctctgttggctcgttagctgggccactttttaaaggcattgctgtggatcacgatagccaccctcagtctgtcacagtcaaacctgagctgtaaaacaccacttccagggaatgtcagaaaagctcagcagtgtcatcatctctttgccctttgtaagttgtgcagttttacatctgcacatgctatcaggcagagtgttattagttctgctatgagcgatgaattgtctttcaacatgaaattgatttgcccctcctttatatagatgcagaagggcagaggggcagagaagggcggggcccaggtaaggtggtgcatcgcggtgctggccgagggcttatggctggctgagttctgacagaggctgctgctccatggatgccctgcttggccaggtaggatgccttcacatgggcaggagagagactctgcctgcgaactcttgtgggaaagaggaaggagaggtggcttatcctcccagcagtggttttccattggccaaagttcactgcatgggtcttaaacaacccccatttcagcagcctttcaggaagccagagctagcaccttccacggagctcatgaggcctcttgacctggtccttgtcatctccttagccttcgtctcttgccactccctgcctcaatctctccagcttaaccagcctggcctttcattcattyctttcttctaaagcatcacattcttgctcacctcttggacgctacccatgttctgcccggagggctgctctcctgctcccctttggctgacgtctgcccatctgtcaggtgtcagctctgctgtgggctgcctcgagggggtgtccctcatgctctgtcaggactggcatccactcctgctctcgcagccctctgtgcatcccctctttgcctgctatccactgggttcccgtctccctcgctgagaggggtgcacgctccatctgaccattcactatgtcagcagtgtctgctgcagtgcctagcatggagcaggtgcttggcaaatgtctgtcgtgtggcccgtgtggaagggtcctttttagccttagaggctgcctctgtgtggatggtaaacagccacggcgtttaatgttgctcatctcaaggccagtgcttgttagctgctgtaagggtagagtgtgtgacttaaccgtcactcggcatggccttaggtcctgtttataatttggtatcttattgccacaaagagccattccgtttgtcttatggtctcyagcttaacattaaagctggttggttgttgtgtctaaaccgtaaaagggagggggtatcaggagacccgtctgacctcccatcccaccatcatagccaggaactcaggtttttaatttaattttattttattttttgagacagagtctcgctctgtcgcccaggctggagtgcagtggcgtgatctcggctcacagcaatctccacctcacaggttcgggtgattctcatgcctcagcttcctgagtagctggtattacaggcgtgtgccaccacgcctggctaagttttgtatttttagtagaggtagagttttgccatgttggccaggctggtctcgaactcctgacctcaagtgagccgcccacctcggcctcccaaagtgttgggactacaggcatgagccactgcatctggcctggaactcagttttaaggtttttctggagtttccttggccaagagcgggtctgtcccatcggttgggggcttatggttttaattttagtttacgtagtgcagcattgagccaccaagaattcttgccaggccttgaaacctcatggaacttgccctgctggatttgaacttacttgggaccgatgactctttttattccttcttatttctcccttttgaaatgggaatgtatatcttatgcctatctcatcactgtaccttggaagcatattttccagtttcacagttacacagataaaggggaattttgcccagaatggattgaactgaggtctcacccatgcctgatttagataatgagtcttggacatcatttctgattgtctaaatcaggcatgatttagacaatgagtcttggagactttcgagctgaaaatatttagaygagaggctgggtgcagtggctcatacctgtaatcccagcactttaggaggctgagtggggtggatttcttgagccccaaagtttgagatcagcctaggccacagtgtgaaatccttgtctctaccaaaagcacaaaaaatcagccaggggtggggtcatggatctatggtccgagctactcaggagcctgagatgggaggatcgcttgagcctgggaggtcgaggctgcagtgagccatgatagcaccactgcactccagtctgggcaacacagtgagactctgtctcaaaaaaaatcttgagctgggattttggacttagagttgctgctgtaatggttgggactttggggctgtagggtgtggtgaatccatgctgcccatggatgtggtgggttaaatggtggccttttgccaccaaaggacatgtccgtgccggccctgtgaatgtgaccttatctggaaagaggatctttgcagatgtaactaagttaaggatctcaagatgatatcatcctggagtagggtgggccctaagtccaatgacaagtgtccttatagaggaagaaaagggcggagtagacagatgaaaaggcaacgtgatgatggtggcagcaggggctggggttgtgggtccttaagcagagctgagcggtgaactcatgctcggccccggcgcactgcagtgggggcgagggctccttcctagtggctgcagcccgtcctgcatgttctccgtcgctgtgctccttcctgagtcaccaggtggccacatgacctttaaaatcaatactgtcaccatagcaaccaagtgtccccacacgtgggctccaaggccctggccttccaagaatcctcagtcccaggccccgccagggctgaatctgagggygccacggccatctgtcttccatttcccaggagggaggctgtccgtggattctccacataggtggacaccagcatcggagtcccatgggagcccatttcctgttttgggggtcagttctgagatgtgttttccagcaggaaacagcacacacgaatcgtgtgatctgaggagatttaataaaaggactcttaacaaaggcgtgggcagagcatgtgttaatttcataatgatgacagaagatgaagcacacatctcggtgtgactgagctgtgtgccaattatgtggcaacggaggacccatgtccaaggcatgtccctcaggaggcgtggctttatggacgaattatgaacaaatgcacatgaagcctggtgtcagggactgcaccttgtcccccaaaccacccccagcccttcagcacatgccacggccactcacttgctgtcctgcagcatggaccctcctgtcctcccgcacaagccggtttctaccttagggccagctcctgctgttggaacccggacacctggcctcccttgggctactcgttcatgctccggcctcagcatcaaggtcacctgctcagagactcatgctggactacccaagctaaagtggtcccacgatcatgcacgtgctgcccagccatgtgccttcctgtgtgctcctgcgtgctagacgtcagtgcactgaatgcatttatctgtcacattgtcacttggtctcctgtcattggaaggggcagacaccatcgctgccctaatgaagttgacgttcccgggcagcatgggcacacaggggaactcaggaattctctactggcctcactgccccttcccatccacagctgactctgtcccagcctcagtccctcccagcatccccctagaacttcagagctacctcccatgaggcaccaggggttggcatcctcttggggacagcagttcctgacccctcctgtctcatgcctacactgtgcacctcttaacgctcagtcttgtgtttgcctggaccctgagccgtggctggacagtacaagagttgcacctggacagtacaagagttgtgccctgagcccacaggcccctccagggctgatctgcactggccaaatcttaggacccggcattcttttgggagctgctgtttccctacagatccttcctgtttcctgactgagaggcaggtgcctggcttggtgtttgaggctcacagcaagggtgaggttggagggtctcctagttaagtgtgcagatgtccccatgaacccctctgcccccctgcactcttgtcttctgcaggacttggtatccctaggtcaagagcccctttggaccctcagaccagaggactgtccatccccaactgcccgggccggggaggcgtcctgggctctggctgtattcacattctcccgccttttggggtcctggttacctgcaggtcctcagcctctccaatcttcagagtcagctttctacctgctgtctgaagtctattaacatgtcttcccttctcctgttccctcttaggtggtggtggggacgttatatcttttattccttttctgccacttttaggggtcagagggagaggaggagaggcgatgatgtaagttcagaggctgcgtgttttgggaggagccctggggagtctgatgtgtgcaccgggtacgcagggttccaggcactgccctgccttggtacctccccttccaaacgctccttcaccactcctgctgggatgggcaccgagggcttcctctgaggcaggtgctgaacccactgccttctgcgtgcctgctggagaatggcaactttgagggagagcagrgaacagagcttcgcagctgcaagggctgaaaactcggctctgtgcactggaagttagagaccgatgcgtttgtgctagccaggcagggagagctgcggtggctggttggtcaggtaacctaggttatgctgccataaaaataccctctaaatctcagtagtgaaatgcatgccatgtgtcctaagcgggtgcatgtccaggtgggtgcatgtcctaggcgggtgcatgtccaggcgggtgcatgtccaggcgggtgcatgtcctaggtagatgggcatggttccattccttatagtccccaagggatgggggctcctgttggcccagaagccacacagacttcccgtgctcacatttcatgcatcaggcggttagggcgggcggccacactgaatgtcaaaggccgtggggaggcagggctcacagtggctgaatgacagggtagacagttgtgtgcggtgggagggacgggagcgggagacactggccttggagccatgttggggatccgctcatcgtccgggcgggcagcaggaaatcccatctaggatttcaccgaggaggaagagaccccgtctttgtgtcctggttacagggcagaacttaaggaggtaaaggcttcctaaagtcaaacagcccggtagcaaaaactgattcttcagtgacaagcgccaggggcaggcggcgaggctccatgcagagccgcgccttctccagggcactccaaggcgcccagcactttccgcgcaaggtcgcgcctggccctgcgcaggggcagaggtgcccggaggtcaagccgcgccccaggcctccgaaatacgccgagtgccgaggcccctgtcgcatctggacaaggggaccctgggcgactcgggcacgcggtctcaggccggacgggggtcgcgaggatggcacgggggtgcccgagagcgcgggcgcacgtgctcagggcttagcgcccaccccaggcgcccgcgtgtgcgcgcgcgcagccaggcccgccctgccccaccccaccctctggcgcagcgcttggactcagcctgccgcctcctgaccgtgagccgggctctgcccggcagattcccgccgcccgcatcccgggcctgcagcccggcctcaccctgcgcaaagcagaaggctggagtttagggctccccgcactgggcggcggaagcccgcgcgccggctgttttcacgaagaaggcaggggagggaggcccccggagaccgcgagaaggtcccgccgccgtgccgggcacagcagtccccgtgccagggacgccgacctccggggccccaggatacccgtggggacgctccctgcctccctcgctctcgtacccgccgtctagtctgagccgtggtccccgtgtcccggcgaaccacagcccccatccctagactggtggcggccacccactccctagcgacactccaggcactagccccgcccctgccccgcccccggctcggccccgcccctacccttcccgaagctccgcacctgccacgccccggcgctcagctccgcctcgaccccttccaggagctccgccccgcccccgccccttccagaagccccgcccctgccccgcccccagcgctcgcaatctacggggcgggttccaccgcccagaagagcgcacggcgggcgctgccggccccgagcgctcccgctaccactgccgctcccggccctgccggccggccatgccccgagttccggctgccgcgcgcacccagacccggcgatgaggagtggcgccgagcgcaggggcagcagcgccgcggcgtccccgggctcgccgccccccggccgcgcgcgccccgccggctccgacgcgccctcggccctgccgccgcccgctgctggccagccccgggcccgggactcgggcgatgtccgctcgcagccgcgccccctgtttcagtggagcaagtggaagaagaggatgggctcgtccatgtcggcggccaccgcgcggaggccggtgtttgacgacaaggaggacggtgagtgcgggcacggggacgacgtgggggccgcgcgctattgcaggggcgggcgcggctgggcggctttttcccgcaggggttcccccggtgtccgggacggcttcccggggcgccccggcttccggagaagctcgcgccgggtggctgcggccccacgcgagttctgggcgcccgcccgcgtcctccgtttctagtggcggcgccgcaggaggagcaggctgggcccgggccctcggggcgagggtcccccgcggctgtggcgtctccgggcttgcgcgcgcctccgcccaccgcccgtggcagccctgctttccgctttccgtgatccgctcgggcccacgtgcgggctcgtttgtactttgcagttagagaggcgctcacctgtgccgcccgagtgcgagtgaggctcctgccccacaggtggcggggcccggccgctcagaggctcagtctccttggtgaccgcgcggtgtccatcctctgctcacccatgtgcgctggaggcagggccaggccgttgtgcaaagacctgccctgccaggaacgagtgcgctgctgagtcctgtagataaagccgccaaccccggggactggtgtctcctgagtgaccgtgcagccgtgggcgccatagaaagcagagaaggcaggtgaggtgacatgggacaggcctgcagggacacctcccggggtgccagggggccccggggacccccgaattatcacctgcagggagatgtggtgccgcgtctgcctgtgggcactgtaatacagtcacatgcagacatacagctcttttctacaggtaacatgcaaatcatttaaaatcgtacattgatgacacatttcatgttttttgacattttcttaaaatacttgaaatgtgcatttttcatttatagatagcgtgcagaggtatgatggatccttcaaaattttagagcccagcgctcaggagccaggctatttacttgcgataaataatttaagcattatgggaaattacagtaatacgacctcaggccggcgttggtgagtgtggggccgtgcaccgccgttcctccgggagacggcaccggggattcatggtgtgctgcctagaaggagggctgaaggcccagccacaccaggccccacacgctccagggtggcccgtcactgtgtcctgaacttcgggacagcagaactcacgatggtgaatgtttgagaaatgtttttgtttttaacataaatattcaaagtaaagaaagcccagagtgaactaggagctgatcaggaggcagatttgcctctcgtttctggctgcgggttgagagaacgtctgagaaacgcatctggtttagcacttgctggtgtcagccaagagctggctgctcttctgggtctcggcaccgtgctctccgggggtgggagtggagacagtggtgtggcactgggctgccttcagctttgtagggtagacttccctgtgtgttcacagtgtgttatgtcacagaattcaaggatcactagaaaggcaaaaagagcaagcacagagtctgtctgtggggctcacggtctgacttgggaattctttcacatccccagcatcaccgtatttgcctgtagtaggacggcagagattcggctgacggtgtcccacggatgctgctggctccgtatggcttggtatgcagccacatccccaaactgagcacccgccgggactcagctgggctttgtgtggtgaaatcaggagggcaagactaggccctggcccgaatagcagaggacatctctgggyggtgaccgcttccctccgcttcttcctgtcactggcagggcacagacaacttgggagtcatagcacagggtttgcagaagaatgttctgcacctctgagtgtggatgccggggactcgtgttggtggaagggattcagtttggaaggagaaaggagagtcttttaggaagggactgttgcccctgagtcccacccctttcaggttggtgcagtcatttgcctggtactttcgtggccccgtggcagcactggcttaaggaggccctggtgctgtgttggtgtctcgagtttactgaatctgcacggttgctatggcaatgctagaccttccgatgaattttttagattaaaacacctaattaatatatcaaatttagtatgcagagaaaaggaaaaaagaaattaagagtgctgtttaacaaagtgccaggtaaatttcaactgataggcatagttgcgacatataagactaaatgtcctctgttccttttaatccttgtggactccagaaccattttcctaatttggcagatatttggtgcatgtacagaattctctgcacgtctttgtcatgccagaactgagggtctccagttttccttcccctcagcccctcacatgctcccattctatcccttctctgacttcggtgaaaaattcatttttggggttgaacttggttagggggtctttctgctgctgctctgcaccagagctgcatggcgttgggcgagccccttcattcctctctgtcttggtgtcctggtgataccaagtgaacctgagaggaggctccggtaccttcccgctaagcagctctgcaacctggggggcgctcgcccgtctcggggtcacagcattgagtctccagcctgacgtggcattagcccgccagcaggaagtagctcctccctgaggggctttgccttcatctggggaaggctggagtggacaggcccttgcaggctgtggacggcccgccctgggcgccgggccgggcaggcagtgaggcaggaccaggggccaccagactcctcaagtcatctcttaaaattagaaacacctttgttttttcctaattatgaaagcattaaaatgtatgcatttaaaaacattctatactttatgccacggtatctgtaacttcagcattgggatcacggtgtcacctcccagcctttttctggaaatacagtcccaggtacagccgtggagaaacactctctctttgttagcagaagtgggatcctgctctgcatgccaatttgccgtaaggtgcttgttgattcagcratatgttgccagcctcttccagacctgaggcatcatttgttggctgaatttacaacagttctcagccccaggctgtggacccgagtcattcactgggcactcttaaaaaatgcagatgctcaagccccacacccgtgaactgtgggtgaactgggggggtttggtgggttgggggtggkgctcaggggctcaggctttttttttaagcccctcttgagttttaccagcagtcgaggctgagattcccgactctgcagtgctcccctgagcagctgtgactttctctgcttacttagtttcctgtcacaggactgtgaggtgtttctgttttataaatatcataaacgacgtattgatgaacatcgttgcagatctttgtgcacttggcattgtttccctaggatacatttttaggaacgacattgctcaggcaaaggggtccgtgtgaaataccttaacacgtgtggccgctcaattggtccctctctgagcattgtttatgggccatgctgtcgtggggtaaccgggcagaggggaagcagagagactgacaagacagggaggcaggagcgagtgcagtgggtggcgggaggcacctgcaggggagagaaccagaccacctgctgccagcggagctggcgggaagggaaaacccattttcacttgctccaggagcgggagggtttgatcgccttttcccctgaatcctctccagctttgggtatcagcaatgtttctattctttgccagtctaagagattaaaagatggcactcatgctttgagtttctttgattatcaatgaggttcatcatctttttaccttaaatgtttagagcattcagctctaaacacatttcacgtgtttccacactttttgaattgcctgcccgcgcttgttagcggcatgtgtcctgtgggatggcagccgcaggttcctctcgcccttcctggtacacaggctgagccttcagcagcttccctcccacgttcctcatttatcttttaatgttgctacttagcttttttctctatggatgtgtttaatttgtgtgtggtcagattcatcatctgcctttgtggctgcgtccggccttgcctttatgtgacagcagtccttcccagcacagttaataataatttaattcataaacctgcatctgtactttcttctagcgcttctgtggtttcactttttgcgttggaaattgcagcccgtagggagtatcgcttgacggagagtgagaaagctctctccttctcgcattagttctcctctttcccaggatgagtgcagttaggatgtttccccctgtagggatctgaggcctcccacgcagcccctcaccgcagagccccaggcaggctgcgcccttgctgctcccggcctgtgggactggagtgggaccgtttccacgctggctgctgctgatgtgaaggaacgctccacttttacaaggttcaccttgtgtgtggctgagacttcgctgcctcttgcacatgactgcacttggctaaattctcgttagtctatagctttgaagttcattttgttggctttctgggtggtctgtcacgttgccttggagtgactctagtggccccgtgatggttttgcctcgttctttccttatggtgttgccggarctcatggagcagagaagagagaaggtcctgagcccaggggctgccgagggctggggacagctcctcccgcacggttggtatggacgggttgtccttccagagcgtcagcttagccctagtgtgggaaaactttccagtcaggtgtggactcgcattttggagggtgctctttccttgcctcctgaccctgtgaggcaaggggtgggggctctctgtgtggcccagacacccatcccccacagtgcaggcgcttggtggtcagaagcctggtggctgcagaggcccctggtctggggtgtggactggggaggaggcctatggtcctggcctcctgccgggcaccccgtcacatgtttgctcctggcttccccggttctgggcccagcaccgggtgtcctgggggcccttggggcagctgtgcagcttgatgcctcttctccttcccagctgtgaggctgctctagaatggactcgggacctactgtcatactttttatgtaacaaatgtcagctctgcgtgtctatccatctggttgtgcattttacaaggctaaaaataagccggcttttcttttagaacttgaaccacccagctttccagtggagaagtaatgcgaggatgccttggaggtgattttgttgagggattgattctctgcgggtgaagcccagagacactccaaggtgatctgagggaggcaaagtcacagacaagtgtttcttccacacggagccgggaccactcagagcagctttcctgcctgtcccggacccccagtcacccaggacttgtgaaaatgcggctgacccagccggcctggggtggggccaggagcccacatttccagccggccccaggcggtgccagcgctgctggcccgcggacatactttgagtgtgagagtttagtgagtatatagcyggtgcatcatggtgagtgagggcaggaaacccacggggtgctggtcccttggcccgggctcccgatgggcctggagggggatctctaaccctctgtaccacggggttgccagtcatcagagggcgcctcgcggtgtggacttttaatttgcttttcctccttctgttcctctcagtcctcttgaaggcccagccttctccacacgtggccgacgtgcagctcctggttcacatcttgcattttcacccggcccagtagcccgcactgtttcctttacactgggatgcggcatctgtcttctgacccggatctgaggcagggtagtctggtgtgtccactggcgggttcctggggagtgtggccccgtgcttttgggcggagcatcctgtgtccccgagcccactgcggggccttgtcttccccggggacccccacacctaacgggcrctcccagctgtgtcaggcaggaccctcctagggaggaacccgggttccaggccaggccctgcaggaccactcagagcagcttcccagacttcctcttgagcccctcggctcttacatcaagtaagggcctgtgccctgtggccctgaccctgtctcttcctggttgggaagctcggagctgcatctgggttcacattagtggaggaccaggccttctacttggtgtcgggaagctcggagctgaatctgggttcacgttagtgggggaccaggccttctacttggtgttgggaagctcagagctgattctgggctcatattaatggaggaccaggccttctactgggcgttaggaagcttggagttgaatcggacctcgtgttagyggacgaccaggccttctacttggtgttgggaagctcagagctgaatctgggctcacgttagtggacgaccaggccttctacttggtgtcatttcccttcccagccagattttcctcctcacctaaaaagctccgttgagctgtgtgtttctctgaacctccctctctgctgtctgtgtataactggagataaaaataaagctctgtgaaccaccatttctcctgctgctgctgactaatacttgggcacgtggcgagaccttggtcttctcagccaccctcctgagtgggatgccgccttgttyggctctggctgtcartgggggcgagtggccacccggggtggtatctctgtgcctggagcrcttccttacaggtctcctgcctgccctgggcgtgggcagagacgcaggcccctcccctctcccagtatacaggcagaccaacctgctgattgatgataaagatcagaacttgagacagtttggggaaagctataagcaatacaattattgttatttgtatggtatgcctgcttcatcagaaaacagtttcctcattgatttgaaatctattgttttaaaaatcaaggctgctgcagagatcagcatggctgggcaggagtgcagacggaggtgcttgccctggcctggctttgtccccccmagattccatccagcctcctctcaccccacttctccacctgtgaggagggagcccccatggtctctgccatgcttccttctgggctccggccctgccaatcctgtggaaacccatctcgatgttatttaagttctgaagccaaggagatggtgtaggtgggagtcagtgtcgcccccaatttattaaaaataggaaccgagcacattccatttctcacagtgatttagaaagttgactttgcaaaggtttctcctcttttgaattcacatcatgactctccgtcctccgaacgcagaaggcagaaagtgtgatagagcaggagagaggcgcctctgtgtttggaatgtctgcaggagtctagcacgggcgttgcacgcattctggggccttggcaaggatgacatttgtcttgttttgaccacgatgctgggatgtgagcaggagtccgcgggggttttggtgccgcctactccatgcacctctgcctctccctgtgccagcgccctgggtcccgtcctcagtcactttgtgacgtctgacctcagagcctctgttcgctgtgggaaagctgttcctggcggctcttgtgcccaataacagggctcggggtcctggcaccgcgtttctcaaaccrggtcctgttcgtgcccaggggacacattgttccacttttctgttgctgctagtaaactaccctacactagtgacttatcagcctccttgtggtttctcacgatgctgtgggctaggaatttggacagggcctagtggggacgggtgtctctgctctgcatgacgtctgtgggaccagaatgtccaccgtggctccctcatccatgtacacggcacctcggccagagcggctcagagagctgcgggctggtgcaaacctccccaggggtcttgtccygaggtctcagttagtttgctgttggctggtggatcagctgtccatgctgctgggtctcgtcctggggtctcagttcgctgttggctggtggatcagctgtccatgctgctaggtcttgtcctggggtctcagtccactgttggctggtggattagctgtctgtgctgctgggtcttgtcttggggtctcagtttgctgttggctggtggatcagctatccatgctgctggggtctcagtccactgttggctggtggattagctgtctgtgctgctgggtcttgtcctggggtctcagttctgctggtggactagctgtctgtgctgctgggtcttgtcttggggtctcagttcgctgttggctggtggatcagctatccatgctgctggggtctcagtccactgttggctggtggatcagctatccatgctgctggggtctcagttccactcttggctggtggattagctgtctgtgctgctgggtcttgttctggggtctcagttctgctagtagattagctatccatgctgcttaatgaatttcctcatagcctagtggcccacagtgagctccatcttatcgtttctgagtcggtgattcaggagtggcttagccggtgcatcctcttggtgtctctcatgaggctgcggtgaagatggcagctggggctgctgtcacctgaaggtttgactgggactggagcgaccacttccaggccagcttccccatgtggctcctggatggaggcctctgttccttgcaaagggagcttccccacacactgcctgggtgactccacacactgcgctcaactccctcccagtgaccccacacacggcgctcaactcccccccagtgaccccacacacggcgctcaactccccrgtgaccccacacagggcgctcccctccctccctccccagtgagctgagcaggagcgagaagccacagcgaggatctcagccacaggctcctcccagcatgtcctgttaggagcaagtgagcaagtccagctcatcctcaggggaggggagctggaccccgcatcggaaggggctgccgtgggacctgtggacttgtctcacaccaccacagccgtcctcagagtctcggcttcttcgccccactgggccccacattggggcaggaggaattcctgagaggccccagggcgcccacagacgcagagtagaagatgccgggccttcttgaggcttaggcctgggctggcaccgtgtcactttgactgctttctgctggttggagccagtcacaggcccagctcagattcaggggagggaccacacagggtgaagtctccgcatctgggggtgggctagggctgctgcgggtcggccgggctgtttggaagagctggacatggggccgggagagcagggacgagttggaagcgtgaccttcagggagtggtgctgctgcctgccacctgccagcatcacacaagttctctctcagccacctctaaccccagtttagccaaatggccaagcaccagccagtgtacccgggttgctgccgcagagcaccaagaccccaggagacacaaagcatcttctgagctttgaaactgaaagagcttggagggaaggctgtttgtacttgagaacaaacaaacaggaagttggagtggagtcaacatcttcctgagtttggaaaataaagccccagagaccaggcgggtgtgcacctgctgctggccgcggggcgggcccctgactacgggggcttcgccggggagtctcggagctctggctcagggcttcctgcactgcccctggaggacgcacctgtgactgccagggtctttgtttattttgcccccaattctttttcctttttcttgtaaacatcagtcatcttgtgtgtctgaagtgatgttttatctccaaaggcagaaaagataatctgtaaagttagcacatgactgaaagagggaaaaagatgaaataggaagaaagatacaaaggaaaaggggaggaaaaaaaatctgttctgaagaaagcattggaccctgggaccccagccccagagtgcgtggcccagctagtaccggggctggcgtggcccctggtggggctgggaattgtaggtggcaattggaaaacccagggtgggctaaccaggcacagccacagcaggcccttcggtggatcttcggggtctgctggcagcgggggcggaggcaccggtggggtggcagcgaggactggctgccctggacacgctggggatggccacggaggaggggcyggggcatgtcctgcagagggtgtggggtgggagccaagcaggaggggagtcctctgtcattgggtcctggtgccccttccccagagccacagcagccagaggcgcaggaaggaaggggcctaagccgtgactgtcacccgcccagaagctgcacctgctcgggcaccacaaggaaacaaaaggtgaaaggggtggtgagtcagtggcaggagaggacactgggcagagctgtgcccaggccttggcctctgtctgtggcgatgtccgcctccctgtctctgggctgcctctccttccctgcaccccctgccgtggtctccccactggccctgacactcctttccagagccgcagaggctttcgrcgtcccagagggcgcgggcctgcgagtcctgcctctgtggccaccatgccccggggtcgcctgggacatctgcttcctgcctgctgatcggtgccattcctcacagcggcccctttctgtctccaagtggcctggtttggatgatcaattgtgtggttgcccggtctaaccaccagatgctgtgccaggacgatctctttcttcctttatagctttttattatataatgaaagtgacgagaaaaaaattaagaaatccagcatcttgtgtcatgtcagcactgataaacaaccatttgtagtttttcacatgacctcccagttcgtactggaaaacatgcaaaatctatgtggccttttaaatttcaggatagtttagatttatagaaaagttgtgaagctgatacagagagttcccttgttccccagaagcagtttcccctyacgtcaccgtctggcattaaccgggtacatttgtcgtaactagaggacccgtatcsatacctcgttgtgaactgaagtccacactgggttcagatctcctcagttgttccccggtgtcacttatctgtcccaagatcccgtgttacatgagtctcctggcgccttagtctactccgtgctgtgaccgtttctcaaacttgctttttatgaccttgacagtttggacactggtcagctgtgttgtaaaatgtcctttaactgggattcatttgatgtttctctcaggattatgggcctttgggaggaagaccacggaggtaaatgccattctcatgatgtcatacgagattacacgctgtccacacaccttcctgccgatgctggccctgtcactggtgaggtgtctccaccatgacgtcccctttcccccttttccacactgtcctccctggcaggatggcaccatatgcagcccacaccgggtgtgggggtagttatggtcccctcatcaagggggcttatctatatacgtyattcagaattctttttttttttaagatggaatcttgctccgtcgcccgggctggagtgcagtggcacaacctcggctcactgcagcctccgcctctgggttcaagcgattctttttcctcagcctcccgagtagctgggattacaggcgtgcgccaccacacccaactaatttttgtatttttagtcgagacagagtttcgccatgtcggccatgctggtctcaaactcctgacctcgtgatccgccctcctcggccccccgaagtgctgggattacaagcgtgagccactgcgcccggcctggaattcttctgtgtagatttgtctcttccttgcrttaattctgttaccccgtcattgatatcactgtagactcatgggtgctgattttacacgctggttgtaattcrtcactgctttaatttcttggtcaccccgtcccagtctggccactgggagctgtcctttgccctggctccttcaacaccccttcttcggtgctttcgttgttgctcttgtgagtttctgatcactttctcacattcgggcactgcacgatgctgcaggctcaccccgtgtgtttccttacccagccctagaactggccatttctccaaggagccctggtttctttgttaggaggatggtgttagacactgagctctgggtcccattgtgctccttgctctggggggacagtgatctttttaaagtacgaagcccatggtgtcactgccggcttaagactcttagcttttcctgtcactttgtttgctcagcttaacgtgttttccgtgcacctgctctgtgcactgccggtgggcgtgtgaattgacaggcctcctttggaggctgtttctctgggtttactgaagtggcacagtccacaccgagaggggcagaggccgctgacatctggagctgtcctggctctgctggccgggcctcagtgttcccttgtggaccacacatgatttacccgtgtcatacacaggcaggacagatcacgatgaaacaaagccaccacacgtggcagctgcaggacctgtggcctgtctccgtggtcaggacttccggggaaggggacggaagtcactgcagggctctggaatacagaacccggggctctggggggaagagctgtccatggtgctggccctgggtcgggggctggtgcactgacccatgcctggatcagaggctgagctgttggctgtagatggtgcgaggtcaatggctgatagctgtgtacacaactagctggagctcccgaggggctaagagtgagccatgcatgttcgtgtcccgagagtggagaagggcgccaggcatcagatggcgtttggtgtgtggctgttgagtgaataagcaacatgctttatttcctgtgctacgaaagtgtcagcccacagccctatttctcagccctccattttcagcaaaactcaaactcactcactccctgccgtctgcaggcctcccctccagttctcccaaaacccgctggagctggaatctgccccacctgccccaaagatgccttggggcgggcccctccctgtggctgtgctctgttcccagccttccttggcctcgacctatggcagggtctgacactcctgatccccaacccccttcccygtgcctgctccatggcctccttggcggatcctcctcgtctctgactctgactctgccgtgctggggctctttcacctcccgctccacccacacgctggtgatctcatggttcaaataccacctatatggcagcgactcccaattcctgtctccagctgggacctgtttcccacattccaggcttttccgtccaccctccgactcgacattgccactcgagtgtctcagttccgcaggttcaaatgcgagtcctgatgcccccatgctggccccgcctgaaggcccctgcctgtgcccacctctgagctccctcgggggccccttccctcgtgcctgtgaccgtcaggtgttctcttggctctaccctctgaagggccccctgtgccctggctccttctgcgtccccggagcaggctctgccccagctctggtagggcttcctcggggctgtccccacccccattccccaggcagtggctggtgtggcccagtctgctggacctcccacctgctgggctcctggctctgttcttcaggccgaggctcaccacrtgcctggctgtgtgatctccccacccccactctggccctgcctgccctgcgttccctctgctgtagccggcctgactgctgcttcttaaaagagctctgcccacggcaccctccgtgtgcctggccggctgccttgctcccctggcccagtctgggtggcagacgctctgcagtaacgcccaccccaagccagtggctaaggatgacagggccttcattctgccgcctgccctgtgtccccatgagtccaagggagggcttggctcactgtcacactggcctgtgtgaaggtgcagccaccaggggctggagtgggagaaggagtgttctgagatgtcttttgctggcgaagaattgccttccctggcctgagagtggctcacagcttgctggccaggacagtcgcttggccctgggccatctcagagccaggaggggagcccgccaggcgccaggcctgggtggagggaccgtgagagtagcgatggccactccatcctcctctcagccaggcccactctaagtcctgccccagccccctggccccaggcctctcttggctcttccccagcgctgccctccccgcacrcatgcacgcgctgcactgaccgcccygcacgtgccgtgctccccgcttgctgatgtttgccgttcgctgctcacctctgggtcagcctcttgccctgcacgttgcgtggggcaggtttcatctccttggctcagtcttgtgtcctgagtgacttgcagcactggagcaggtgagcacccaccgagtcaggaggaggacgtctgcatggggaagggaggggggagggaccagggagggaccggcagcgggtcgtcgcggggcttgggtgccatctccagagggtgagaggttggcaatctgatgccctccctcacacctttcttatagaagagctccaggggatggtgtcagccaggcctctgagagtggcttcccagggtctggtgtctttttttcgataattccagggcctgctttgggtgggggtcttgcgttgggtgcccctcagagcacctgggctggcaccgggaatctgtggattagcctgtatgggtatgagcacaagcatgggagtgcatgaatatggaagcatgtgtgcaagcatgaatatatgaatgtgtgtgcatgagcatgtgagtgtgtgcatgcgtgtgcatgtatgcatgtgtttatgtgtgcctgagcatgtgtgaatgtgtgtgcatgcatgaattgtttacgtgtgtatgartgtgtggatgaatccgtcagactgagtgtggatgagtgtgtgactgggtgagagagtgtgggtatcaatatgcatgtggtgagtgtgtgagcattgagtgcccggatggagaggccgaggccgatacccaggcccttggtggcagtgaggggaccctgtctggctgacgcatggtcctgggggtgcttgtgagggctgggcttgggctcctgggctcagagtgtgctgcactggctgtctactcctcgtggaggtgcttatgttggcactggatgtccagggtggcagtctgcctccaatgtccttgctcttcttgactttagagagtagctgaagtgttgaggcccagtgctgactggggtctgaggccagtcctgggaggtgctcagtccctgtaggagccttgggcccctgcaggggaagcctccaggtctagagaggtcagtgcaacggtgggaagtgaaggctgggccgtatgtggacctcactgcaatgctcttcttccccgctccccactggtgtctgagaggggagacacaccacctctcgctgtcagcatcaggcttgccagggcaggaggttaggaatggccatcttgtgcacacaggtggacatggaggccatgtggtctgtgtccttcagctctgcagcctgagggtcttcagtgcaggacggcaggcaggtcagagctagggtgggggggatggggtctctgggacctgaaggttctctctcgaggcctgtttcatgagccccatggctctgcttgaagcctggcatagctcagcctcagcgttcatacaggagtctggatgcgtgaaggatggtacctggtgtgattctaaactcagacttgcagaggggcactctggaaggctccaggcccamctccattgggcgggctggcatctcrtgggcacagcccttcttcccactaggtggcctgggctctgcaggtgaccgtgcctctaggctttctttggcacagcttgaccatggacttctttcttccaaggccacgaggaggtgtccacagggctcctgggtcctcagaaagcagagcctcatcctcacaaggatgacatacatctcagatcgagaacatccaaggggacagggtcacccacagccagtggagcctgtccttcctgtggacctgtgtggcctgtccaggggcccagtgcagtggatcgcaggaaacctgtgccaaaatgaactcacattcctttaattaagaaacggcaatgctccagagagcgcaagccagctcagccaccgccgagctaattggaaggttcagaaaatttccattaattacatttgccctccggtggtttcttctcttctatgtgcagtggctgtgttgattttgtgttttcaacatacaaacagtgaggtcccacagccatgagggctgttatcgaatgcaggagagagccggaagggaggcaggggagagccaaggcagcggaagccggtggaagactggctgtgcctctcctgccgtgtttcccttgggttgccctggatgtggccctgggtgtggtgggtctggatgggtatccctggacatggtggccctgggcttggtgggtctgggtgtggtggccctggttgggtgccctcgagcatggtagccctgggcatgatggccctggatgtggtggccttgggtatgatggccctggatgtggtggccctgtgaacagcagtagagccttgggccctcagggcagcaatgtccagcgccccagggctgtggtcagggggatgcctcaggacacagcatgctggacactggcttggtcttggcatcttcctgggtagtcctggggaccttagcttcttaggggtctcttggaatccatcctcataaacgtcagaacagtcagatgatctggccaagaggatctggctttgagtttggagatgtcactctcctatgagcgtgcatgcatacacacatgtgcacagtaatcgcatcctctctaggtgctacctgctgcaagaacacgtttctgtctgttgctgagaaagccatgtgggcaggggccgggttatgttcgctctggactccatatggtcttgcacatgtaagtgctcaataaatgcttagatttaacttaactgggtagaaagagaaagtgaatgagtcaatgtggaagggagctgggsacatggaggttgggcgttttgaccatgagtgttgcacaaagctgtgtctcccttagggagtgtactgcggtgtccagcggggaggcatggcccagccctgctctcctttctggctgggtcccggggttcttcttggggtctatggtggaggcatctgctggccatagggtggccggctggtatcttggagacacagcagaatctctttggcaggtgtggccaaatcggattgctgttggatgaccatacggttttcaagaaaattatgcatctgaggttggcaaataatgggcatttccaaacgtgatgtgataagttttgatattaggaacatttgcattttcctgatgactgatgatattcacgactctttcatgtgcttattgaacattggagtggaccgaatgtttgtgtccccacccacatacatatgttgagatccaccctccagagtgacagtattaggacctagggcctttgggaggtacttaggtgataagggtggaacccttttgaaggggattaatgcctttataacaagggaccccagagggctctgtcaccacctttctaccctgtgagaacatggagagaagacagctgtttaggagccgagaagtgggccctcaccagacactgagtcttccggtgctttgatcttacacttcccagcctttacagctgtaagaaataaatctctgttgtttgaggaatcaggtctatggcaatctgttrtagtagcctgaactgactgagacagtcatttgtgtggcttactttgtgaagtgtctgtgcaattctttagcccatttatgtgtgtgttttattaagttgtaggagtttaacgattctgtattcaagtcctttggtggacagatgcactgtgttttcttccagtttatggctcamccattcattttctcagcggtctcttttgatgagtagtctgtgtctcctctaagaaatckttgtctatcctaaagtcaagtttaggtctaagatacatttaaaattaatttttgtgcacagtgtgaaatgggggtagaggttcatttttccatgtggatatccatttactccagcatcattcattgaagagacttagctttccccattggattaccttcgtgcttttgtcaaaaaccagtatgtttgggtctatttttttttatctttcttgttgccagtaacacactgtcttgattattgtagctttatagtaaatctttaaatgagatttttatgtccaccaacttagttcatttcccaaaattgtttcagcaattgtggatcctctgtatttccatatgaattttgaatataaacttgtcaatttatatgtacagaagcctgccaagatgttgattcagactgtgttagaaatataactcagttttagggaggctggacatcttaataataattagtttttcaatccatgaacatggtacatctctccatttattgaggtcttctttaatttctctcagcatgggttgccattttcagtatacaagtcttgtacatctgttaaatttatccccaagtaatttttgttttatgctactgtaactggcattattttagttgtatttaaaaatttttattgctggtgcataggaatatgtttaatttttaatatcagttttattgaagtctaatttacataaaattcacacattttaaggttgagatttaatgagttttgacaaaggcatacagtcacmtaaccactactgcaataaagatgtagaatatgtctgtcacctcagaaagctcgcccttgaccctttacaggaagtccagctctgggctggagttggctacactggctcacaggagccaattctgcatctttgtctcattcctctttagttcttaatggtggttttggagaaagaagttttaaatgttgatgaagttcagtatatcatcaatttcttcctttatggtttgttctttttgtgttctttctaagaaatcttcraccagcgcttgatcacaaggattttttcctgtgttttcttctagaagttttatagctgttaatttttgtgtttcacatgcggtgagggttgaggatttttttcccctcttcttccctccctcactcttctcctttttataatctggatgtttttatggtccagcactatttgctgaaatgactaccctttcctcattgtattaccttgacacctttttttttgggctgggggaagagcttataattgtgggtttattcctgaacattattcttttctgttgacctgtatggccgtctttaccccagttcaacactatttattactgtagctttataagtcttggaagcaaaaccccagttttgttctttctcaaaattattttggctactcagattatttgctcttttatcccagcttgtaaatttctgctactcattagtattatttgtactcttctggaggagagactcattgggattgcactgaaactatagatcaattcagggagaatggatctcttaaaaattgaggatttttggccaggcgcagtggctcatgcctgtaatcccagtactttgggaggctgaggcaggtggatcacctgaggtcaggagtttgagaccagcctggccaacatggtgaaaccccgtctctactaaaaatcacaaaaattagccggacatggtggtgcacgtctgtcatcccagctacttgggaggctgaggcagaagaatcacttgaacccgggaggtggaggttgcagtgagccgagatcacgccactgcactctagcctgttttgactgagtctcgctctgtcgcccaggctggagagtacagtggcacgatctcggctcactgtagcctccactcccgggttcaagtgattctcttgcctcagcctcccaagtaggtgggattacagactcacaccaccacgctcagctaatttttgtatttttagtagagacggggtttcaccatgttggccaggctggtcttgaactcctgacctagtgatccgcctcccttggcctcccaaagtgctgggattacaggtgtgagccaccgtgcctggccaaaaattgattttttaaatctatgaatctgtggcagttgggacattttattttggtcgtctttartttttctcagcaccgtttcctagctttcagtgtgcaaatgttgcagatattttgttaaatttatccccacatattttatgttttttaaaaaatgaaatctattgcttatattgtctttgtattctccagccttgcttaaactcactcagaacttccattatcatatttttagattcttgagggtttctcaaatcatttgcgaataaagacaatttcgctgctttcttttaaaactttctgcctcattgcactctctgggatctccagcacaatgagtagaagtgagagcagacatccttgctgttttctggtcttagggggaagcagtcaacattttattatttactgtaatgttggctgagccttgtcatgtgtgctttttatcaggtagaggaaatctccttctcctcttagtttgctgagttttttatatttttaattattaacagttgttgaattttgtcaaatgctttttcttctgtatttgtggacgtgatgatttttcctcctttattttgtttgtgtaataagttacattgacttttgaatattataccaacctttcatttctagatttgtttttatgtgttcctgaattcagttttccaatatttcattaataatttttacatctgtgttcattagrgatattggcctgtgttttctttcctgcagtgtccttgtctggttttgacatcaggcatgtgctggcctcacaaaatgagttgagcggtgttctcttctcaattttctggaaaagtttgtgtaaggttggtggtgtttttccattaaatgttttctaacattcaccagtggtgctgtttgaccctggagttttctttgtgtgaagattttaataatgagctcaatttctttaggagataaaggattattcagatcttccatctcttttgtgttagttttgataatttgtgtctttcaaggaatgagttttgtccatttcatctaagctgttgagtttgttgcatgaagttgtattattttcctttttttttttttgagacagagtctcgctccgtcacccaggctggagtgcagtggctcagtctcggctcactgcgagctccacttcccgggttcatgccattctcctgcctcagcctcccgagtagctgggatgacaggcgcccgccaccaagcctggctgattttttgtgcttttttagtagagatgggatttcactgtgttagccaggatggtcatctccatctcctgacctcatgatctgcccgcctcggcctcccaaagtgctgggcttacacgcgtgagccaccgcgactggccagtattttccttttaatgtctgtagtgattccgcccttttattcctcacattagtgttttgcgttttgttccttgtctataatagaggggaatgatgcaatctatcgctatgtctgttggttagtctgttccttcctttcattttgtctatttttgctccacatattttgggttgttgttgggtgcattcacatttagggttggtatctttctgatgattaaaccttttaggaaatgttcctctgcacattggtcaaatatcccttgtttgaaatgtgctttgatgtagtcacctaactgtatgatcagtgttttcatgatgtatcattttcyacccttttcctttttaacctgtgtctttaaataggaagtacatcttttacaaatatatagtggtgtcttgcttttaaaaatacagtctgaaaatatctgctctttaattggaatgttagcgtcattattgatatggttttccttgagtctacagtgttgctaattttctctgtgtttccatctgttaattgtttatcatcagtctcccagggtgagaatatagactcctgagggtggggacgttgagctctttgtggagctccacaggcaggtgtgggaatgtgttctgggttcatgcctggtctttgggcaggtgtgggaatgtgttcygggttcatgcctggtctttgggcagacgtgggaatgtgttccgggttcatgcctggtctttgggcagaygtgggaatgtgttccgggttcatgcctggtctttgggcagacgtgggaatgtgttccgggttcatgcctggtctttggacagacgtgggaatgtgttccgggttcatgcctggtctttgggcagaygtgggaatgtgttccgggttcatgcctggtctttgggcagacgtgggaatgtgttcygggttcatgcctggtctttggacagacgtgggaatgtgttcygggttcatgcctggtctttgggcagaygtgggaatgtgttccgggttcatgcctggtctttgggcagacgtgggaatgtgttccgggttcatgcctggtctttggrcagacgtgggaatgtgttctgggttcatgcctggtctttgggcagatgtgggaatgtgttctgggttcatgcctggtctttgggcagacgtgggaatgtgttctgggttcatgcctggtctttgggcagacgtgggaatgtgttctgggttcatgcctggtctttgggcacgtgtgagaatgtgttctgggttcatgcctggtctttgggcagatgtgggaatgtgttctgggttcatgcctggtctttgggcagatgtgggaatgtgttctgggttcatgcctggtctttgggcaggtggttcccagggctgcagctctgttcgtctgaggggaaaggcccatgcagtcgatgctactgggggctctgtgggtgtcatgggtgctcagagtccctgtggagcctcatgggttgaatctgctgccctcccaacctcacctgccctcccaacctcacctgccctcccaacctcacctgcccccccaacctcacctgcccctgcaacctcacctgcccccccaacctcacctgccccccccaacctcacctgttccccccaacctcacctgcccccccaacctcacctgcccccccaacctcacctgccccccccaacctcacctgcccctgttctccaccttgatgccacctcctactctgcccgtttcctgcggggcttcccatggggcccggcaagccgctgcggaccctgcagacctcaggcacgggtggatgcggggcttgtggtcggcgtctgctcttcaccaccatcctcctgtggtccacgtgccctttcagttggccagctctgctcatggttggtcagaggctgtgggatgcgcttaaaagcctcagcagcaagtcctggaatttggagagtctgtgacagagaagggcacattccgtggccagacaggttttgattctgtgccatctgtgtacttgcctctgaccatcaggtgggggctgcacccgtcttctcctttggttcccctggactttggatggggcggggctggactcagggaggcctcctgggcagtctggggtggctcttcccagcagagcgtggggagaagtggagccacagccagccatgggggcggaggaggaggcagcagctgtgtttctcagtctcaggcgcagcggagtcggacgtgtatggcaccacgtgttccctcctcttagtgctggggtcatctccatgacagcccgcggcctctccctcctcctctcttcagctctgcagatgctggaccctcaggtgttccccaaaaccgggcccagacctgctgcaacttgcaggtcacaaaccrcccccttcactggccttctgtgcygaggaagatgggmggcctggagggaatctgcctttctagaggctggagccctccccactgcccatctgtctgggagcctggtccccatgacaccctcctcccagtgagtgcatccaggactctgcctccgctggtcgcacggtgaggggggcgtggctgccgctggaccttcgcagcctcgtctgcgttctgccaacgccttcacagcctgtttgctccgctcagatttcacagggcgggttgtgccattttttcttgtaacttacccgtgttacagtcatccccaaagccactgatcagcgtgttgctctgtgctgaaaacgttttgctggggtgtcttcagtagcgctcacagagctgagatagcatagaggactggcgcagtccctggggcctggggcctcggccggcctcccggctgggtcttggccatcgtggccctgaggtgcacacgcctctccctgctctgtctggtcactggattcttctctgctgcccccgggttggctgcatggagtggggtccgccttggtggaccttttgtggtcaggacccctgggaatgtgattggtgcagcctcggcctgagaacgcagcagggccagcctccccgaccccagcctcagaggggctgtgacaggaaatgacaacrccccccaccgcctcctgaccagcagagttgctgtagcctgtgctgtgttttctccagagaaaccacttacttcttcccttcgctccagcagctaatagggtgcagcagtcacttctggccggttccccagaggagtggctgctggtggctaagatgtttaactggtggccccagcctactcagacagctgggtgatcggatgctttgtgtyggcttccttaatggcaagctgacttcgtcgtcgttgttrttattattttgttgttatttcttgtttcaagttggggtttcagtgtagtgtttagtatgtcacttcccctggtgaagccatggctgtgggttaaataagtgaactgcagaaggacaggcgcaggtacaggtgggcacaggcacaggtgggcgcaggcacaggtgggcgcaggcacaggtgggcgcaggtacaggtgggcgcaggcacaggtgggtgcaggtacaggtgggcgcaggcacaggtgggtagctgacgcctggcactgccctcttcatcagccaccagaaaactgcaggaaaccacccaggagctgtctcagagaggactttattccagttccagcagcsactctggacggcctggggaagctggcgcagctggcagggcgtgtggcagggatgggcgctgtgagagccggggtgggcggctgcgaagcctctcgggcgtggtgcgggctggttggcgcaccttggtcctgcactgggcattttcagcacatccgctcttcccaagtgtagcgtggctgctgagtgttacacaatgtagcgcctccccgcccagcacctgtcgcccccacccccggagcggctgggctgctgcctggccagctggcggctctgcctccaggccgggatcagggaggcgcctccctctgaatgtcggcgctcagcagggacgctgctctgagagtggcagcggacagcatggggagagtggcccctgtgaacaggctcccgtctgaggagctctcttccccccagaccccaccatcctggttgggctgaaatagccatcgtcagagaagttgccccgcggcctcagcaccatgtctgatctcccacccgggcttctcccaaggtggagcaggtttctgtgggtcctggaaccaaagcagaggggcctgcaggtgccgggagggaatctgtcttttcgtctcccggggacctgcacaaaccacccgaccggcccagggggatactccctgtccrcaacagtgctttccaaccggagcccttttctgatagaagatttctgatagaagattttcaaagacagtatttcttgagctgggcttcatgaacatactctttgggctatgtgagaatgtttttttcctttaaaaaaagacaatcatattaagcttggaatacactggtccaggcccactaagacgtgagctggcaaaatggctttcttttacccagcaggagcgggcccggtaaggtacgttaggaatagctggggcactgtctgttttatgttgtatttaacaggcttttgttttttaataaacagagaggcccaaagaaggaaacagaaaagaacccataatctcacacccagataacccctattgccaacaaaaatagttcaagtagaaggttcaaacacggacatagtctagagaagcaaaagatggggcctgaaggtcactctgtctatgcacctgtgtgtgtgtgtgtgtgtgtgtgtgtgtgtgtccacgaggatcacgtgtgtgtgtttaaagataggtcttgctctgttgtccaggatggagtgcagtggcgtgatcatggagtgcagtgccatgatcacagaatgtagttgcatgatcacagagtgcaggggtgtgatcacggagtgcagggacgtgatcacggagtgcaggggcgtgatcacggagtgcaggggcgtgatcatggaatggaggcctcagcgtagtcagggagtgcagtggcgtgatcatggagtgcaggggcatggtcacaggatgcaggggcgtggtcacggagtgcaggggcgtggtcacggcatggaggcctcagtgtgatcacggagtgcagggacatggtcatggagcgcaggtggtgtgatcacggggtgcagtggcgtgatcacagagtggaggcctcagtgatcatggaatgcaagggtgtgatcaccgagtgcaggggtgtgatcagggagtggaggttcatgatcacggagtggaggtgcgtgatcacggagtggagtgtggtgatcatggagtggagtgtcgtgatcacggagtgcaggggcgtggtcacagagtggagtggcgtgatcacagggtgcaggggcgtggtcacggggtgcaggggcgtggtcacggtgtggaggcctcagcgtgatcacggagtgcagggacatggtcatggagcacaggtggcatgatcacggagtgcaggggcgtgatcatggggtgcagtggcgtgatcacggagtgcagtggtgtgatcagggggtggaggtgcgtgatcacggggtggagtgtcgtgatcacggagtgcaggggcatggtcacggagtggaggcctcagcatagtcagggagtgcagtggcatgatcatggagtgcaggggcgtggtcacggggtgcaggggcgtggtcacggggtgcaggggcgtggtcacggtgtggaggcctcagcgtgatcacagagtgcagggacatggtcatggagcgcaggtggcgtggtcacggagtgcaggggcgtgatcacagagtgcaggggcgtgatcacagagtggaggcctcagagtgatcacggaatgcaggggtgtgatcaccgagtgcaggggcatgatcatggagtgcagtggtgtgatcagggagtggagtgtcctgatcatggagtgcaggggcgtggtcacagagtgcaggggcgtggtcacggggtgcaggggcgtggtcacggggtgcaggggcgtggtcacggtgtggaggcctcagcgtgatcacsgagtgtaggggcatggtcatggagcacaggtggcgtgatcacagagtgcaggggcgtgatgatggggtgcagtggcgtgatcacagagtggaggcctcagagtgatcatggaatgcaggggtgtgatcaccgagtacaggggcgtgatcacggagtgcagtggtgtgatcacggagtgcagtggtgtgatcagggagtggagtgtcgtgatcacggagtggagtgtcgtgatcacggagtgcagtggcttgatcatggaggagtggcatgatcagggagtggagtggcatgattacagagtgcaggggcgtgaacatggagtgcgggtgggcatgatcatggctcattgcagccttgacctcctgtgctctggccatccccctgccacagccycccaaagtgctgggatgacaggtgtgagccactgcacctggtcacatgtgtatgtctttacacacatgcatgtacttgtcacgtagagtctgtcatttacatgaagaggagtgttgtgtgcagagtgttctggactcctgcaaaggctttatgttgtctctttgggatatgttcttatcagcacgccgctccacctagtttgtaacgtctgcacgagagtccgtgttatggccgtaacatggtcatgtcacctcgcctgttatggacacgggtagcccagggctttttgttcttacacttcagtcgtgaaagtcactgcacatcggtcttgatgaatttttgtgggcttgctgactgtggaacttcacagttgcaatcattactgtgttaaactgggtgcagctggactattgatcactgttgctaattgcttctagaagggctgggccacttatatgccccgtcccccgccccctgcatggtatatgggcaactggcactggctgtattcaagacaaagggcatctccttgctattttggcttggattgttaaatggggactgaggcagggcagtctcgggtctgacacactcttgtaccatgagtggccctcgtggcctctgccccgtctcctgttgggttggttttctcaataatctgtataagttccttgtaagaaaagtagccccttgtttgtcatatgtattgcaaatgctttttctcagtttgtagtattttgaatttttttttttttttttttttgagacagtctcgctctgtcgcccaggctggagtgcagtggcgcgatctcggctcactgcaagctccgcctcccgggttcatgccattctcccgcccagcctcctgagcagctgggastacaggcgcctgccaccacgcccggctaattttttctatttttagtagagatggggtttcaccgtgttagccaggatggtcttgatctcctgacttcgtgatccacccgcctcagcctctcaaagtgctgggattacaggcgtgagccaccgcgcccggccrgtattttgatttttaaaaactgtgtttattgttatctatgcagaagctttgcatttttgtagcgttctgtgtatcttcctggtcaagagccctttccctgtagcttctgcagtctttgtcttccttggagaggcctctcttgctgcaggattacagagaaattcactggtgaatttttgtttttagaactcacggaggcatggcatgtgcggggcatggcatgtgtgggtctttgctgggtttgtagtttcttctgtcactggacatgaggtggggatctagtgtctccaggtctctttcctgaccccacagagtgatggtggagctgctctgagagccaagtcagagggcagagtctgcagagaggggtgtgagcaatgggttcccagggggtcttcatggtaaggagtctattcctaagctgccccctcaagaccacccccacctctccctggagggaactggggaggaaytccgaagccttgctttgccactgctgccttctgccatcaacaggatgttcatgtgattttatcgtgatttgggagatgaagaaagaccctctcccaggtgagccagagtgcaggctggccctgcaccgagacagccaatgaaggagaggtcgggagggtgtgtcgggycccgggtgagaagccaggttcctgcagcctgaaggcagaggtttggaaaggagcatgtgtgcatgtgtgtgtgcacttgtctgtgcaagggactcagaagagacaccctgctccccacaatgctttgccccgaccagcttgggtcaaggtcgaataaagtcccctgcaggcctgggatgttgcctgcagctgtcccaaaggctgccgctgtcccaaaggcagttgcaaagcaaggctctggactccttgccgattccctgcagggccacgggcaggcaggtgattggccactgagctctcagtgagctccagctgccatccagcaaggcggtgggcacagaactgcagccgggggccaggctggctctctgggttcctgagaaggaaactggtcagtggataggaagggcagcatgccatgtttctggatgttcagggccctggtgtggtcccagcctcctcagcctggccacctccccgcacaggaatggtgggctggagcccagttttgtggccgtctctgtgctgcaacttgggaagtccaggtgctggtgtcctccctggctctctctccagcggctctcgtggagggccctgactcccttcggcccgtcttcggtggttttgatggtcctggccaagacacgcagcccagaatccacaaacttgtgcatccatgggaaggcagactgctggccctgctcggctcttctgactcttatttttggagacataaaagagaacagagtcttacactctgtctagaaataatgcctttccttacttcaattcagttggtcaaaaatargcacatccctttcccagggtgataatccaatcctttgagctggaaggaggaatggaggaggggaggctgggctggggagggacaggaacagaggccgttcagtgagcccagatggggcgcagccacggcctcgagccctggggagccatagcctgcatctgacctggactcttggggaccgtgggccacgctggggtaacggrggaaaccttgggagaagatacattgggtttttttttttttgaggcagggtcttgctctgtcaccaggctggactgcagtggcacaatcatagctcactraagctttgagctcctgggctcaagcaatcctcccgccccagtctcctgagtagctgggactataggtgtgtgccatcatgtccagctaattaaaaactttttttttttcagagatgggggtcttgctgtgttatccaggctggtctcacactcctggccacaagcagtcctcccgccttggcttcccaaagtgctgggatgacaggcgtgagccgccgtgcctcgccccttttgtgctctgagtgtatcgggtggatgcagatgctctgagtgcctgtggtgatgtccttcttggcattcacaggtgcacaggaccacatttagacaccgtgtagctggcacaggtgctgaccctgaccctgttccagtgcccagtgccaggaggtctgtgggatggctggtgtctgtaggatcacgygcctgatgccagccgatcccagacttggcgtggtggcatctcatcactctgctgaaagctcayttttctgcatcttcccttgaaaatggtttttctgctgcggtcatgctgttttctgtgtttcgctgtgggtccaccttctgatttgtgtggactcgawaattgctgaccgaaaagctggtccaaaagctgggccccagaattacctccaggctcatctcatgatgagggaagcctcgcatgtgggtctggcgtcaccgggtggcagcctggtggtgtggcggcttgggggtcttccatcctcgcgggccttcactgtgaccgttccgcatgccagggtggaaggcagccaccacttgcggggtggggggctgaggtttcctaggcagagggggttttcctgtacagtctcctgcccgacacaggcctgggtgtctgcttctcagagatgccaggaggtggggagaaaagaggggcaggaagaacatggagctgctgaggaggtttccgctgaaggctgtagtttctctaatggaaggggacgtttgaagggatttcccaggaaggcagaccctggagcctgagagaaggtggtgtgggaagcccatgggcccaggtcctcatccctgcggcatgatgmgtcagtgacggtgggtggctctgcactgcgctggcmcctggcsactggccccgtggcctggctgtgctrtgaccctgcattgcagtgacacgtcggcggagtggccagaaggaagagcgggcactgagactcggaggtgattctggagcaaaatcctaggatgtcctgggctctcttattgcttggattccaggaaagggacctgattctcatcctacgtccatggcacgacatctagatgtttccaaggccaggatggctgcctccaagggcaggtggggcagattcatcccagamccctggaccttccctcggcctcttgcacctgccagccttgctactgttgctgactcaccatcttccccgggggtcccagcacccacccccaccagcggccctgtggggctgtctgtgagtagccatggggcctggtggggcagcactgcccagagacatggtgggcacgggtayggggatgccggacctcccatggctgctgtcagggctgaggccagacgggctgatgggccagatggcagcaccagggacagtacctgctgcctgggccccctgggtgcttccaggaggaacttggttcctcggccctgggggacaccgtgaaccacacactgggcctgctgtgccatggtgctgggccctcagaagctggggctggcacagggttctcggtccctgtcccggctgtcaccttccatgttgtcccctctctggagctggggcaccctccagggagtggaagaacagggtggatttaaggctctcactgaaggagtcctgggagtgactcagccttgccacgtccctgggtgaggaggcgcctgctggctgcctgtgcggcggagcgacaggtgacttgggggtggaggtggccgactgccgaggaggctttggactcggggacatctcggggccctccgaggcctggttcccgtggattttgaggtttgcgctcagccgggtttattctgcagacaggcccacgcctgagggaccagtgcagcctgaggatccggcgtccgtggctcctggtgggctgagggcaggggaggctctgcggccaggccctgttagattcccaagcctcaggtgaatgtcagcgggcggtgcagcctccacagcctggtacgaggttttgtcactgcacatttcctgcaaaacaacygtgaacagttgtcaatcttcatatattgacctcccatcaaacacatacgaaaatttctctgtgaagaagtgtccaaaataaaaccgtgcacttaccatgagataggatttaaaacagccgcctttccctagcaatggtgtgttgcttctgttgacccacatttggtgtgggatgggcatttgattcagacgccacattaccctcgtgtgagtcctgaatccgggcgcagctgttggctgctccccaggccctaggacaggaggagccagcctctccgctgagtcccagtgtggccacacccagcgtggatggtgcttgctgtctggtcccgtcctgagcaatgaccccgcaggcatctgcagactgatgcattctccttgtaggttgcatttccagccccaacccctgcacctcagcttgcttcacctcgcaaatgtttaagtcgatgtgcacctcccacaacttgcggatcttatggaaaaagagagcagagcccagggtcacaccaggaatcagctgagaagtcagaagcgcagttggcagcccaggcccagtcagtatggggctggggtcagcacacgcatagtgggctcttatgatctttcacttagatccactctcattcattcactcactgtgcgttcattcactcattcactcatctctcatttgctcacctcattcactcaccatgcattcattcacttaccatgtgttcattcactcactgcattcattcactgtgcattcattcactcaccgtgtgttcattctcatctactcgttcatttactcattcatctcatttactcatttgctaactccactcatttgttaactccttcactcattcagtaactccactcattcagtaactccttcactcattcagtaaccatgtattcattcactcaccatgtgttcattcgctcattcatctcatttactcatttgctaactccccattcactaactcattatcattaaccgtgcattcgttcactcactcaccattcactcactgtgttttcattcactcatctactgattcattcactcattcattcactcaacagggctttgttgagaacagatctggaggaggtactgcagtgatatctccctgagccccacagacacctgcagttgccccaccctagagctgcagggacttagagcccgttcacaggacctttagggctgagcagcttcctttcttgactgggggctgccctcttggtggggtcgcttagtgagcacagaaagctctatcagatgccccgtcagcctattcaaagcagtggaaaggctgagtggattggaactgatttgtgtgaagctaagtaaatgtataggatgttaacaaacaaatactgttgaggggggcagcaaggaaaaaaatgatgtgggcaattgcagtcttcattggggtgaaatcttggtgaaaacgacacactaaatagggatatggtgagcccagggtgcaaagcgtgcggctctggggaagagggctccgggcagagggagctgttggtgcacaggccgcatggtgggctcactgggctgcttcagagagcgcagcagagtcaggcacagggagggtggaggagccgaggccagaggggtctggggctgggtcctggacggcttgctggcagccggaaggacatgggctattacttgagagaaatgggagtgtggagcctttgagcagagcggggcttgacatgtttgtttcaaaaggacgacgcctgcagctttgttgagaatagattctagggcgagggtggaggcggggagaccaggctgttgcaggaatccaggcgsgagtggacggtggccagaagcagaggaggggcaagatgcggtcggagtctgggaacgcttgaaggaagagcctgcaggatttcccgacagacgggctggggtgtgagacagagaggagtcgagcccatgccaaggcttcaggccgagcatccggatgagctgttggtaactggggctgtggcagtgtgagctagggagctgggttgagggcacgttagatttgggttgtgggtttcagacattgtattcatttgctcgggttgttcgtgggtggcgtaaacaacagccgcttgcactctcacagatccggaggctggaagtccgagaccacgcgccggcagggttggctgcctctgaggcctggctccttggctcgtgggcagcgtcctcacgtggccattcctctgtgggtgtctccgtcctgatcttttctgtgaggacacggtccagtgggattgggcccacccacgtgaccttgcttcaccttaaccaactctttgaagatctcatctccacacacagccacgctcggaggcacgaggggtcagggcctcagcttaggacttcgggggcacagcacagcccaygacacacctaccctgcyggggcttgcaggcacacctggtctgtcctttccccatttcagctgagctggagagaagctagacatgcattcagggtaggggccttgccccgccarcacacacacaaacatgaggaggtccgggcgtccgggcactgagcagtggtgttgtcactgaggcagccccagtgctgcctgggaaggggcagggccgtggctctgagcacagtgtgcccaggaggccgcaggagtctctggaaaactcagactccagatccccacccacacctggaaattttgtyctgtaggtgtggggtgtcggggagggcgcgagtctggggtcaggaacgggtgatcccaggtcactccgatgtgtgctttggccaccttagggaaacaccaccgtggtttttcagtggtgggggctggatccgtggttgcaggtcttaccagctctcccagccggacatgaccgtgtcatgctgacgccacggccaccttcttcccaccctgagtgctgtgtgtggggtcagatttggccacaatggacgggacaacatctttctgtgtgaggccaggtgtggggccagcctcaggtgcccagtgaggcagggcgtgggcacagcacgggcccacactgttgggacaaggagcygggggctctgggaacgtggcctctgttctgaccctccatgctattcttgcagctctctgcctgggtctcttgccaggtgtgctggttttttcctgagtgccaggggcctgggaaccgttgctgtagggctgcctgctttacagatggggtgtatgggccactgccacgtggaggccgaagctggctggaagtgcctgagcccagggacactcttctggatgccasagtccccagccatgggtcaggggtgccggctgctgaatggarggccccggttaggacactcctcaccccctgtatttctatctgataatggagccctagtcatttgcgtctttgagtcactttgggggtgccaccctccttgcaccccatctgactgtggttcagaacccccttggtctcacccctggctcctcccttaggacagatcaccccctctgattggtgggaggtgaggccccaccccattgccctacccttattggctgttgctctggaggggggctgcatccttctggtcctgcttctgccctgggccacaggtgggtcctcaccaggtgtgttgatggatgcttccaggatgggaagaagccctgggccactccgcagcctcaccgtggccaggatggagctctgagtccagggtgatgtgcagggctcgctgtggttctctttgggctgcctgtgggttctctgctggttacagacgcagagggagggaggggtgtctggttggtacccccaggccattctgcaaggcagcactagcaaatamggccatgggttcatatccggcaggccggggagcaggcgtgggactccaagggaagaggccatgctgggtcctggggttgccgtaactcacggccataccctgcggttcccacagtgcacattcactctcagttccagaggctggcagggccacctgccctccagaagtgccgtggagggtttgctctcgccaattccagcttccagaggtcactcccctgcagccatggctcatgacccctgcatctgcaaggccagcggcgtgggcccgtgcttcacttgtggtatcaccttccctggtagcagtgtctccctgcaaggayggctgtgagcagttagggcccacctggataattcaggagtcccaccctctcaagattgttcactcagtcacatctgccaaatcctttttgccacataaggtgaatcacaggtccggggactggggcctggacatccctggagccattgttcagccacccacaggctgtgtggggtggggtgggctctctcggcctcctcctcacgtgggtgctgcccttggtcccctgctgccctcagtcccctgccacaggttgaggggacgctgtcccaaggcctacagcagtaccaggcatcagcttgtaaactctgcagggttctcaagagaccatgaaagcagtcaggggagggctcaggtcgtcaggcgtggaggacagggggcctggctcaggcatccggggcccacgtggctgggaggccaccattgggtgggtgtcagctattatggccgtggcaggctagggactctcactgaacgcctcctcccaacaccaacctctcaggcttgggagaactgcccccactgtgccgctggagtcagcgctcccacaggcattcgggggaggccagggctgaaggggaccccagggcccacctccaccttttgcaaggcgaggcaagggtctggaatgctcccaggtggatgtggttgggcgacagcctggggtctgtctcataagctcaggtttggaaaataagaccatccactagctgttagccccgagcagccttcctgcccttggggaaaatcaayccatcagcagccagcccagaggcgctggctcttagcagagcagtgatggtgataaatggctgtgaggctgcagcttgctgccacacactttccccaggtcctcctgcagcagccagcagggctgggaggcagccctgagctcaggggaagatccggtgcggccagtggaatccaggctgcatctcagtcctgcagctcagcagcagattttccaggctccaggcaccatgtgtcggtcagatgaggccaggcacgtaatcagctcacttgaagagaccctgtgcagcaccctgtgcataccaccgtgtgcacacacatgcacggagacacacacagacacatgcacagagctgcacccacaggcacatgcatgcacacacagacacacacacgatgtgacacatgcacacacgatgcaacgtgaaccaacagacacgtgcatgtacacacgcaggcacacacacacacgatgtgacgcacgcaggcacagctgcacctgcatacacatgcatgcacacaccgacacacacacacgatgtgggacatgcgtgcacacaggcatagagctgaacctgcatacacaggcatgcacacacaccgmcacacacacacacgatgtgagacatgcatgcacacaggcatagagctgaacctgcatgcacatgcatgcacacacaccgacacacatacacacgatgtgggacatgcatgcacacaggcatagagctgcacctgcatacacatgcatgcacacacacygacacacacacacaygatgtgggacatggatgcacacagacaggcatagagctgaacctgcatacacaggcatgcacacacactgacacacacacacacgatgtgagacatgcatgcgcacagacaggcatagagctgaacctgcatacamatgcatgcacacacaccgacacacacacacacaatgtgggacatgcatgcacacaggcatagagctgaacctgcatacacatgcatgtacacacgcaggcacacacacacacacacacacaatgtgacgcatgcacacaggcacagctgcacctgcatacacaggcatgcacacacaccgacacacacacacgatgtgggacatgcatgcacacaggcatagagctgcacctgcatacacatgcatgcacacacactgacacacacacgatgtgggacatgcatgcacacagacaggcatagagctgaacccgcatacacatgcatgcacacacaccgacacacatacacaatgtgagacatgcatgcacacaggcatagagctgaacctgcatacacatgcatgcacacacaccgacacacacacacacacacgatgtrggacatgcatgcacacaggcatagagctgaacctgcatacacatgcatgcacacacaccgacacacacacacacaatgtgacgcatgcacgcaggcacagctgcacctgcatacacaggcatgcacacacaccgacacacacacacacgacgtgggacatgtgtgcacacagacaggcatagagccgaacatgcatacacatgcatgcacacacaccgacacacacacacacacacgatgtgggacatgcatgcacacagacaggcatagagctgaacctgcatacacatgcatgcacacgcactgacacacacacacacgatgtgggacatgcatgcacacaggcatagagctgaacctgcatgcacatgcatgcacacgcaccgacacacacacacacgatgtgggacatgcatgcacatagacatagagctgaacctgcatgcacatgcatgcacacacaccgacacacacacacatgatgtgggacatgcatgcacacagacaggcatagagctgaacatgcatacacatgcatgcacatgcactgacacacacacgatgtgggacttgcatgcacacaggcatagagctgaacatgcatgcacacacactgacacacacacgatgtgggacatgcatgcacacagacaggcatagagctgaacccacatacacatgcatgcacacgcactgacacacatgcacagaactgtagccccagaaacatacatgcacatgcatacagacacacatgcacattcacatgtgcagagctacacccacaggcacacgcacacataggtgtgatctgaggtgtattccaggcctccagaatacaagtgaatgctgggctgtgcagacttctcgcattttggccaggtttcaagggaccccaaaaggagacctgcaccccacactgggcttgctgcttctaaaggggctgctactgcagctggctcactgcctggactgagcccagggcccacgtgtcacaggtcagagaaaccatgcggggagcagggccggggaagcctgaggacaggctggaaggggctgctccggcttctgacccagctttgggtctccccactgcagcggggtgggcgggggctgcccgctcagtgacggccgagctcccaacactcacggtggttgttggggttggagctgcagttcctctgcggcctcgtccgcgcagccctccccacccccagtgtccattgtcactccatgcctcaaggctggctgagaagtcctgttgttctgacctcgagctgcccccaggtcctgcttgtgtgatgctctccttggagtccccccgccccaccggtggagccccctccagtgccctcctccccgagagcatttgtgatccactccttccaccccatggagctagcctcccttgcccagcgcctcccccacccacgcccgcgttccttcctcccctccagccctggctcgttcctcccccagggctcggggttgtcctggagacaaattgagggctccttggcgtgggcaggccatgtaacctcagtgagcctcagtttcctgctgccaaaggtaaacacccatttcctgaaattcagataagatgcctaaaacgcttccactacagaatgtccctgatctagatgatctatttatttgtattgaggtataattacagtcaagggcacagatgtgagtatgcagattgatgttttgacagatgggcacacctgtgtaaccaagaccccccatggagacagagaacgttgccctccttctggaaagttctctgggctcttttccaagcatccccttcctacccccagagacaaacctgtgcttctcactgtggatccgtccagcctgttcttgaactcacacaaacagaatcgcacgacgcgctcttgtaaacctggcttctttccctcaatgtaacacctttgagattcatccacgtggctatggatcgggagtttgttcctttaaaagaagtcccctagtggtattccatcgtatggatataacataatttctttattcattatcctcttgatggacgtttgggttatttccagtatttgactgttgtaaggcagcaaagcacattcttgggtagacgtctgtttcattccttttgtgtaaatagctaggaatggaattgccgggtggcacagcaagtgtatgtttaactaagatgctgcctgagtttcccaagcggccgtgcacggcaccccctaacccctagcatgtgggtcaaggtgcccggtgtccttgccaggcctcgctgctgtccctctccctggctgtccggggggatggagggggcccgcgttgggttttccttgtgtttccgtggcgactaaggacagcctctctcctgtgctcattggccttcgggagcttctcgtctgtgaagcatctgcctgggcctcttgcccatctttaatgygctgcttgccatttattactgccttgtgtgtgccctggctgcctgcggctgaatcctgacccagagccttcagcaggaaggaaagacattgtcccgagccgtgaaagcgagaggcctcccagggctgtgcggggctgatgggcctgccctccgtctctctgcaccgtgtcctctcctcacacccaggcagggccccagagtgyagtgrggaccccacaggctcctccaggctgtgtgttgcccttgcagctctggtggtcgcttctgccctagttccagaagcccaggactggctcttcctggacaccctcgctgtgatgggccaggcctgggctgagtgtggcagggaggagcaggggctgtcatcgaaggagaagagccagtgcccagcagagtgtccccmgggtggctgcagagcccacctcgccgcccttgcggcacccccagagccacctcgcygccctggcagctcccccagagcccacctcactgcccttgcggctcccccagagccacctcgccgccctggcrgctcccccagagcccacctcacygcccttgcggcatcccccagagcccacctcaccgcccttgcggccatgtctgctgctcgcaccttctactgttctcatgttgcagcaggtcaggaagatgtgtggctgtcctgaatcctctgacatcaggcggagtataaataaaatacrggtatgatggatgaggcttgaacttttgtgaatttaacatagtttaacgtctttcctaaagtgaaagtcagaatgaagcgccctatttattcacrtgattttttacgtcttccatcaaggaaaactgccatgagcgactgtcccgcccccacctcccaccgaggaaactcgtcttgaaaaagaagactgtgctgtctgctaggtcccacctcgctggctttggggtgacaggccctgtgggggtgtgccccatgcgagccccactaggtgctggtttggggagtcctcctccctccctgcatccatgccccccatcagctcaaacccctcaggatggcatctggcccctcagctccctggtgggagagggtcctggaggggtcctggcccgggtccctcctctccctgaggccgttctttcaccatcccctctgtccagcaggatgtgccagcagtgctggggtgcagcacaaagctctgtccctttcttcctcaaggtccccagctccctgtgcgtcccgcccacctaacgcctactcccagctcgaggggtccctgcggctcagttctgccctgaccaccttccccaccatgtgatgscatccacatggggccacctgatgaccaggtgtccctccagggggctgcagcctacagccaactgatygtgggccacttaaataattatcttgttaattgaagtgaaattcatagcacacaaaattaaccactttagagtgaagagttccgtggtgtttagtgcattgacaatgttgagaacatactcttcacaccacctctatctaactgcaggcgcctcaccagccctaagggagactccatgcctrctgattacatccgtcrccaccgcctgccccagctcctggcagccaccacactgccttctgtccctgggtcgtggcactgggtatttcacagggacggagtcacatgatgcatgaactcttgtctctggctgccttcacctggcgctatgtttctgtcagggtccttccagcttggaccatgtgtcactgcgccatgctttttctttttttataatcccaactttttttttttttttttttgagatggagtctcrttctgtcatccaggctggagtgcagtggcacaatctcagctcacggcagcctctgcctcccaggttcaagcagttcttatgcctcagcctcccgagtagctgggattacaggcgtccaccaccatgcccagctatcttttttttttttgtattttttgtagagatggggtttcaccatgttggctaggtgggtctcgaactcctgacctcaggagatccacctgcctctgcctcccaaaatgctgggattacataatctcaatttttattttagatttgagggtgcaggttcgttgcctgggtatattgcgtgatgctgaggtttggggttcaattgatcctgtcacccaagcactgagcatagtacccagtggctggtttttcaacccttgactcctcctcttctcccctgcctcrcagtcccggtgtccattgttcctgtctttatgtccacgtgtgcccagtggttagctcccacctacacatgaggacatgtggtattgagttttctgttcctgcattaagtcgcttaggattatggcctccagctgcatccatgttgccacagaggccatwwtcttgctcttttttacgattgtgtgatatgccatggtgtataggtactgcgttttctttatccagtccaccgtggatgggcacctgggttgattcacgtcattgctgttgtgattagcaccacaatgaacacacgaatgcgcgtgtctttttggtagaacgatttgttttcttttggataygtacccataatgggattgctggatcaaatggtagttctatattttttgagaaatcttcaaactgctttccacagtggctgaactaatttagattcccactaatagtgtataagcgtttgttctcttttctctgcagtcttgccagcatctgttgttttatgactttttaataacagtcgtcctgactggtgtgagatggtgtctcattgtggctttgacttgcatttctctgatgattagtgatgtggggcatgtttttcayatgcttgttggccatttggatctgctgttgaaaagtgtctgttcatgtattttacctgttttttttttttttttttttgagatggagtctcactcttgtcaccaggccggagtacagtggtgtgatctcctgacctcgtgatccacacacctcagcctcccaaagtgctgggattacaggcgtgagccactgtgcccagctgtatcttacccgttttttaataggtttatttgtttgttgcttgttcagttgtttaagttccttgtagattctggttattagaactttgtcagatgcgtagtttgtgaatattttctccctgtttgtaggttttctgtttcttctgttgatggtttctcttgccgtgcagaagctctttagcttaattaggttccacttgtcacatttcgtttttatggaaattgcttttgaggacttagtcataaattctttccaaggctggtgtcaagaagggtgttttctgcttttctcctagaacttttatagtttgaggtcttacatttcagtctttgtcttgagttaatttttgtatatggtgaaaagcagaagtccagcttcattcttcctcatgtggctcgccggctctcccagcaccatttattgaatggggagtcctttccccattgcttgattttgtcagctttgtcgaagatcagatggttgtaggtgtgcagccttaatttggggttttctattctgctccattggtctatgtgtctgtttttgtaccagtgccatgctgttttggttactttggccctgtagtagagtttgaagtccagtaatgtgatgcccccagctttgttcttttttcttaggatcgctttggctrtttgagctcatttttggttgcatgtgaattttagcatagtttttcctgtttctgtgaaaaatgactttgtagtttgataggaggagcattgaatcagtagattactttgggcagtatggccattttaacaatattgattctgccaatctgttagcatgggatgcatttccactggtttgtgtcatctctgacttcttttttattttatttttttgagacagactgtctctccgttgcccaggctggagtgcagtggtgcaatcttggctcactgcaacctctgcctgccgggctcaagcaattcttgtgcctcagcctcctgactagctgggattacaggtgtgcaccaccatgcctgactaattttctgtattttaatagagayagggttttaccgtgttgtccaggctggtctcaaactcctgacctcaggtgatccacctgccttggcctcccaaagtgctgggattataggtgtgagccaccgtgcccggcccctgatttctatccgcagtattttgtagttccccttgtagagctctttcatctccttggttaggtgtattcctgggtattgtattttattttttggctgttgtaaatgggattgtattcttgatttggttctcagcttgaatgttattggtgtataaaaatgctgtggattgttgtatgttggttctgtatcctraaactttactgaggtcgtttgtcagttccaggcgcctcattccttccccggggagattctccagccacctggcaactccacagcctccccatgggaagcagtgatcatctccaaggcctaagctcgtagtccccgagtcctccgcatgggaagcagtgatcgtctccaaggcctaagctcgtagtccccgagtcctccccatgggaagcagtgatcgtctccaaggcctaagctcgtagtccccgagtcctccccatgggaagcagtgatcgtctccaaggcctaagctcgtagtccctgaggcctgtgggaggtggggaygccagtcggacagcttcccccagccccaggggctggactgagcggaggtagagctctgtgggctaggggcctgctgggggcccgcatgagcatcctgacggggttctgggagggagggtctggcagcgctgacctcgcagcctgtcccctgtgctcctgctgggccttggcacgtccaggggcccccaggtgccactgtggtgttgggcgtgggctttaactgggccctgtctcgcccctctccctgcccctccaggtggtgatgggcacgtggtgaagcaatgcccacccggccactggtggcatccatgagcactgcatggggcacagactcgatcacggggccctgggtgcagaatagtggggtgtgcctcatgggtatctgctggcccctgcttgcaggtgggccgaggaagcagagcagtccccttgaatgacacagtccgaaggtgagggtctgggaagcagccccctgcaacacccaggacccgacaacggtgcccagcatcccaagaccggggcctgtgtgtccggtgggagggtatgggagggcgctggggcttggggtggagcccattccctggcacacaggagctggtggaggcagaggggccgcaggggtggatttcgcgctggctccggcttggcctcctgcctcttccgtgcagttggctctcagtggtgccgtgtccttgtctccaagccggacacctgcgaggaccccgggccggactctgggggtgggctttggtacattccccagtggctgagcagggccaggggccaggyggaggctgaggccattgctgtccctgacaacgtggctgggaggacgtgtcagtgtctcctcaacctgaacagttatttctggggacagctttgattccagggtccctgagccaggtgaccctctctcaacatcatcagggtttagcttggatttttttttttcctgaaccagactttacacagcgtgcatttgtggcatgtgtgcatggggcctccgtgatgcgtgcgctctgcccttggtctggagcccatgtagaacactcacccataacaggaaaccatggcaacaacccctgccctgcgaagcccgatgggcttattcaggccagttgaaaacacacagytccttcattcaggcaaccggccctgtgagggcacatcccagaaagtgtgtagcgagtgtcacagggaaactgcaggggccgctccggaatgccggccatggtttcctgagatggtggttattagtccgttttcgcattgctagaactacctgagactgggtaataatttataaagaaaagaggtttaatggactcacttctgcaggctgtacaggaagcctggctgggaggcctcaggaaacttacagtcatggtggaaggccaaggggaggccagcacgttctcatggctggagcaggtagaagagagtggaggggaagtgacacacactttcagacgyccagatctcatgagaactcactatcacgagaacagcaagggggaactccaccccatgatccagtcacctcccaccaggaccctcctccaacactgatctcgtgagaactcactatcacgagaacagcaagggggayctccgccccgttgacccagtcacctcccaccaggaccctcctccaacactggggatgacaattcagcatgagatttgggtggggacatagagccaaaccatatcagggagttacatcttacatgagatttgggtgggaacacagagccaaaccatgtcaggaagttacatcttaccctggatggaaggagggtcctgcagggcccattttcccacctgccccagggcttggaggctgggatggggaaggtgcacatgagggtgagaatggttggctatggccctgttcatgcccccagctgtgccccagtacccggtgcagcagcctcccaagccacagccctgtccatgcccccagctgtgcccccagtacccggtgcagcagcctcccaagctatagccctgttcatgtgttgtcgagtgaatgcttttagttggagatgatattttcctaccatttgccattagcatttctaggataaaattccttcctgatgaactggtcatcctcaacccccgtctgcccacgggcggagaccttcatgttgtggaagaggccatgccctggaggccctcgcagcccctcctcggcactgtggtgtttggggatcctcatccggccctgaggtgtgcgaccgtgtggcctgggcccgctcaggaggggcagtgggaatacgtgtgagtccagaagcagctcctttccagggcctgctggccctcacagcgtcagcgtggacagcagtcggtacccagggcgttaggtgcccagaggacyggctgtgagcccgccgccctgttcctgttcggtgggctgggaggaattccagaggaaggcctgcgcgctggcccagccacccgggagagcgcattggacctgtccttccaggagaaygcgctggcctaggcacccaggagagcgcactggacccgtcctgaggatgacacgggctccacctgtcctttgcaaagagccctggaagggccccgtggggggtgatggggggcggccagggccacgctttccattttaggaaaaggaggctgtgaggaactcttcgagtgctgttgayggtttggggaaaggtgctttccactctaccaagtgctaatgtgtgtgaaaatcagactggagctcatgccaccttggagcaaagctcccgctgtgcccggcagacacctgcccagccttggcagctgggccctcttgcctgtccactgcagatccaggagaggcagctgcccccctctctaggtcaggtcagggccgatgtcctggggctgggacacttgctgttgctcccggggaggtcctggggggccactcagccggcattcatcagcacatgtgtgtgatggggtgacaaggacagggacagtgagggcacttgggacatggagcccttcgtcctgaccgatttcccggggcaggtggagtccgtgcactgaggagagccttgctggtctttgcagcccatgtcagggcctgtggctttcaggggcctgctgggccgcggcctcctttgggcctcaggcaggctgcacagtggaggctcgagagccctgagtcccacctgcaggtgtagaggagcccccagcccagggcagctgatgggtcccctgggggtgtttggttctggggccccctcctagtgtctgcagaggggcctggtggagggtgggggttggggggaggattgtgggggtgtcaggcctgggattgccatcattggctcacagtgggcgcccctggggacagaggcagagagagggcagggcagggggccggcagcagggggtgggcaccagatggggtggacaggggtgatgtggctttctgtgccagaacaggcagcatcctgccacccactccttcgcagctccgccccgcccatctctttggctggggggtgtgatgctccctccctgctctgagtcactcctcctccagctctgcccctctccctgggagctctcaggcaccctgaatgaccacagcccgctggcctaggggcctgtggctgccaggagccacctcttctaggagcccctccgtctccctctgtgggagacagtggcacgggtgtgggagggctgtgcaggaccccaggggctgcaggtgggaggatggaaggacagacacgtggacagggctttttccagccttgacccacccacacacctacccatctcgtgctgrcctctgaacacactgacctctggggtctttcagggcatgtcctgtatccacaggcctcacccccctgaggacccagcctcatgggcagcccccagctggtcccacagcgagccctgagtgtggcccttggtgcagccacaccccaggacacagggccctgcccatccatctgctcctggccagggctccttcctgggctgttctgctttgatccccagccctgggatcccactgggctcgctccccctcatccagtgctgctgctgctgtggccagcgtcccccccactggctaggcacacctgcctcagggttcaggacycaggaggarccccaagccccaccccgagtcagggctgtctccattgcagctccggggtccccaagcatctgtgcctctgggcgggcagccccaggagcaggcttctcagctgctgcagggccaggcggccttggagtcctccaggtctgcccctgtgggtggtcctggggtgctgggccctgcgcagtgagaggcaggggtgggtggggccgggccttggacagtaggacccctctaggcagcctggggggaggtgctgctgcccacctctccagcggttkggggagctggaggagcccaggtccctgctgccgtgggcgactcctgcggtctcaggcactgcggtctcaggcctgagcctctgccacccggagatactgtattgatcaggcggttgccctaatcactcatttatggcagatccccgtgttgtctgaggatgtcgatattaaacaccggaacatgattmcagacaatttcagaccagacaggaccaggatccacagtgctggcctgggaagctgccactgagcctgttttatgggtggaagctttcactgcaattaaggtgggggagggagatggcaagaatgctgccgccaacagggtcctgctggaggtgtaggcaccaggaccccgggctctgggtgtgtacctgggcaggagaagccacrattgtttcggagcccaggggccccacaggactcagctgtgggctgctgccacatcctggctgtgtctgtttcacagaaaagacagggtgagggcatcgctgccaagatggagcckggggcacagggtatgttcccagagtaagaccccagttggctccccgaggctggaagggtggtggtgccagctgaggacagagccctgtcccggagctgcccagggatgccgggaagccgccaagccacccgggcgagtccaagctggacaccagggctccagggtgtgcagaggctgcaggctgctggtcatgggggtctgcccctgggtgaggggacggtggagaaggagaaggtggccagctgggccctcggagatkcgtgggcagcgcacgtaatgctgggccatggtgctggcacccaggcatgacctcgaggctccaggccccctctggactgaggagtccagggtcagaggccggcacccacaccctcatcccctctcctgatctctgaccttcctgccctggggtttcaacacatcctcagtggtgcaggaaaccgcgtggggctcagcaagggttgagggacctgcttccygcagggccccctgctcctctcctgggtgctgctgtggctggacgcttctgctctatgttctccgctgtaactcgggagcctcctcacccctgcccagcggctctcatgcctgtctctagcccccacctgtcttgtccccatctgcgtcaaccctgcccgtcagcgtggtgggtctttgttcccgcaggccatggcaagagggtgaggggtctgtgaggtgatgtctggtgactcctgtggttcctgttgacctagcgggccagggcacctgaggagtgggagtggggggcacccattgccaggaggagctatcgggccggttccaactcttccacctggcccggtatttcctaagtcaggasccccgtgtgggccagacatccccagaggctgcacaagctctgcggggcctgcgtctcggagtcctgggggatgattttcctcatcataagcacttcccaggtcataggagacgagacggcatttaatcaacttctgcgtgtgtttcaaccacgtgtgacatttgatctttgtgacagctctcacagtagtgcccacttctgctgtgcaatcctcccattggtgaacgggctggttctgcctgaggacacttggacgtgggggcctcttcyggatgagtgggtggggtgggctgtgaagggaagcgtcccaggcctgggacacgcctgcagctgtgggcagctcatccaccacgtggcagctctgaaactgtccagcacccacttcccgggcctccaaagacatcaagaggggacctggggtgtcaggagcagagctgattctccagctcttgagacagccttcgcgtggggtgcacgcattgtgccggggtgacatagtgctgaytcccggcrccctgcggcaggcttattttactctcctgggctcccaggtctgggggcagccttcgtggagggtgcacgcattgtgccggggtgacatagtgctgattcccggcgccctgcggcaggcttattttactctcctgggctcccaggtctgggggcagccttcgtggagggtgcacgcattgtgccggggtgacatagtgctgactcccggcaccctgcggcaggcttattttactctcctgggctcccaggtctgggggcagccttcgtggagggtgcacgcattgtgccggggtgacatagtgctgattcccggcgccctgcggcaggcttattttactctcctctcttcttttgctgtcctcattgggagtattttcttaccagttttgatacaagccctggcttatgaaaaggctatttttttttgttgtttttttctcccctgatggagtttcgccctttttgcccaggctggagtgcagaggcgcgatcttggctcactgcaacctctgcctcccgggttcatgccgttctcctgcctcagcctcctgagtagctgggattacaggcgcccgccactatgcctggctaattttttgtatttttagtagagacggggtttcaccatgttggcaaggatggtctcgatctcctgacctcgtgatccacctgcctcggcctccctaagtgctgggattacaggcatgagccaccgcgccctgcctgaaaagactaggttttaacctgaaactccactgaggctttgggctttcctaacatggtttgttattggaagtgctctttctatgcccatgtgggccagccactcagccgagtgctagacgcagaggcgggtccctgcagggcgggaggaaggttctagccaggcacacgggagggcagatcattttttattcttggggaaaagtgttgaaatgttacctaacgcttttgccttggacttggtggtagccatgccagaggtgacgtcttggccatctctcgcctcgagccggtgtttggccttagatgtgctgtggaggggcggctccctcagctccctcagctccgcaggctccctggactccctctagctctctcgactccctccagctccctcagctccctccagctccctcggctccctccagctccctcggctccctccagctccctccagctccctcgactccctccagctccctcgactccctccagctccctccggctccctcagctccctcagctccctcgactccctccagctccctcgactccctccagctccctccagttccctcgactccctccagctccctcgactccctccagctccctccagctccctcgactccctccagctacctcggctccccaggctcccttgactctctccagctccctcggctccctccagctccctctgctccctccagcttccttttgcccggttccagttcccaggcccggcaggaccttccaggcagacatgtggttgggccacctgtgctggcaacccagaaaccagaaacaattgcgttggagtgctgctttccggaaaagctccttgccttttctttggttattttgttgctcctggtaagcctggagatggtggcaaaactctctgagaacagggaaatgctgcgttagggaggacgaacgtccctgctgtctgggtgctgggcttagcgctgacaagtctcaagagaacctatctctgattgtggggcctggttcagggactgagaccccagctagcagcccttggggaggacctggagaggctgccggacaccgtgggaggtgtgggggctggtgttggtttctcaacccacctgtgtggatgcagaatccagagtgacctgggaggaggcggccccacgctcgggtcacttagcgggattcagatggcgactctcataggacctgctctcagttgccaacaccaaaaaaataaaagccttccttgaagaataaatattttaaagaccctggattcgaatgcatttgctgtactgggaagactgtgtctgtggccctttggccaagctgcacaatgagggcaggtgctggtgggcccggagctccgagccgctccgtccatcccacgcccgccgttgggtgcacacaagtacagaggtgcttccttcaggcagatgtgtcctggttcctgggaaggagccccctagctgtgagatgggattgtggggagctgcgtctgcttctccttttacctgcgtcttaatttgagaggtggacagcacgggtgaaggatgcgctgacagcatcactgcacggcgtaaatcacgccgaggagcgtgacagaccagtcttggtccccgtaatcacgacccatgcccacacttctttgccaaatgtccccttcagaaatgtctcccgacggccttgtaggatggcagccccctccccctttcctgctttagccccctccctggcacctggtgccacactgtgggcttgttgagtgtttcccccacactgaagagttcactccaggaggttgtctccctccttcctgggtctggaatgggcctggccagcggttcatgtggtgacctctgaccttggctggttagcaggccgccatgtccctagcgggttcttggccagagacttctgatcagacagtgccaaagtccagccctgaggggcccagcaggatgagatggggatgtgagggggaggcgtgggtcggaggccccaggaggcatagggcattgacctgcctgtggtgagtagtggagggtctgaggccccaggaggcgtagggcattgacctgcctgtggtgggtagtggagggtcggaggccccaggaggtgtagggtgttgacctgcctgtggtgggtagtggagggtcggaggccccaggaggcatagggtgttgacctgcctgtggtgggtagtggagggtttgcattcagggctcaacccccagaagccagagtcgatctgaggtgggcacccaccaccctcttggggtgctcacccaagtcctgaggggctgagtgtggggcgaggtggggtaaagagatggtgtgggggctcctatgcccccccttcccagggccacagggctcctcggccgttcacagtaggctctgtgtataaggaagggaccatgcccactcccctctgaggcccagatcaagtgacatgaccccaaccctttgcacacccactccttctgggagcctgtccggcttcctcggtgaccagggctgcccatggcaccaccacgcagacccgtccctctgctccctctcctcccattgcaggggcctggcctctgccccctccacgggcccccatgagagcggacttgggactaggcgaaactgggtagggcctgggagcagattcatggcctggggacccagtagctggggtcacccctgctgttgggtgaccacatggtggctcctagacccccaggccggtcctgtggcagataggaggcagatgtgtggggcctggggctcagggctccttgggggtgaccccagggatggtggggtcctgctgggacatccctggctcccctaatgctccataggccccacccaggcctctgctatgcagaccgccactgtaccctcccactggcagaggaggaaactgaggccccaaggaggtgggcgtggaggtggcctgcatggagcccaccatgaggcagggattggttttgggggctctgagtgcagcgttggcctcttgcccagcttggaaccttcctcctctctggggaccagacgttgacctttgcctagaacggtctccgacttccgtgctgccgatggaaagccaggcggagacstggaaggttcaggaacacttgcccgggtctcctctctgcaatgacctgtcccgggcacctcacacacacctgcactcggggcggggcccctctctgcagtgacctgtcccgggcacctcacacccacctgcctcggggcggagcccctctctgcagtgacctgtcccgtgcgcctcacacacacctgccctctcctctctgcagtgacctgtcccgtgcgcctcacacacacctgccctctcctctctgcagtgacctgtcccgtgcgcctcacacacacctgccctctcctctctgcagtgacctgtcccgtgcgcctcacacacacctgccctctcctctctgcagtgacctgtccygtgcgcctcacacacacctgccctctcctctctgcagtgacctgtcccgtgcgcctcacacacacctgccctctctctgcagtgacctgtcctgtgcgcctcacacacacctgccctcggggtggggctcctctctgcagtgacctgtcccgggcgcctcacacacacctgtcctcagggtgctgtcccctctgccagtgccaccctgggctctgcggcctcagccccttccctcccccggtgcggagccagcgtgcagggagctctgggaactctcatgagaggagtttgatggactccgtagacaccggctcctggtgactgtggtggttgcaggaccactcttgggacaccaggctgattacatattgctcccctcaaagcccacaggaagctgttttgacagattccggctggtggacttccttttccttatctcctccgctgagtgctggaatgagagctcacctctcctttgggagccaggaatggggctgagcctgggcttgcgtggggcagggccggtggtcatgggaggtcctggcccagcctggggcagtgcggagaccctcatgggttgctgatggcaggagctggggacaggagcctgaaacagccactgggtctccagttccactggtttggagcctttggggctggggtcgggagggcatgagggccgctgtgcacagtggcaaggccaggtgggcacctgggggcagcaggagctgggcatcagggtggagccacggtcatccagaggacagccacgatgccggtcagccccctgccagtgcccctgactcaccttgcggggtctgggccaacaggtccttgagcagggatccctgtggacatggccggcagggaccacttggctcggggcttctcaggggcgctggtgcggtgagccctgcccaggcccacaggtgtccactctgctgcttgcacggcatcctggagccacatccaggattcctgccctgcctgcaccttccctgagcagcatctgcatggctgtcttggacttggtgtcccttggtgtccctgtggctgccctccttgtcagtcttaggaagcagggacagttgtgttcaaatcacaggcactgcagagtgggggccgcatgcccctaaccccacagccccaccctcagccccactcccagcactcccgcaaccccacggccccgcccctgacacgccctgacccccatagccccgccccctgcacgccccgccccctgcacgccctgacgccacagccccgccccggcacgcatgcgccttgctgctgcctcccagctgggagcctctgccggagccgccgcctccgtcgcacagtcgggaggctttgcaggtgtgcagggcgcaggtgacccaattgccgtgactcccttatgcttctgacttgttatttaatagattttgtttcccatccttttcctctccgggagggactaaccttgggaacttgtgcttattctctaaagtggaggtgatggtggctggactcccttgctggttcacagctcgggggccagaggcttagggctctgtgctgtgcgggctgcttggggtcctgggggaggccgccagagcacgtgcccatggacaggaagatgctggcttcgtttcccagggcagtgcaggactggactccaggtacccatgtgccaagtgccagggtcaggggcctggcacagcaggtgccatgtggccgtcctaggcatgcacgtgggcrtggaccaccaccctcgtcctcagctctgttgggaatggccaaggctgtgccgaccacgggctcctgtgcccgctgtggctcttttgcctctaccggccgctgcaaggagcacaggggtctctgggcagcggcaacctgggcctgggtggagcctaggtggacagagggtccttggacccagagccgcccagcggagttcatctccccaagctgtaggcggccagctcagccctgggcctcgccctgacaccctgtcccctccccactgcagggcaggccccgcagactccgaggtctgtcctgttggggttgctgctggatggcattggtgtccccatctcccctgccacggcccagctgccctctcactctcctccctccactagttcagcccatctgtcccacgtgctggttcacagctgactttcctttaacatctggtgacgttgggtgacgccacatggcggcagctgctccctgcctgtgcggccgcggcccgggctgccttggagtggctttgctggtgctggagcagcctctgcctcgatgacataatctctgggcgtgcataggttttcttgaggaaggaggctaggatgcagggtggggcagctgccgcctggaacgggggctcgtggaggctgtgtcagcttgtgggtgtcggccacgggtcttgtctgtgcagcacggcccgtcctctgcggcctttctgcccagtgcccagctctgatgcctggcagcctcttctctcaccccttgaagccccaccccctccgtcaacttggtcccaacctcctgtgccagtcagtgcccctctggtcacttgcagtggggagtgcctttctaaggcgcttaaatcaaaccgctctccccacctctgcgagtcaagccccactaccgtcttgtgcagaggagaccaaggccacaggtcacagccccttcctcacccccaggtgctctgctgactgccctcccacttcacccaggaccwgcttgtgggtctgtccatacccttggggtccttttcctgcctgtgcccaggctggcccctcacctaggcaccccctcccttcccccagctgatgcctacttgtcctggagggcccagcacaggcgtcctctccccaggatgccaccctgcgccttcaggccagctctgccctgtgctcggagccctgaagcctccgtgggtccttgtcacggcacccgtagctcaggctgaaagaaytctgggtgtgtgactctgtccccagggcccatgaggatggacactttgcctgctgcgtctatgctgaaacctggggctatcctggggtgccctgggaagggagtgggcattttccagttcagaggaaaatgcraagaaacctttcgtctagaaactgttctgtctcctcctccacacactgagtgcctaaagcacttgccccaccagacggcacagggtaccgccagggagcagyggagatgagactctaggccgtgcctcccaggaggggtcagtacctaccctgctgtctccccgggtctgcctctggccttggctgtgtcttccctgcctttagaataaccatgtgtgtagggggttgttccagctgtcgaattccccagagaataagtgaacatgaggctggggtaaaagtgggtaaataggtgaaatgtcatgaaccagcgggtgtcctaaacctggcttcagggcacagtgctggcccttcatggatacagcacactgaggggtgcagacctggggacacggacttaggggtgcagaattggggacacaggcctggggacacaagtggaggcagctgctggcctgggagtcatctggaggggctcgtcctggaggccagggggtgacattgtgggacccccgtcttatgtgtacggagaatgtcctgggtttgaaaggcaagtgcagacggtctggaaagcccatcasaatccctttccttggtgtgaatagggcacacggacaggtctcacgagtgacaattaggggagccgtccttctcccggagggacttgcaggtgtgggaaatggtgccttctgcagcttcgcacaggcttgcggaacggctctcatgctgggcgcaggctctcccaggctacacaggtcatggtggacatagccacagccctgagccgcctctcgttgttcatcttggggccgtttgcagactcccccaggcttgcccagygagtgccagcagggctgacacccctgtcctctggagacgcggagcagggtggaggggaaccaggaacagctgctcatgtgtgcatggcttcccccaaaaccccaggcctgcctgtctgggggtcttcactggatggagcagctttcagtgggggtggctggtgcctgggaagacagcccagtcgagtctgggactcaggtgtgtgtggttcattcttgccccatccatgctgtggctgagcacatgcctaatcccatagcaatcctgggagtaggacgtgcaagacccaaggcccatgtcttcactgaccggggctcagccccctcctgcctygcacaggagcgagagtttggcccgccccacggcgaccctcttctaggatgaggggccctgggcagtgtcggggtgggggatgttgaggtgggggagctgctctggggtggggccttgctgccacctcaccaggtgtccctctgttttatcctgcagtgaacttcgaccacttccagatccttcgggccattgggaagggcagctttggcaaggtaaggcagggcctggggtggggactgggctgaggggrcaggggcagaaccgtggagtcggacatgctgtcccctgagcccacctactcccatcctccttgggagaagcagccttacctgggcagaggctccaggtcttttagggaggacgtgggcactcctgccacggaggcagctggctgtgccgccatcagactgggccccatggtgtcaccaactccgcagcgtccaggagccaccaggaggacaaaatcgcagctttggctgaactggagcctagaggccaggctgtgcctgcggctgctcctcaggacctacaggggacaggacggagggtgggtgctgagcgtgcatcctcagctggtccttgtcctcatccttatccctgtctccagccccgtccagagtgccctgctgctgtcctccagataggcctgtttgccggcctggacggagcccgttcctttactctccttttgttttctcttgaccagatctaacttcctgattgccgccttgtaatatctagagattgggggtaattataactcaaagaggcttaacgagcactcggaaaaggttggaattagccctccggcttctgcgcgcagctctgttgtggatgaatcacttctgaatggacagttcttttcagctgtcccgggaggcttagcagatgggtgctgcctccctcctgctcctggctgtacagctgcctggacactgtgtctatttaagccccataagccctttttaaagcgattgccatgctaccggagcataatacgtagggtatttgaatgcgattaattacctccatttcattgtatagcaaacgatggctccactgggttacttgaggcctgggatgatgaaaagtcagagcaaatgagcccctttgcgcagtgcattgagaaagctcccgtgcaccaagaagagagtgcttttgagtccctgcatgttgggaggcgcccgtggacctgcaccgttttgttgctggtgaggctggttgaccatcgaggtgaggtgctgaagctggcggagttcgtcagagacgctcagggctgttgggactgactcagaccctcctgtcctcccagctgagcctaagttctgtttcccaggcccacagcgggtgcacgaggggcaggcaggatggagttttgggggactgctcccctctggcagcggaggacggcagctgtgaccaggttcaggagaggtggcttagggggaccctgggagtcaccaggcatccagaaatcaggttcaaggagggaggttgggaagcctgggcccggccagcatgtctggagagggccaggccgagggcatctgaggggcagagacctgccctggggagcgaggctggcgggtgcaggtgctgtttcctggggcccccagcatctccccattgcccctgttgcccccgcctctgctggccctgcactcctgcctggggatggtcccctccttctcatgagcacaggtgggcagcctcagccctgcccaccatctgtagactgccagggttctactccttggaccagtccttaagaggctcggaaacgccagctggcccagaaatgggcggctgtggaatgcggggaacaggagcgagctgctgggtgccgtgttcagatgcggggtagtcgtgcacctggagggttccttccggctcacagttaggcctcctcatcaggcctgcaggggttctgtgcggcgcttgttgatgggtgcctggcactgaggggagggtgaggtgaggcctgtcactgacmtggaggggtccttccagctctttcactggccaaggcaatgaccccatggcaggaaggatgagggctgagaagggtggttctgcgtgtggttgggctgtagctgtgtctgctcacatgtggcctcagttcagaggggctgcagcagcaggggccccagccacccctgtttccctgcaggtggtggtgggcccaggctcagctgtgcccaagccctgccagtgtttgagccacctgtgaaaatggctccgggttgaggggtgggatcccctggcagagcaccggagcccacccgttcagggcggcgcagcatttagagtctgaccgggtagagtcgggtcctgccaaatggccctggtgcagctgctctaccaccagggccatggctccaccctcggggccgccgctctcggaaatggattatctagacctggcccttggcttttgtttttgttttcagtttttaaaaaattacagtgaattacacataacaaatttaccattttcactgttttgaagacagctttgaggcatgaagtacatggtgcccccggttctgtccggctgaaagtggtggcggtagttaattccaggactaaccacttagcagggaggaatctagacttggagaaaatctgtttctccctgccatggacattcgtccagcctgccctccgcccctgcctgcccccttacccggcatagacttccgtccagcccactctccacccccgcctcgcccccaggctgctcagtgtgattagaagcctgctgcctcctcagcgtccagccggggttccagaggctgcggtgtctgagaggctcgccacctccccagcgctgcctaattgtgcttgttcagaatccaggacatcgcattccagccttgggctgtggatatctcakgctgagggccatgatcccaggagccacagatgggggcagccccattcctgcatcctcctgtgagctggtgggtgggtggcttggatgcagctgccccagggatgaggggaggtcgctgccccagggtctctctgggaccaggcttggctggggggtgcagaccagtgcaggttgggctgggcatgaaccccaagcccatgccgagccccggcccctctggcctgtaaggtgggccccatctctggacacgcatctcttaaaagccattgacctttccggtctgtggttcccctgggtgggggtacagcgttttcctgttctttgggcccaggtttcccaaaccaaacgtgccatggaggagccgcccctctggctgccttctgaggctgagagccaggtctgtgaaacgtgctgacagtaggcacaggggcaggaggaaaagcatacgaatttattattagtgttacgtgtgcagggcatcgtgggggaaaaagaaaacacccaaaacagtggtgggccccaagggctgatgtgcaggctgggagaagggggcgcggggggccgcatggggggcacacagcttttggggagactacagggccctcggagaagcagcgggggctgtgatggtttgtgactgagcctgaggcgggggtggatcctggcccctctcccgggggagggtccctcttcctgggccgctggaactgcaggggggctgtgctggcagttcctcttggagtgtctgtctttaggcagatgaggggagtttggagagagcccccccaacctcaggtgctgttttccagtggtttctgctccaaacagtcaacaacgcagagtttactggtgccgtcggagccccttcaccacccgtgcccttccgtcctcctgctgcactccccccactcgtcccgtgtcctgggtgccttcagccgccctcctcccagcagctcccagctcatggcccctctcagaggacaccagcccctggcccccatacatgcttgaaggccgtctgcacccagcactgcctcattcacgatcagggcaagaaacgttctgttctggggagaatggagtccatctggaattcagcattttttcagtcagggtctcactgtgtcacccaggctaaagtgcagtggcgtgatctcggctcactgcgacatccacctcccaggttcaagtgattctcattcctcagcctcctgagtagctgggactacaggcgtgtgccaccatgctcagctaattttttttgtatttttagtagagacagggtttcgctatgttctccaggctggtctcaaactcgtgacctcaagagatctgcccacctcagcctcccaaagtcctgggattacagctgtgagccgctgctcgtggctggaattcagcacttttaagttggcgggcttgaggtctggagctgcttgtggacagcccgtcgagggtgcaggcctctctctgggcttcccgctctgtcccctgaatgaagggttcrctgaccagtgagtccgcagtgttctggagcctcttctacactctgccaaaaatgccggctcttccttcgtgtttatttttccacacggacttctgaatacgtcttgtcaaggtcgaaagtaaccccgctgggatttggataggagttacgttttcagattaattgagagcaaagttgagatcttacccatctaggggtctagtgtcttttacccaaataggcgtctgctttttcatcttgattcttcacattttgttccgttgatgatacgtcgttcctatggttattctatgtcatgttgttacgtggaactttttgctgccgtgactaacagactttattttctaacttttcccagtgttaaattgtcgaccttgtcgttgagccactgcctggccctgagccctgccttcccgcagctgtcaaaggggcagtcggcgtcctctttggaygcctctttggagccacggctgtgcttctggctggaggagttggstgggctgggcgtgtggctcttgcacccagcctgggcagcaggtgtgggtggagggtygggtttggctttgccaagctgtggctggtgctcctgggaataacagccaggccctcacttaactaggagtgtttggggtgtgagtgctaagtgctgggagatcgtgtgttcccgttgacttctgtaggggcagaggccggatttccactcggccagaatgctgcagggagcaccaggacgccagcttgacggtgtctgatgggcacagctatcaggaggcagaggcgtgtctctaggggtgtggtgcccctttgggggttcgagagccccttgcccagatggatttctcggtggcacggctggctgttgggcagtgggcacagttgggtgcagccccgccccttgaccctaagtgggtctctgccctctcctctctaacccccctggctggctgggctcctcgccctgccctgcgcacccctcaccccaggccatccccctgtccgagggagagagagagaagcacaggcgcacggcgtccgcrtttcccaggctgtggggaaataactaagaaaacaggtcaaaaggccttcaccacagcccccacccaccccgaggaaccgcctgtccttgcagtgaccccacatctcagatggacccaacagagaggcaagaagaggatgagcatgtttgtgggtgaagaaggtctgcctggccgggctccccagctccatgcccccgtgcagggcctgtgtacgtggcctctggattccaccttacctgggccccctgtgccgtctcagcgagaagacagtgcctgtggtcgctatggcaacccgccagcggctgctgtaggaccaccctgccatgtgtgactgtgacaccgtggctgagcctgtggcctctgagtccacgccgggaggagctggttctgagggttcctcatccatcggggggactcgctgcaggtggcgagcagcactggctgagaagagcttgcaggtgtccgggttctgggatgaaactcagttgccagcttggggtcatgggtttcaggccaccacccaggcggcttgagtcagcactgcctgtagcccaggctctgccctgggggggcttccctgggggtcttctttggggggggcctcgtgctctccaggccaccaggatggcagctccaccggaaggcagcctgggtgaactcagcctgacaggcagctccgtttcttcctcatgttcacagccagcggacgctgacgtcgattggaagctgggtgtgctgggggttgcttatctgtgacgtgtgttcccatggcgagtgatgcgtccctgtcctcactstccagaccctgctcctgagatgtccaggcctggatcctgggcttgggacctggggaacccgggyctrtgtgccgtgagtgacccctcacatgacagccccctagtgtccgggaagcctggctgaaagggagccatcagtggccgctaaaagttgacgatgtccagcagcgtctgctggcctgctgccgggctcccggggcaggggctgctgcagtcactgcgggcggctgggcctgggtttctcccagatgscccccactttccagcagcacaggctctggtttcctcaccagcccactgcctggccaccccgctcagggcagcaggagccctctgcggcggccaagtgcgtggcatggagcgacccccatctggcagggagtgtgcggtgcccctggggactttggagcaatggcgtttctggactccattagttgggactaagatggtttgatacaggctttgtttgggtttttgctgactttgctgtgattctgtgattgtgtgtgtgagatgggctcccccagcttggggaggaccgtttgctggtgccgggtccagagaatgtttactgggttgagctgacctgctctcctgtggggaccaaaggaatctgccggctggaccgagggccccaggacaggctgtggggaggctcagtgcacacagtgctcttgtcctgagccctcacaccatctataaaatacccaccagcatcctgagggttccagcctgtggctctcaggattgtggagtgcagtactggccrctgcagaccctgtctggctttggggtttaaatggttaagtgcagtgtgatcttcctcccttggacctctgatggggagtgcttggccctgcatgtccagcctggcccagggcgagggtttcaggagcactgaggacccgacagggctggacagtcaccccggcactgcagcctggtctccgcccaagtgtccacccagcgtgcccgctcctstgtgtgtgcatacctgtgtacatgaacgtgtgtgtgcctgcatgtctgtgtgttgcgtgtgtgtgcatgcctctgtgtgtgcatgtgtgtatgtggtatgtgtgtgtgtgtgcatgcrttgcacatgtatgaactgtgtatttccaacgctttaatgtcagggccttgctgaccctggagagactgcccctcctgggccagccacttcctagagatcagaaacacttgcctttggttgcctttcaaatgcaacccccagctcacccccagccgtctgctctatgctttcccaggcttgagcccacatcccctgcatgaatcacctcaggacctgaccccagacaaccagggcaggcctgtattcccacaggccagtctcaaacctgctcacctggctttccccgcctttccctgcytttcccgaggaagcctccrctaaggctctgcccgtgtttccccttcacgtcgtctgcctccgagaccctggtctttgctgtgtggccccacggtgtggcatgcccctcctcctgttggtaactataacgaacggtctcatcartggcaggcatctcctgatctcacccacctgtgtgataataaaacctacattttaaagcaaggggcatctcctgaatcatgtggatctcttggacctgcygtgtagcttcccgtgggggcctccgagagcagctgctgcaccacagtcctcagtagaagctgcctcggtcccaaggaggctgcccygtgccctggccagatggtgggaggaagytccccygccagcactgctggcagttccccaggcctcgtccacttgcctgccacactgaggggcccagcttagcagctgccttttctctgggagggtcagggctggagagtctcgggggctccaggctgtgctgggtctgaccacagtggctttggagggaggcagagatgctgaggattaaacagatcacctcccaccaggccagcgttgggagggggatggcagcactgattagagaacccggaggagccctgtgtacaaggcagctggaggttcctaaatggtcgggaaagggggatcctgctctccctgctgtggggaagctgattcttccagggctggttctcctccaggctctaggggcagaggggtgaagccrcaccgggccagccccgccggcacacacttgggggaagaggggtgaagctgcactygggggcagagggatggagctgcaccggggccagccccgccggcacactcaggttcctctgtgcctcgccctctgctttgggttcacctccgccaccactgcaggagcaaagaaaccctgcgtggggrcctcggcgcagagtctgcttaggaaggagtggttaccacgtgctcctaaatgggccaaaaggcggtgggaatttgccgggccygtctctctgggtcacccaggctgcacctttatgccttaaaatagctgtttccctcatgactgattcaggaggaggaggagaactttcatatccattttctcattttcttccctcgacaggcgtgtgcatggtccttgcctttgccttagagctgcaaggaagctgaggccagagaggtggccctactggcctctggtcagktcacctggcttgggaggagcaarcgccagtggagggcagaggggcccagcctgtgagcccagggagcacagtccagggagcacagtccagggagcayagtcagggagtgggagcccaggggcaggagtgggcatttaaaatgaaaccgcccacccagctggcagctccggtctcaacagtcgggaggctgtggccagagaccaagggatccatccacccgtgtgggtccctgagggccggcctcgtcgttaggggtggaactggggcagrcrgggtttccgtgatacaaccacagtgtggaagctgaagatcttctagtacttacagaccttggcgggcgcgtggcaggcctggtgcccacaagcacttggaggtcgggggcacaagcagggagtgcagggaccctggggccaacacgtttgtcgggtccacaggaggtctgcttggtgggtgaaccccaggcaccaggtcgagggtcacaccgtgatggacatgtaagctggcaggcacatgtctgaatggccgggaaaggaagcctctgttaggtgggagacacgcctctaagtttctatctctggctgccggctggagccactggggtgggtgggggatagtactggaaaccatgttgagggtgactgagccgttctggtgtggaaagttaaacttgtcatgctgcctcaggtcagtctcaaatatgtcataggcaccccctcctgggctgccttcctggctgtcctgcagcgagcccgcgagtgagaaggaagcttcctcgccactgcgctgggcccacacgtggcagacacagctgcccagtgtgtgtggggcccgtgcacggtggggctgccacctgccacccagcctcagcttcctcatctggaccgggagcccctggccaccccatcgggtcacccccttctgcgaacctcatgacaggttgtggcatccaggaccgcggggacattgttggccatttccggggcagtcgggcctccrcgtgggcccagagcccaggtcccagcattgaccacgtcccttcgctgaccaggccgtgcgcaggctctgccacctggggaaggggccargggtcctttctgtgctcctgactgaggcccatgtgtgggctttggggccacggaagcattgcctcaactcttctctttttctagtttttagaagatgcaactcacatggtatagaggaggaacactgtgaccccccacaagcacccgggtccggcctyatcagggaccgacgcgacaccaatcctgttacagccacaaccttcgccacctcccgctgtgccctcggtatccgacatgaattccagagagtgtgtcattttatccactgatagtttagtgtgttatctttaaagatgaggactctcttcgtagccaccgccacggtatttttccacacctgaaacaacggtctttacgatcccrtcacactgcgccaggcttgtgttctcccagtgtctgtgaatgtcttctgatggtttctctcaatcaggatctggatgagtctgtgcagtgaggtgggtccgtgaccgccggtcactctgtgggccctgtccttgctgtttacttgctgagggcccagatggctctgtgtcctgagcatcctgtctgcttctgctgcccacgtcacctggaggccccgacactgtcccttcctcctgccttctccttccttctagaaatatcccttgtaaaaaagattttagttcatatttccattgattgattgatttctttccttttttttttttttttttttraggctgagtcttgctctgttgccaggctggagtgcaatggtgcaatctcggctcactgcaacctccgcctcccaggttcaagagattcccctgcctcagcctcccgagaagctgggattacaggcacacgccaccacacccagctaattttttgtattttagtagagacggggttttaccatgttgtccaggatggtcttgaactcctgacctcgtgatctgcccgcctccgcctctcaaagtattgagattacaggtgtgagccacagcgcctggcctgatttcttttaacatatctgtttaatctgcttctgccatcaagggtggcacaccactcatacagctcacaccactcacaccactcacacggttcataccagtcacacagctcacaccactcacacagttcataccagtcacacagctcacaccactcasacagttcataccactcacagttcacactgctcacaccgctcacaccagtcacagcttcaccttgctttcttccccaaccgtgtgtctggtgccccctgtacaatgtgtatccctgccctaggtcccttcacagccacatcacttgccctggtgggcgtgccacacaagcttcccacctgccccggtgggcatactgcacaagtgtccaatggctgctgtaacaaattagcccatgtgcaaggctttgaacaacacagacttcctgtctttacctgacctccaacccccaaggcccccccagcagctcatgagagccacaggctcgaggcagccagagatgcaagaagaggtggtccctgactgacaggaacggatggcagccacacctgccccggcatcccaccactccccaagcaggagggggasagccctggcatgaaggggccggaagctcagaaggggccatacagagcacaggatgcagggtgtggagggtgaaaccctttgggctcagagctgtgtggaaacaggtgagagaaagctctctgagtgaaggagcacccagagtccccccaagaattcatagagacctcacctagcagcagggcaaggcagaaaaagcgaagtgggcaaacctgctggaggaacccccgctgtttcagaggggaccgtggcaaggcatgggaatgtggcagaagaggaagggacgtggaggtgcctcccagaactcggggatgcatcgggaagtgtcaggaggacacaagggagaaacagcggcagagctcccttggaagcggctgtcaagctcgggcagcatggagggtggccctcaagatggatcacggattatgcacatcctgcacacaggtcctcgatcccagggcgaggagagctgggagtagccaggcaaggtgttaagagccttggttatccccaagtgggagagtccacgaggccacaggttctcagccactcaggagcagcatctccaagctctgtttgaagatagccaagaatcccagacctcatyggaacgatcgcttgcatgcaagcaccagaaaacagtatgtccatagtagttccacagtggcgaggactcagacggcgccccagcccatctgctcttccaagcccagtaaggctccagccagcatgaagcagctgaggggaggcagctgttgccgaaggggccatcctgcagtcgcagcaactgtgtgccttagccccacggcaatgttctgactaaacaagggctttaggcgggagygcgtgtgggcctgggaggtagctccgtcccctgggaagccggtgggctgagtgcccctgcctggccaccaacacctgacagccatagggcatggggggttcccagcctcttgggacaaagacccccctctgccatctgcagtggatggaacaagagcctcagtgccaggtggtgccatcrcagcatggccactacagccgccacccaggccccttggtgagcttgccagggtccacctcttcttgagaggtttgtggcctcgtgaggcgtcttaacttcaccagccatggcctaggaagcagccactaggcatcgggggaaaactgaaaccccaaaacggattcccactcaccgcgttagaatcctgagctcatccagggagagggacctgggacaagtggcctatgggacacagcttctcagggacgtcaagagaacagcttcaggggggtctcaggaggggcaggaggagagtgagagatggaactgcctctggagtgcacgggagcccggttctgcctgggggacccctctgcctccagtgccctccccagaggccccatactgggctgcaccttcttcagccgctgcagacaccttctccagccccgtcctgggcactgaccctcccgtttttgtggtacccagcactgaaccctgggagggagcctgccttgccctgtcccgccctgctgtccccacgtccccaggctctacttctccttgggacaccagaagctcccccaggaaggattaggaggtggtttcattataccgtttagaggccttaggtacttgtggtcaggcatttgcttctggggaacaaaaattacttggaaagagaaagagcttgggtgaatcacttaaatctgccaaatgcataaacagcatttggttgaattggcagtcacatggctgcaggcaccagcctgttccgggtggcgctgtggcctccccgtcagtggcgtttcataggaaaagcccagggctccgggtggcgctgtggcctccccgtcagtggcgtttcataggaaaagcccagggctccgggtggcgttgtggcctccccatcagtggcgtttcataggaaaagcccagggctccggagcccggggttggcttgttcctctttgtggtgagacctcaaactccatttyctctttgggcttaagttggtgattggaggaagcggctgggaaagcagggaccagtttcctggaggaagcgtttgagtcggacctgcctgccctcagccccccaggcctggtcataaaaggccgccggtttccagtcttttttgtaaacactgctctgcgtgatctcgggtgctgaggtccctccagacagagactgcaccaaacccagggctttacgccaccgctcgttggagcctcctgcatcaggggcccgagggagcctgccggacccgccctcttctctgttgtcttcacctaagagcactttgatgtgattgacttaatcaaatccatttcaacggaaaaccccacaccaccccaaaccaccttcaacgtgcctgacagtccaggcctcagagggcgggtcctagtgataaggggcaggacaggctccccacctgctggcctgggtcagaaaatgktgaaggagattaggggaagtgggctgctgggttggcaggtgctccggtgagggcgcagcgtgagcgcaggtgaggctgctgcctgcaggcgtggccgcaggtgctcagagtctgcagggtgttatcagggatgcagagacacaggaggcgtggagaaagcgagtttcccgccacaaccaagttccgtagctcagtgtctgcaaacaacagaagtttctcttgtagtcctggagatgggaagcctgagacctggcagggtgggccctctgggcggctccgtrggaggacccgctgtgccttctcccggcgtctggtggctgctggccactcgtggtgtcctcagcttgycgccatgtcactccattcccaggctggcatcttcacatcrctgcctctgctccaccttcacactccctcgcccccatgcctgcgtcatcttctcttttctgtcttttatcagggtgtctatcattggctttagggcccatcccarttcaggacctccagatcctcaacttaattacatcttcagagacctttattccgaataaggccacattccraggctcctggtggctgtgtcttttggggacgcactcgggcctgctgtgagggatcgaggcgtttccaccagggtctccagggaggcaccatggccactcaccctgcactgccagtaccttgcatggggctggcatataggaagacttgcaagcttttcttgaactgcagttgagctgagaatgttccaggacacagagcccaaagactcgggagacctgagtgtaaccctgcctccccttgctcctcagggcagctcctcccacagggccaggccaggggcttggactgtggctgatggctccaccatccaggcagtttgtttcccaggtggggtaacaggctggaggcaagtggatctgctgctttgttctggtggacagcagagccgtgggtgtgcgaggccaggccctgtctcgaggtggctcttctgtccctgctccctggctgtgggtgatgggatgcgtgtgacggggagagcaggcttgggtcacagggccaaggggctggtcccagatggagcccaggccacatgcttgggaaagcgggtggtcctgggtgagcctgtctggcaggagggtgaggtcctgtctggagtagacacccggtctgtgtccgccgcacatgtgacagggcccagagggcacgggaagcccaggtgccctgtcccctggtgagtgggctgtgggggttgagcaccccaagggaaggcgtgttcttccagagattcccccgtaagagctgagctgcatcgtgagcaggaggggcagagggagcctggagagggttgggtcgcctgggcaggcagctttctggggtggtgcacaagcgacagaaagcctgaggcttgggaccggctgaagacggccttgggctgcgggtgctggcgccgctccaggcagaggtgggctctgcagcccccccccccccgccagcttcccccccagcagcaagagccctggccccagccagtggccccaagccaggctcctgaggggcagagggtgagggccggattttccaccatatttgtctcacagcctgtctggtcccagccccagggcaacaaacagcctttctggagcagtttccagacctgcagtggccgccttgagcctgyagtgaccgtctgcaggaggccgcgggtgctggggctggcgcaggaaagcaccgttgcttctgcgcctgtgcagagtgaggctggggcttccatcccgggcacgggactcctcggcctcctgcggccgtgtgcatgggaggaaggccgtgctgccgagccacgcgactctgccccgttggcagtgggaagcggcaggagggggtcctgccaggggcagccaggggctgctgcagcttacgctcactgtcattctgaaaccctcaactggctttcaaaataacaatttaaaaaatggtcataggaaatgcaggaagttcaggagaaatcccgccccgccccgccctcccaaggcggcctcgttcaagcttagtctccgtctgttctcgggctgcctgcagctgcccccgctcctcagcaggtgtggccgcgtgttcaggagcccccatcagcacacgcgcctctgggcagcccccaacacaaggctcttcctgtcccttcaggctcagctttcccctcccaccgggcagggaggtgctgaggccacgcctgttgtcagcttcctggagaggccatacttagagcccatggtgccaggccaagccactgtctcccgcaccacagtgctgcagccggatccacccaggccaccgcttggcaccatcagacatgctttcttagtttgggccagcccggtgctctgtgcacagtgtgactcccagtggccccttgcgggagggagggtcaccgctttgcttcacaaaaggactgagtctcagggaggggtctccagtaagggccccggagccaggatgtgactgagacaggtgcctccagggccacacactaaccagtacaggaacctctgggggcagaatcatggcctccaaaacacccacatccaaatcccagaacaaacatgttaccattcgtggcagagaggaatgaagattgcagattgaattaaggttgttaatcatctgacttaatttttttagagacagggtctcgccctgtcacccaggctgagttcagtggtacagtcgtggctcactgcagcctcaacctctcaggctcaagcaatcctcccttctcagtctcctgagtagctgggactacgggtgtgtgccaccacgctttccgggcatgcagccaggagcccagggccatctgtggcccaccttgagatccagaatcatccatttcctccaggccccctgctgggctccaactccttgaggaccagagagcagaggttgtggaaggccttggaaacgggtctggattacctgtcctgggaaggtctctcccaacctgagtgtcagacargggttagctctgctgctcacaattttgtgccttaattcctggcttccctttggggatcttcatcctcaattctgattgacatccttggccacaagggacccccctgctcattgatgcttctcacccgtcacctcactctcatcctcactgctaagcaattagccgtgtgtttgcggcatcagtgttgacaccgatgatccatgctcagagggtacaggcctgaagagctatgtggggactggcgccccggagggggtcccrctgtggtggcagcggtggcccccaagccccacgctcactctgtgtgtctccttgcaggacagggtgaggggccttggcctcacggtgttgagacgggagtcggtctctggagtgtggagtgatgtgcgtccagggtgaagctgcagccatggttgatgaggcttcctgagcgcagggctctgtgctcagtgggttttcgcattcattccccagtacccctccgggctgcttgctgctccaagccctggaaaaggatgttggggtttaggaaggcaaaactccatgcccaggtcgtggctggtgaggggcgctccccgcacaaccagccactgcttggctccaactcacgcctggatgctgttaggctggaccctgtctgtttgcagatagcgcctgttgacagatgtgtcctgctgcagacttgaaacgcaggactgagtctcagggaggggtcttcactaacagccatggagccaggatgtcactgagacaggtgccgccagggccacacactaaccagtacaggaacctctggggggcagaatcacggcctccaaaacacccacatcttaatccccagagcaaatatgttaccatatgtggcagagaggaatgcacctgccgcgtctaggaggcagaggggctgcggcgcgtccccaggtgtccccttgtgtcctgacgatgcgtccccaggcatccccatgcatttccaggtgtccccacgtgtccccaggcgtcctcaggcgtcctgccgaacagccctgtgccctccaggtgtgcattgtgcagaagcgggacacggagaagatgtacgccatgaagtacatgaacaagcagcagtgcatcgagcgcgacgaggtccgcaacgtcttccgggagctggagatcctgcaggagatcgagcacgtcttcctggtgaacctctggtgagcctgccatggcctcgctgcagaaagacttaccgtcctgaagccgggaaggcactggctatcctctcctgcccttggtgctccttggccctcgtgcctcggagatgcctctgccacccacaggccctctctagccctcctcatctatcccccttcctgtgccccaggcctggcagtggcccaggtggccatgacatgctggggttggttaatgcagtgtctcttctgagcctgccggaagaccagggcttccctacaatggagatgtgctcccatggagtctctggcactagtcagagagggagagagtttagggactgaaaaactcaccactgtcatcaccatcaccatcaccaccatcatcgccatcaccaccaccatcaccactgcaaccatcatcactctcatcaccrtcatcactataatcaacacaatcactattgtcaccaccattaccaccaccaccacgaccacaatcactgttatcaccatcaccaccaccctcagtcctcactaccgtcatcctcaccatcaccgtcaccaccaccaccatcactgccatcgtcaacaccatggatgctggttgttaaatgccagctctttgcccaacactgtcaagagtggtacctacacggcctcattttctgtaacaaccctccgaggcaaatgtctgtatccccattttaccgaagaggaggccgggcagcctgaagcacccggagctggcactgtagctctgctctgcatttgccactcccaggtgcctctggccccagctgggccacctccagcacagggtggtgtgtctttcctcaggatctgggctcagagctgctctgggctggggtgcaatcagtgccttgggcaggcccctcctcctgggaatgcctggtggctgatgctggggtggggctgtggtccttagggggagtgtgtcagctgtgggagcagccatgactggctccccagctgtgcgcacaacaggccttccatcggtgcccacaggtactccttccaggacgaggaggacatgttcatggtcgtggacctgctactgggcggggacctgcgctaccacctgcagcagaacgtgcagttctccgaggacacrgtgaggctgtacatctgcgagatggcactggctctggactacctgcgcggccagcacatcatccacaggtgtgtgcktggcagacggcgcaggtacctgctgaggtgggcggggctgaagcagccttaggtcaggctgccggcacggcggccgtactccctcagagcgggtctagctcctctgccccacccttgcctgagtgcctgcccccagctgtggcacctgtgccgaccaggtcagccccatagctgtgtgcctggtgtccatctggggggacctcgtcccagcagccccagcygagactgggcacagtgggctgttagccctggtggacagaccaccaggctgggtcacagcaggtggccttcacctggtccatttaactgaagrctcctgtttgcccatccaccacatcccagggaatccaaactaattttaacattagcttaaagcagatgaaattaggaagcagagcyggtgtgatggctctgaaaataaaatttaaaaaaagaaaataggaagcagattatgaaggaagtgaaattgggaagcagaaattaggctgaaattccgcagcaatggaacaaaatgaaaatatctgtgaggtatattttaaagtcgaatggactggtgtttgcatttctgctcttggggactcggatgtctgattatgacctaggcaccagtcactgagcactggctgtgtacctggaaaagttgggacaaagcaagagccgaggtggcttggtctcctagaggccgagtcttggagggggagggcagaccctgccagcaattgctctcgtcctctggggctccaggccccctcccagcatctggtgccaggtgtgtgctgctgcccagatgccacagggaacgaagtggctgacttcatcgcctctgcccccacgcaggggtgtgaggtcctagcatcatccaaggaccaagtcaagctcccaggcctctgcctcgagtgggttggtgggatgtcctggggactccagggattgtgacagagattccagggcagaaacagggcagattcccaactcaccttcccactttctgctctttctagagatgtcaagcctgacaacattctcctggatgagagaggtgtgtggrgttgggtgtgggcagcccaggtgggtggtggcagggatgggcctgtcaggggaggaggatcctgcacgcaaggatgcatctctggtcctgggacagccacacctgacccstctctgcacaggacatgcacacctgaccgacttcaacattgccaccatcatcaaggacggggagcgggcgacggcattagcaggcaccaagccgtacatgggtgagcccgagctggggttccagatgggagctggcttcctccaggtgggaaggacaagacctcggtggcttctctgtcccaccctggaggcagcctggtctcgggatgtggcctcaaggtgccggccctgtgcccacgggtccgggctgtgaccccgtggcagctgtttttccttctttctgtcggaaagctccggagatcttccactcttttgtcaayggcgggaccggctactccttcgaggtggactggtggtcggtgggggtgatggcctatgagctgctgcgaggatgggtatggaccccctgcagccccygggcttggctgccaggcccctgctctctgcccccaccagtgctggggagggggtggctgccccagtgyccaggtgcgcagggatgtctccactgtgtctgaggagtcacgcttttatcgaagtgtgtagttggtgatggaatgcctgagcaggaggaggaaggacagactcactgtggtttcccggggcygctgctggtgcctgcaggccagcctctgtgggggtggacaaggctgagaactggccagcaggggtgctgcctcggaactttccacaaaaagtttcttttggggccctgtgctcttaccctkgtggccacggcgaggccagtcctggagaccgggaggctgggggtcctcttgtggaccgtacccctcagccctgcacaggaccccacctctgaggaagccagctccctcctggccctctggggctgatctacctggacccaggccccctgggatcccagccagatgggcgcagcagccagggcgcaggacccaggcgtaagctttatctcacccaggctcctccgcggcaggtggaggccaggctgtgctcagagctgtgcctgcacttggggtggggggagggggtcctctcagggcgatggcacctgtgtctggcattgttctgggtgtcctgggggccaggaggacctgcccagcactgcctccctgtctccagaggccctatgacatccactccagcaacgccgtggagtccctggtgcagctgttcagcaccgtgagcgtccagtatgtccccacgtggtccaaggagatggtggccttgctgcggaaggtgagcccccatccctgagcctcctcaccctccgagcacccacctccctccctcacttacctgcggctcgggacaccccctccagtgcacagttagtgccgcttcctggcaggcacagatcccttcactgcaacctgtgggggcctccgcagatggcagccccaagccccaggaagcragctggtggcaggctctgtggccctctcatggcgagccctaccaggtcactggtgtcctggtgatcccctgagctgcgtctccaggcaccctcacagcaggcttgtgcgcccgccctgccggtcaccacagaggagccctgagccacgtccccttgtcccacgtattggaaggagggtgtcgggtgggtgggttcaagcccatgctatctccgggaccctttgccccagtgcctcctggggaaggtgggcagccactgcccactgcaaacacctctcaggggacatcagcctggcagggacacgggcaggggtgtggccatcagtagtgcctcccatttgtgatctggtgctaggctggggctgtgccttgactgggctgcacagctccctgttccgagcctcgcattaacaccatagggggttcggagtcagagccaggcccaggcaggacagggaggggagtgagtgtgccacacgggcccggctgcctcccggcccccgtgtctcaggcaggtggggcctcctgccctggaattgtagccaagcagcctaaakccttggggaggccttgcctgccggggcctctccccagccccgagagtctcttaactctgctgtagccccatgaagctcagtcacacctgcccaggtggctcacaaggtggcactgggctagagagggcctgcgtggggactggggatgacccacacgcccaagcccaggtctgggaaacctcgcacggggtctgggtctgcggcattttccctggaaaggcgggaggtgccagcgctgggatgttgcttcccaggccatgcatggctgccccgggctcatctggcctgtggaggtcccatgattcggtgaaggaagtggctctgggatagttactgtgaggccagccatgtgccgagtgttagccgctagccgggcctcggctgccacctcctggcaaatcccagcagagccttccctgcagatccctctgctgtcctctggcgycaggggtttaggtagcagcactgagaacaggcgtcccttgggccacatgctgagccagccacggtgctttgcctgatgtcggccgtcggcaccacccttcctcgcgtggccctgaggttcctgaattctgaacctsaggcttggtgggaccctcctcaaggtgccctggcctgggggtggcgggctattccgtgctggtgggctgtgggccctggaccctctgactcatgcctggttgcagctcctcactgtgaaccccgagcaccggctctccagcctccaggacgtgcaggcagccccggcgctggccggcgtgctgtgggaccacctgagcgagaagagggtggagccgggcttcgtgcccaacgtaagcctgtgggcggctcaggtggggggccctggggatggatgtggcgtcctccacgggccggggctcagcacccatccctctgtagaaaggccgtctgcactgcgaccccacctttgagctggaggagatgatcctggagtccaggcccctgcacaagaagaagaagcgyctggccaagaacaagtcccgggacaacagcagggacagctcccagtccgtgagtgccagggcaggctcagggcgyggcggcgggctgggctyggggctcctctctaccaccgagcaaggygtgtggggacccctgrcagygcacacgtctcggaagtccagcagaccgtttcctgaagtcctgagaaggccagagacctcccttctgcctttcccagcccccacctcgctccttatgaagcaggtgggcagggacaaccagggctggggttatgagtgcacggggatggccatgtgaagccttcgtgcytgcccaggtgtgctggtgttggttgtgtgtgcggggacrgctatgtgaagccctcacactcgcccaggtgcgtcrgcatcaggtatgtgtgccgggacagccatgtgaagccctcacactcacccaggtgcrtcggcatcagttgtgtgtgtggggacggccatgtgaagccctcacactcgcccaggtgtgctggctttggttgtgtgtgcagggatggccacatgaagccctcacactcgcccaggtgcgtcagcatcaggtgtgtgtgyggggacggccatgtgaagccctcacactcgcccaggtgcgttgatgttgtgtgtgcagggatggccatgtgaagccctcacactcacccaggtgcgttgatgtcagttgtgtgtgcagggacagccatgtgaagccctcagactagcccaggtgtgtcggtgtcagttgtgtgtgtggggatggccacgtgaagccctcacacttgcccaggtgcgttgatattagttgtgtgtgcagggatggccacgtgaagccctcacactcacccaggtgcgttgatgtcagttgtgagtgtgygcagggatggccacatgaagccctcagactcgcccaggtgtgctggctttggttgtgtgtgcagggacggccatgtgaagccctcacactcgcccaggtgcgtcagcatcagttgtgtgtgtggggacggccatgtgaagccctcacactcacccaggtgtgtcgacatcagttgtgtgtggggggacggccatctgaagccctcacactcacccaggtgtrtcggtgtcagttgtgtgtgcggggatggccacgtgaagccctcacacttgcccaggtgcgttgatattagttgtgtgtgcagggatggccacgtgaagccctcacactcacccaggtgcgttgatgtcagttgtgagtgtgtgcagggatggccacgtgaagccctcagactagcccaggtgtgctggctttggttgtgtgtgcagggacggccatgtgaagccctcacactcgcccaggtgcgtcagcatcagttgtgtgtgtggggacggccatgtgaagccctcacactcgcccaggtgcgtcagcatcagttgtgtgtgtggggatggccacgtgaagccctcagactagcccaggtgcgtcrgcatcaggtgtgtgtgccgggacagccacgtgaagccctcacactcgcccaggtgtgccggctttggttgtgtgtgcggggacggccacgtgaagccctcatgctcactcaggcatgctggtattctggggctgccaggacaggtgaccacgaatcaggtggttgaagaacagcaatgcgtctctctgagatggatctgagtcgtaatgaaatggtctccttcacagccggctgtgcgtgaactactctgtctcctgcagctcccctgtcttgataattggctgtctaggcagcgggtaaggtgaaccccttgggcagttatgtgatgatctcagtttctgtaaaycggaagtccaggcatggtgcagctctgttccctgcttcggggtctcaccagaatgtgagctaacattgaggtcgtggccttgtcaggtgcagctctgtttcctgcttctgggtctccccagagtgtgagctaatattgtctgaggtcgtggtctcatcagggatttgacaggtgctgtggttgaaatgtttcccttaaaactcgtgttggaatttgcttcctattgtgatggtggtagagatgggacttttgggggctgatggggccacgtaggttcttccagcatggatggggttaatgctgttgtagaagggtgactttagtcctcttttgagtctttgatcctctgctatgtgaggacgtggtgttcccaatgtggacgtggttcgtgttccatgtgaatgtgatattcacaatagagcatcaacaggctcccttttaatcagcagatttaaaaagaaatgtgttgtctcatggcttggaggcctgagtccaaagttaagatgtcagcaaagccgtgccccctctgaaggctctccggggaggaaaaccagtccttgcccctctaccctccggtagaggctgccttggcctagacgcatccccccagcccctgcttcgctgccgcgtggggtcggcctgtgtgtgcgtctccatctcctcccctcttctcataaggacaccaggcattggatttagggcccaccctgatccagtatggccccatcttatcttgatgatatctgcaaagacctcacttccaaatgaggtcacattcacaggtacccaggattagaatttgagtgtgtcatttttggggacacagtttggcccataccaccaggatgtggctgatattcaccaaggagtagctatggttgtgtgttgatgtcarggtgacggtgatgaccctgggtccctcggtggtccccttgcccctgagtctgcctgagcctgtggtggatgtcctgggaaactcttgtgcctcagcccccgtgcagcctcctcagacctggtgggccctgtgttgctcctgggcagaagacgggtgtcagtcccctcctcaccatgatgtggggggcaggggtggggtcatgccctgggtgccctgattttggggggaacacggccccccagtgggtcaggctcccatcctcgcccctcctccaggacggctgccggcagccctgggtgtcctcaggcagaattgctggtggagagctgctgtctgccaggtggccactgtgaggcactgctgagagccacaggatggttggaaggttctcggggttgggggttctttggcattgcccccattggatgtttaagttttccctaccagagcatgtccagagccagggctctggggtgtagaaacaggcccaggatgagttaggaaccctcatgggagactcagggatggacagtgtgcagagcccagctggccatgctgagttcccaggaggctctggctgggaacaggtaaggccaggcacctgtgagcgggaggagctcggctttgtcttgggttggttgtgtggagatgttttggcttgagggtaggaggtgttctgaaaggaaagcatcactccaaaaaaaaagtcccactgttaaccttgaggctgagagaggtttttggaaacagctttattttgatataattcacattccatgcaatatacagtgcatccatgtaaagcatataattccatggtttttaatatagtcacagggctgtgcattctccaccacaatctgattttagaaccttttcatgtaatgtaagagaaagaccccacctattagcagtcatgccccattcccctcttctcccctcccctggcagccacgaagctactttccgtctctgtagggttgcctgttgtgggcgtttcatggaagtggagttacacactatgtggtctttgcagctggcttctttcacttcgcaggatgcttttgaggcccgtccacgttgtagcctgtcagtgcttcattcctgttgatggctgagtaatattccacatatgtatcacctttcctttatccagtcatcagttgatgagtatttgttctttccacttgttaacatttttcattatcatgaataatgctgctgtgaacattcacatacaagtctttgtgtggatatgtacttttatttttggggggcacatacctaggcatgaacccgctgggtcatatgtgactctgtgcttcatgtttggaggaaacacctacccttttctacagcaggtgtgccattttatgcccctaccagcagtgtgtgagggttctaatttctccatatatttaccaagtcctgttattgtctggtttattttttwaaaaatcatagttatcttagtgtgcagtgattgtgtggttatggtttgcatttctctgatgatattgaacatcttttgaggtgttttatcaggcattgtgtctagagaaatgtctatccaaatgttttaaaatttttattgtcttttttttagtmtactctgacaatatattttaattggcatatttattttactttatttttttttagagacagggtcttgctttattaccaaaactggagtgcagtggtgcaatgaaggctcacttcagccttgacttcctgggctcaagtgatcctccctgccccagctgccagaatggctggaactgtgggtgtgcaccaccacacctggctcatttgaaaaaaattttgttgtagagacagggtctcactatgttgtccaggttggtctcaaactcttggagtcctcccacctcagcctcccaaaatgctgggattacagatgtgagccactgtgcctgacctaattggtgtattttagaccattcacatttaaagcgaccagggaggctgaggcaagaggactgcttgagtccaggagtttgagaccagcctgggcaacaaggtgagacccatctgtattagtctattttcacactgctaataaaggcatacctgagtctgggtaatttatacaggaaaaaggtttaatggatttacagttccacatggctggggaggcctcacagtcgtggaaggcaaggaggagaaagtcacatcttacatggatggcggcaggcaaagagagagcttgttcagggaaacttttgtttttaaaaccatcggatctcatgagactcattcactatcatgacaacagcacaggaaagacccgcccccataattcaatcacctcccaccaggttcctcccacaacatgtgggaattgtgggagtcacaattcaagctgagattgggatgrggacagagccaaaccatatcattctgccccagcccctccaaaatctcatgtcctcacatttcagaaccaatcatgccttcccaacagtcccccatagtcttattttggcattaactcaaaagtccacagtccaatgtctcatctgagacaaggtaagtcccttctgcctatgagtctgtaaaatcaaaagcaagtgacttcctagatacaataggggtacaggcaytgggtaaattcagccattccaaatgggagaaattggccaaaacaaaggggctacaggccccatgcaagtctgaaatccagcaggcctgtcaaatcttaaagcttcaaaatgaacatctttgactctatctctcacatccaggtcatgctgatgcaagagttgggttcccatggtcttaggcagctctgcccttgtggctctgcagagtacagccttcctcccggctgctttcgtgggctggcattgagtgtctgtggcttttccaggtgcatggtgcaagctgttggtggatataccattctggggtgtagaggatggtggccctcttctcagagctccactaggcagtgccccagtggggactttgtataggggcaccaaccccacatttcccttctgcattgccctagcagaggttctccatgagggccccacccctgcaacaaacttctgcctggacatycaggtgtttccatacatcctctgaaatgcaggcagaggctcccaaacctcaattcttgacttctgwgcacctgcgggctcaacaccacatggaagctgccacagcttggggcttgtaccctctgaagccacagcctgagctgtaccttggcccctttcagtcatggctggagcagctgggatgcagtgcagcaagtccctagactgcacacagcagagggaccctggacctcgcccatgaaaccattttttcctcctaggcctctgagtctgtgatggtaggggctgccgcaaaggtctgtggcatgccctggagacattttccccattgtcttggtgattaatattcagttccttgttgcttatgcaaatttctcctcagaaaatggggttttcttttttttctctctttttttttttttttgagacagtcttgctctgtcacccaggctggagtgcagtggtgcaatggcggctcattgccactgcaacctccgcttcctaagttcaagtgattctcctgtctcagcctcccaagtagctgggattacaggcacgcaccaccacacccagctaatttttgtatttttagtagagaagggtttcaccatgttggccaggctggtcttgaactcctgacctcaggtgatctgcctgccttaacctcccaaagtgctaggattacaggcgtgagccaccgtgcccagccaggagtttcttttctattgcattgtcaggttgcaaattttttgaacttttatgctgtttcctttttaaaatggaatgcctttaacagcacccaagtcacctcttgaatgctttgctgcttagaaatttcttctgccacataccctaaatcatctctcaaattcagagttccacaaatctctagggcaggggcaaaatgctgccagtctctttgcttaaagcataacaagagccacctttgctgtagttcccaacaagttcctcatctccatctgagaccarctcagcctggacttcattgtccatatcattatcagcattttggtcaaagccattcaacaagtctctaggaagttccaaactttcccacattttcctgtcttcttctgagccctccagatggttccagcctctgcctattacccagttctaaaaagttgcttccacattttcaggtatcatttcagcagcgccctactttactggtaccaatttactgtattagtctgttctcacgctgctaataaagacatatccgagactgggaaatttatacaggaaaaaggtttaatggacttacagttccacatggctggggaggcctcacaatcatggcggaaggcaaggaggagcaagtcacatcttacatggatggcagagagagcttgtgcagggaaacttttgtttttaaaaccatcagatctcatgagactcattcactatcatgacaacagcacaggaaagacccgcccccataattcaatcacctcccactgggttcctcccatgacacacgggaattgtgggagtcacaattcaagctgagattggggtggggagacagccaaaccttatcaccagctctataaaagacaaaaaaattaggcaggcataacagtgcatgcctgtagttccagtgatgtgagaggattgcttgagtccaggagtttgagaccaggctgggcaacatggcgagaccctgtctctacaaaaaaaaattatctgggtgtggtgggatacacctgtgataccagctacgcaggaggctgaggcagtaggattgcttgagcccaggagttcaaggctgcagtaagctatgatcatgcccctgcactccagtctgggtaacagagagacacgctgtcttgtaaataaataagtggtcatttatatagttcaatatgatatctaccttatttgtaactgtagtctatttattgttcttcctttttccctatttttctgccttttctggttttaattaagcattttatattattctagtttatctcctctcctggcctgttaattatacttctttttgaaatatttttagtggttggcctggacattgcagtatacctttaccatacagtctaccttcacctgacactctgccccctcatgtgcagtgggatgccttgtgacggcacctctcgtgcaatcctcctgttcctgatgacattgctgtcattcatttcatttatctgtatgctataattgctcattacattgttactactgttattttaaacagttatcttttggatcaattaagaaaaattaaaaatttcattttacctctattcattcctcctctaaagtgcttcctttctttatgcagacccaagttgctgacctaaatcattttcctttcccctgaggaacttcgtttaacatgtcttataggacaggtccaacagagatgaattccttccctttttgtttgtccaaaaaagtctttactttcacctttaaakaataatttcactggatatagaattctagattggtaggttttttactttcaacactttaaatatttcactccgctctcttcttgcttatgtgatttctaacaggcagtctgctctaattctttttctgtaagtagaattcctcgccaccccccacccccagctcatttcaagattttctctgtctttggttttctgcaatttgaataatgatatgcctaggtacagatttttttttaatattcattctgcttggtgttctctgagcttcttagatctgtggtttggtgtctgtcattaatttcagaaaattcccagtcattattatttcaaatattctgttctctttctcttctcctgctggaaatccaattatgygtgtgtggtgccgtttgaaattgtcccacagctcttggatattctgttcatttttttcactcttttttttttctctttgcatttcagttcgagaagtttctgttgacatttcttcaagctcatagatccttcctcatctggatccagtctactgaggaaccatcaaaggcatcctcatttctgttacagtgttttctacttccagcatttccttttgatccctccttggagtttccatctctctacttacattgcccttctgttccccatctgttcttgcctgcttttcccctggagcccttgccatattaatcacagttatttcaaatttcctgtttgataattccaacatgggtgccatatctggatctgttctaatgtgtgcattgtctcttcacactctatttttttccttaagaccttgtagtctgccttgtaatgtttgttgaaagctggacgtgatgtatctggtaataagagctgaagtagatgggcctttagtgtgaggtttatgtaatctggccaggtttggggcagggtttaaagtctgctgtagctgtgggyaccagaggcttcacatttgttttcatttcccgggttgcccttgggcttgcctaaatcctcctcctcagagagagtctgcgtcttgtggccctctctgctggaatccctgtcacactgcggaggccctgtgggtgtgttgggaagatggtggggagggaactgttccacagtctgtgaccaaatctcagtcttgggggcctgtgccccttcacagttgttgatctgcttttcccctccccttaggtgagacaggctaaagcggggtacaggctgaaaaacagtcctcccccaagtgagataagcctttcctttggagagcaaattccatttgctgtggagaatgctctgggtgtatttcacagtggtgactgtccccatcccatgccagagccaggaagggatcatccttggcttcattaagacctggcagggttcctggaggggaaacccacaaaacgttgggggcctcataagaccgcagccgcaggagttstgcacacggccccggccgctccccagagctgcccaggaggtgttcccrcacaccatcagttctgctccaggccagcaggtctcagctgtgactttgctcacctgtctctccagacttgggggtcgccgcagcgctttgacctcagctctctgatrggtccaggaaaagtmattgattttcattagttcagcatttttcctgtcgcagggatgggagtgaggccttccacgttgtttrccgcagagcagaagccagaagtccttgctcgtctctgtgtttcttcgtcggagtcatgtcttttatttcctgaacgcaggtgtgtggtcagacaggagattggcaggtatttcctcctgttccatgggctatcttttctctttcttgagggcatcatttgcagcagggaagtcttggaccttgacgttgtccgatgtggctgtttcctccttggctgctctgctttgtctaaggatccatcacctcagctgaggccacagggatttactcccacactttcttctaagtcttgtatagtttcagctcttgcgtttagctgtgtgattcattttgggttaatttttatgaacaatgtcaggtgagggtccagcttcattctctcatcggtggatatctgactgtcctagcaccatttgctgaagagaggattctttccccattgaattgcttttgacatcataccttgttttttgacttgccgttttatcccattggtccagacgtctgccctgcgccgggactgcaccatcttgataactgtagctttgtagcaagctttcaaatcaggatctgtgaatcccccagttttgttctttttggacattatttgactrttctgggtccctggcatttccactgaatgctgaggggtctgacagttgcatctgagctgccaagcaggtttgtggcggtgctagggactgaagcctgctccatttcccaggcccctcctcgctgtgggtgacatctggggtccgaggctgtgtctcagcatgtgtgaaggtgccacrggtgccctgagatggggattcctggtccagttactcagaaagtgcatccaggagagacccccgcccttctcgggatgggagatgccagcagagcttggctttcaagcagaaatctggaaaycctgtggggagtggcttyggacttcaggggacctggagcgtcacttgyggttcaagaggtccctgccctgagggagctgggctctcaaacacccacaccagtcagtcatgggcgaagggcccctctgtggccttctgactgtgtgtgtgctggcaaagggttccagccacccaaggaggaggcaggggctgtcagaggaagagcagggcagatccaggccaggcacagaccctgccatggggtactgctggcggcgctacacacaccttgggaagggagtccctgtggaaaggggtcgtggtcacacatctaggtgacacagcccggcttgggcgctgctcagagccaccccttccagatggttctggagcagctcctcaggcttctggtggcctctctgcctaggaaaacatggctgtggacgttgcaggatgaccaacagcccctgccactgggctgcacacagggccacgacgggcgctcatgttctrcatcactggcgcccaccccagcccctcccaccttgtgtcgctgtgaatcgcaggatcccagcggctcagtcggaccctcattcctgagtagtctgagccttaggtcaccgtcaccttctcaggccggcccgagtttgcagacttgtctgtctatatcagggttagaccagagagtgctgagacacagcagatcacccagcctgtcctcttcttgatgactaaggacaggtcccctgccaggatcgtgactcctttaggggaggccacagtgacagggcaaagcctggagggagagagccacatggagaggagagggctgcccgcagagagcgtgggagtctgccggcttcttctcgagtccttggcaaggtgctggccgctcacaccgtgtacgtgtggggaaygcccaggaccagggtgacaccaccaggaggagcgggcgggacagtccccactcagggctaggaagagagagtccacattcccgctgccagggtgaaaccctcacaccaccacagatccaggagagacacggagggcactgcctcggggtggggaacgtgagctgctccccaaacccaagaaatgtgttgagccctatgcttccttcctcgtgggaagaggcgcaaggtgagaccgcttgtcctttatcttggcgggcacgtccgagtgtgacgcacgtcagcaaatccctgaaccgttcatcggagaacagccttctgcatctcccacactctgttcgtgggtttacagggtgtccagagtacttgccacttggcaatcagcattaataggatccacagggccaggcatggtggctcacgcctgtaatctcagcactttgggaggccgaagcaggcggagcacctgaggtcaggagttcaagactggcgtggccaacatggtgaaaccccgtctctacaaaaattagctgggtatggtggtgggcacctgtaatcccagctacttgggaggctgaggcagcagaatcacttgaacctgggaggcggagttggcagtgagccaagatcacgccactgcactctagtctgggtgacagagcgagaccaaaaataggatccatggatagcaggcaagagtgtccaggtgttcgaggcacagacgacactgtgacagggaagagtccccttagccctggctggggcygtgaaagcatgctgttgtccgtctcgggtgaacgcagactgttgtcacgcattgcatracgatgcttccgtcactggccaatcgcatgggggggtggtcccgtaagatggtaacactgggttttgctgtacgttttgtatgtctagatagggttgagcgttctggtgtgtacccactcacacgtcccctccgaccttcagagcccagctccctccctcccagggccttggctgtgacgtgggtgacttcctatggatctgaggttctgtggtcctcacaagtgggcatcctctggcctcagctgcaggaggtgggggcccttttaatgccacccgaggcctgcgactccctgcacttttcactgtgacttggctcatctgggtctgtcatttgctcacgcgttggtagtgaccaacgtcaccatccaagttcacggtcaccataatgatgctttccccacaccatgccagcgctgagcggccagcaccccctccaccccacccacgccctcccccgacccctgcgtcctgggaagtggtcctgctgcctgaaggaagtagtcctgcctgcccatcacacaccagtaagggtgggtcctgccaggggcagcctccgtccacaagcttgccctgaggacctgcttctaagacagccctggttccaggattctctgggcagggccccagaagcaggcctgggacaggtgtgtgtgtgctgtgatgaggggctgggagaacccggtatgagacgggaaaggcccggcaagggagtggtttccagcaaagtcccgcagagaacagcttctgcctggtcctgcaggccccacggagcaagtccaagccatccacccagaggcaagggagctgggccttggcatcctcgggcttgggtgagtcacccgcagagatgcgagctcccgggcagtctggctgctggagggccggggcacttcaatagcccagaggccgtcatccaaagccacaggtggaggcccgatggggatgcccagacactcacttgaggggacatgggcggaacctggacagcgtcccccacgctcacgtgtgcctttccatccacaggagaatgactatcttcaagactgcctcgatgccatccagcaagacttcgtgatttttaacagagaaaagtgagtgtgttgggggtgggtgggcgtggtggcagagaggaggaaaatggggctaaggttaaggttttcttggccacgtgagcgggcacctgtgggcctggggtgcgtggccctgctctctttggggactctgagcagcagctatggaggggagcggcgggaggcccctgccaggctctggcatgtttgtgctccacgcggggcccgtggctggaatcttctggggagagacacatcatttgcccagatgaggggtggtgacttcctaggaggccccatcagagccacgtcaactcccccacccaggcacgccctcagtctctcagcagacctttcctgaatgtcaggccccaggggacagaaagggcacagatgactggcagcaggcaaggcaggccagaaatagcagcagctgccacggtggggcccaagggaggatggatgctccctctgcccgcacggggcaaggagggcctcctggaggaggtgggtctgagctcttatggacaggacgtgcagggcagcacgtgcagacggctgagggcactgactggcaccctggggatcagaygaccgggtgaagaatgaggcttagccgagcctcattcccaagtcactgacctatggcacctgcacagtcaggcctttcggcttctggctggaaacaygccgagcctcgccagcatgctcacgtgcccccacccgtccccaggctccctgccagtgtrtcgggagcatggcctctccagcagacaccgagcctgtggcccacgtttgggcatccacgccatggcctaycccatgagcccgtgggcaggtcatgggaccgtgaggccagggaggtgggggcataacgccctccatgtgttcctgccaccccaggctgaagaggagccaggacctcccgagggagcctctccccgcccctgagtccagggatgctgcggagcctgtggaggacgaggcggaacgctccgccctgcccatgtgcggccccatttgcccctcggccgggagcggctaggccgggacgcccgtggtcctcaccccttragctgctttggagactcrgctgccagagggagggccatgggccgaggcctggcattcacgttcccacccagcctggctggcggtgcccacagtgccccggacacatttcacacctcaggctcgtggtggtgcaggggacaagaggctgtgggtgcaggggacacctgtggagggcatttcccgtgggcccccgagacccgcctagatggaggaagcgctgctgggcgccctcttaccgctcacggggagctggggccatggatgggacaggagtctttgtccctgctcagccyggaggctgtgcacggccctcstcacaaggtgacccttgcagcrcaggccgcgggtgccccaggctcggctcagktcttggaggtcaagggcatgggttggggtagtgggtggggaggtgaatgttttctagagattcaaactgctccagcaatttctgtatagttttcacctctgagaattacaatgtgagaaccgctcgatgttgcatgttctgcgtacgtcctgtgtctgcctggccgtcaggccggtgcctgccgtttctggttggcctggacttggggcagccagtggggtgggcagctcctcagggcagagctcccggaccatggctttggggtgggtgcctgtctccgtggccctggagccgtaaggctgtggaaggcagagacggtcctggaggcagaggagcccaggacagcaccgtgcaccgtggagccgccgcagtgccgggcagtgcttggccctccataaagggacgtatccctctcactgtggctgggtggttctgtggttggaactgtaactaactgggtaaacggcctgtgtgcttctctctggtctcgctggaggaggacgggctcagcccgtcagcccagcgctccagacaggcctgtgctggtttcctctgaggaaatgggtgtggcgggtctgtgccccttcccaggacagcggccatagtggacatgtgcctagacctgtgtccatgagccccactgcacccctggcaaacagggccctcccgtccttggctgggctgcgagatggagatgacaacggccaaagaacatttggggaagaaccggccatgccacgagcagagtcagaagtccgaggggatagaatgcagcttcccgtcccccacccacccctgtcctctgaatcatggcagaaactagccttccagccctcagcagctcacatgggggacacggcacccaaatcaccaccaggaagggtggcccggtctctgcgagggcccagaggcgccgtgtactcggtggaagtctggcgatgtcagagacaggctcggggcaaggacaggtgtgggggtttgaataagtgcatttggggaacatggcagggtggtgcaccttgtccttcttcgagacactggtgaggtgtgggtgctgtctggttcccttgatcgccccccacactggggcagagtgggagatgctggtgtgggggacatcagctcccacatctgggccagagggagccccgggaaggaaatgctgagggcccagggccttcgcctgggatctgcacagctttataagcagcccagggtgagagatgggcctgtctgtggttcccagagaccacggcaggaaattctctgtcaccatcggtgcatgggcaggggccagagaaccggtggcacaaggtgtccctggctctctgctcaacaaacagcgagtgcccagtgactgcgaccaggccccgctcttgggatgaggacaaccgtctgggaacgtccacgcaccctttatgagacacagcacgcgccagcaccgcagtcacacaccgggggctcgggtcagcctcatagctgcccggccttgagtgctgggcctgcgtctgtgagcagcgcccacctgggtggcggtggtgtgtgcttcacttccacacactcccgtgcatgctccccggccttctggggtggctcgggctgtccggtgagaatgtaggcggggggggggggggggccctctgccccgccctggatgttggctgccctgccggccctcttccctgtgagagggtgcgctcctccctgccattgaggggagaagagctgcggctgcaggagttgaggggagaagagctgcggctgcaggagtcgtcggaccagcccacagccagccaggccccgcctgtgcagagacggcgtgggggagaggagacggggccttccttccatgcacaggcggcttcaaacccagacgtctttaatgggcctgattcacatcagaggcaggatgactgcctgtccaggcggtgggtggcatgcacaggttcctggctacagtgtcctcagtgtacaaagctgctactaagaagcctacggaaatacacaatctgtaataagaggacagtgtcttcctaaaggatcgcaaaacttccctggatgagggctacatggaagcttaggtgtgggccttggggtgcgtaaaagggaccctccacgggcggggctgtgctgcaccaagttctgatgggtccctgaagtctcagcagctgtgtgagcaggagggctctgcgcccactttcctcccaggcctgcgatgggcacaggcctctgaggagcggctgcgggagtgtagggctctgcgaggcagtgactggtggtggggaggcggcggcaaatgcccaccaggcgggactcggcccctcgccggttcaccaagaagcctggtgtccagctgctcccacactgtgagcccggcaggttccctgtccccaggctgggcccagcgggcactggggtgcctgggctcaggctgccggcattgtccctgccatgtggctccacctcaccctggcagtgacatctccccaggttcagcccttctcttgaggggctcttggcagcaggacctgggaccccacaaggagagcctgtggggagggggaaggcaagaccgccaagcaccttcgagaaacttctacaaaagaaaatgctaaggaggggggcgagtgccctggggcccccgcggcctcgggtggggccagcacggctcacagggccggtcctgggcgtctaggagagagaggtgatgttggagcggccgccaggtggtgccatgatcttctgtgctgtgcgtcgggcgatgtggtcatcagcctgagaccctgaagaaagggcacagatgggcaggggagaatgaggcaggggcaggggcccttctattcaaggcgtgaggcagagtcagtggctgcgtcagtggggccaggactgcagagcccccgcacacctgccaccaccagaaggccaagcagaccaggtgcccggcaggactcccatccctgaggcccggggtgcaggtgaggctgcccaggagatcatgaaacctgcggggactgtgggctgcaggaagcccttcctgtcccgagaggaacccgggccagtcctgcctcgtccctgctctgggttccgggtgatgaaaggctgcccctggcctcccagacagtgctgggttctcagggacctgcccccaggcctgagtccccaggaggtgagcagggctttgctatcaccttcctgggtccggagaatgcaccagaagcgacgccagaggccggaccctggcagcctgagccctcccaggcattctcgtgtatccctccaggccccgggacacagctcagaccctcccttgtgcctcacgcttggttctggggcctgctgggtggggacctggattccacatgatcctgagatcctcgtcaaggcctcccacctcccctgaggctggatccatgctcactcctgggttccatgtgacagcctcaccccagtgccactgtcttgaaggtgagggttcatcacagctgccctgggcagacagcgggcaggaggggcctccctaactgggctcagcccttggcccccacaacacccccagcagcatctcctgccccagtccccagctgggtgccttccgtgtgcagcccctctgggcacaggctgggccctggtacctgaggccctggatgctccggcagagcccctcacccccactggtgccccaggcccaactcaccagataggctgaaccccgactgatgtaggttgcgcacaggagggacggagatcttgcctgggcaggacgcgcgggccggagcgccactccctggcttggcaggcaccatcacctcgtggacgggcccgtcatacagcccacggggcacaccgtggatctccgccagctgccgggggggtgggggcagagacagggcatgaggggctgagcctgggcagctgtggggccagagatggggcatgaggggctgagcatgggcagctggagggctgggcctgctctgcgcctctccagtgccagcttcaggaatttggggctgccctgggggggtgctcaacccaagttcacacacgcctccctccttgcagtcctccccatacgtgtataatgcccgcctgcggtcccatctgcatgtgtgtgcaaacgtccctcccctcagtcttaccaacacaggtgcacatgctcaacctccctccgaggccccacgtgcacttgtgtgtgcacagacgccactgcgagtgcccctgtgcgtgtgtgaagcacctggtggtctggggagaccacacctgctgcaccgtcagacacggatgatgccgggcaagcgtggcgtcaccacagtaagagactggaaggccatgggggggggctcccgtggctgagctcctgagagcccatgtggagaggagcacacgccccagtccacaaatcagcgtgcacgtctgtccatggggaatcccagaaggacccacactgaggtccaactgggcagctcccgtggggagctagatttctgctcactttatatctgtattttctctaacaaccgtggatgacttgggtgggacccagctgccgttcacaggcacttgcagagctgatccagggcctgaaggtcccagtgccatgggggcctcccctgccatcttccgggagcaggctcttctccacttagacccaccagggccctgggcaagcagcggccccgctctgtcttcctgacccctcgggaggccgggccaggttgaccaggggtgtgttctgggcctagaactcagcgcccacctgcctacctgcacaacacccttgcgggtgccgccctaccctgttgcgagctttgatcctcttgtagacaaagtccgggaatgttttccgagggacgaagcggcccgcccccggggtgacaaacatcttcccgtcctccagcgccactcggccctgacttatgaccacggcaggcgctccccggcactccactccctcgaagatgttgtactccacgttctggggagagaggcccgagggtccagtgcctccatgctggggcccaacagtcccatccccgttgagccgctggagcactgtggccgcccagcgtggagcaggcccggtgtgcctacactgagcccctagcaagatgctggaactgaggggttggaactcgggaggaatgccccccctcggcctacggacctcgtttctgagtcccgtttctctcgaggacaaaggggacaggcgtgggcaggcagggagggtcacttctcccttggctaggcaggtgcacacggcaccgctctgccccagcctcctccatggcacaaggggaccacagatgcagcggccacgcagcgaggtgacgtggacagggcccatttcagtgtctggcctgggacaggctgtgtggacggccctgggatggctgaggccactgctgctgccacgtgggcctctgtcctgcgcctctcctgggaaggctgccctggggtcccggccccacaaaggccaaccctgacttacagccgccttctcttaccagattgtgggtcttggcagagatgatcttggtggccttggggttccatatgaccaggtcagcgtcagagcccacagccactcgccccttccttgggtaaaaattgaagattttggcagcatttgtactggtcaccgcgacgaactcattctcgtccatcttcccagaggcctggggaacaagaaggctgagctgagggcgacgggtggggttggggtgaggcttgcgcgaggacagacactgggccaccaggaccccacaaggatggatgccaggtcaccaggcccccgtgaggacagacgctggaccaccaggccccccacaaggttggacggcaggacacggggcccctgccaggtcagatgctggaccgctgggaccccacaaagacggataccaggcccccgtgaagacgggcactagagtgccacccaggcagccaagatcaggacagggctccagccacggccctcgccatggcaacactcagggtaagaacgcctgagtaacccctggggtaagaacgctgcactggtgagtcagggagcccatctcagtgatgcctgctggtctgccccttcctgggcgaagcctttctgcattcactttgtgggtaaagcttc

SEQ ID NO: 97240 - DNA, 14784 bp, Homo sapiens
  misc_feature (1)...(14784): n = A,T,C or G
atgtggcacgcttgtaatcccagctactcggaaggctgaggcaggagaatcgcttgaatctgggaggtggaagttgctgtgagccgagacggtgccgttgtactccagcctgggcgacactgcaagactccgtctcaaaaaaaaaaaaaaaaaacggttcttgggctgagtgcggtggctcatgcctgtaatcttagccctttgggaggctaaagcaggaggaccacttgaggcgactagcctggccgacagagtgagaccctgtgtgtataaaaaataaaaaaatttagccaggtatgtttggtggcacatgcctgtagtcccaggtacttgggagactgaggtgggaggattgcttgagcccaggagttcgaggctgaagtcagccatgatgatggcactgccttccagcctgggtgacagagtgagaccctctcttttaaagaataaataaggagttattaatctagggactacaggcccttacaggattcataaattggtttcaggtgatcataaacccactgaaatcagaggcaaattttgatgtgtatttgcacatatgaatttttctggaggaaggagtccagagtttccatcagattgtcaaagaggtttgggactcagaaactggttaagaactactgcagtcagatccaaagacagatttgcccactggaaaatatttcaaatgcccaataacactgactcagggaactgatacatttctgggaaataaaagcagtcaaatgctacctagaaagcagggtcaaaactgctctgtgtaaagccattgcaaagaggacacttgaggaggctcaccgagttccatctctgtttcagcagaattgtttgacattttgcatctgtttgttccagatagctttagaagattgtattttcgaggaatgtgatacatgatgaaaggaagggaagatgatatatcttaagttcaatatgatagcgtctgatgatttttaagtgggcaaatgctttttgttatttttaatcaactttttttttttttttaaagacatggggtctcattctgtgatctagactggaatgcagtggcacaatcatagctcactgcagccttgcgctactgggctcaagccatcctcccaccttggcctcctgagtagctgggactacagacatgcaccacctcacccagataatttttaaattttttgtagagatgggggtctcgttatgttgcccaggcttttatcaaaaaaaaaatttttttttttgagatagagtcttgctcttatcgcccaggctggagggcagcagtgcaatctcagctcactgcaacctccgcctcccgggttcaagagattctcctgcctcagcctcccgagtagctgggattacaggcgcctgccactacacccaggttatttttgtatttttagtagagatggggtttcaccatgttggccaggatggtctcaaactcctgacctcaggtgatccacccgccttggtctcccaaaatgctgggattacaggcgtgagccactgtgcccggacttttatcaacttttaatggagtaagttgtatggatagagtatacaagcagctccataagtacatttttattgaaaatggtgctggaaaatgccattcacgttcatgcctttgtgcagctgttccttctatctataatgcccttcctcaccactttgcccagcaaacttgaacgttggctttaagctctagattaagatcatctgtgactcgagatgtctccatttctcttcttatgtagaattgttctgtcatctatgttctagcctgctatacacatccccatcactgtatcattgtcagttgctcatgtctgtttcatccagttaactgaccctctggaatgctgaagctgtaatagatttattttgtattccttgttcctagccacatagcaggtggccaatgtttgccgaatgagtaaaacatgagcttccaggtaggaaggtcccctttgtgcagctgtggtgaaagatactattgggtatatctagcaatttcaaatggtcccagtttatgacggtttgacttacgattttttgatgttatggtaggaaagcgacacacattcagtagaaaccacacttcaaatttcgaattttgattcaaaattctttataataactttatcgtaaaataggctttgtgttagatgattttgcccccccgtatggtaatgaaagtgttctgtgcacatttaaggtaggctgggctaagctataatggctggtagcttaggtgtagtaaatgcattttccggtggtttttttttttttttttttttttttttttaagacacagtctcgctctattgcccaggctgaagtgcagtggcacaatctcgcctcactgcaacctctgcctcccgagtttaagtgatttttgtgcctcagcctcccgagtagctgggactacaggtgcacaccaccacacccagttaacttttgtatttttagttgacagggtttcaccatgttagccaggctggtctcgaactcctgctcgcaggtaatccccccacctcagcctcctaaagtgctgggattacaggcatgaaccaccatgcccggcctccgcaaatgcatttttgacatattttcaacatattatgggtttatcagaatgtaaccccattgtacatcaaggagcatctgtacttgttaatgaatgaacaaaatgcctttcagaaacctccagaagcaacctcctgactcaaagattaaggaaacagtcaagccaacgaagaaccagccgtcggggcggggagaaaaacaacaaaattaagcaatgaaaggtttccaggtcaggaacacctggggataagaacaggagcctgcacccaggtaagcagagagtgatgtctggttttgtttagagaggagactctttgaataggggggaaatactaacgggattggcagaagaatggggattacttgggagcattagagactggatggattaattcagacccaggcattcactctctgtgacaatcatctacaaatggaaacagctggattgtggctctactgctattgcttaaacattgcttatattcttgggtctttcttgaggataactgaaagagccgcaaggtgccatagaaatgacctaggaccatccttttatttgacagatgtgatgccttgaatcctgcccaggagagactctgctttcactagggtcatccgaggcaggcaggcaggcaggcaggcgggcaggcaggcaggtatgtctaggcgctctaggtagaaggctctgttccgaagactgtgaccttaggacaggcacaaggctgcaggggatggtagcaatggcccagagcctactttccttgggacacacacacacacacacacacacacagtattaaaagaatttgttcaagttgattgatgaagaatcaaataaaaataaaaaagaacttgtacatgaaaatgggtagtggggtctgggagcggtggcttaggcctgaaatcccagcactttgggaggctgaagcgggcagatcacctgagctcagaagtttgagaccagcctggccaaaacagcgaaaccccatctctaccaaaaatacaaaaattagctgggtgtggtggctaacgcctgtaatcccagctatacaggaggctgagacacgagaatcacttgaacctgggaggtggaggttgcagtgagccaagaccgtgccactgcactccagcctgggtgacagagtgagaccctgtctcaaaaaacaacaacaacaacaacaaggtagtgggtaaaaaacaagtttgataaacctagttttccctctttctaataataccagtttatttctataacatgctaacagagaggagtttgtttgctggagaaagcgcataatgagctttttctgtgtgtgtgtgtgtgtgtgtgtgtgtgtgtgttttgagacagtgtctagctctgtcacccaggctgtagtgcagtggcctgatcatagctcactgcagccatgaactctggggctcaagtgatcctcccacctcagcctcccagtacctgggactacaggcgcgcaccaccatgcccagctaatttttgtattttttgtagagatggagtctccctatgtttcccaggctggcctcaaagtcctgggctcaagtgatccgcccgcctcggcctcccaaagtgctgggattacaggctacagccaccgtacccagccatgagcttttggttctaacctgcaaccccgggagaaggggaaatttagcagaagacatgggaacacaaaccacaatgccactttcttgtttggtaaaattgtatgcagaatggataataacaaacatccgcctctcaactttatccctccctctcatctcgttttccttgtccgtatatggcacttctgcgattctggcaactttgttatgggtcagtggagcacacccgttgcacagaacacacctaagggctttgtctctttgagaagtccctcccttgaacttgcacgatcgaaagctcttaactgaaaaaaactggtattgcacgcctgtgtgcaaggagcttggtgtggacacagcccacggtttcatgcaaaccactcttcagtcactcaggagcccagagcctcgcagagacaggggtcaagacagagggcgaccgcgcgctgggtcccggggccagctctgctctcccttcccgggctcggggccagaccctcccacccaccgaccacaggaagggtgaagaccccaacccgcgggatccgggccccgcgcgcccgaggcaggcgtgcgggcgacgtagcagcgcaccccgccccgccccagcgtacgtggcgggggcgcgcacgcacgcaggcgcgggggcgcgcagggccgggccggcacggcggcgggcgcgcgcgcggctcggagaggcggcggcagcggcggaagcggcgagggcggcgggcgtccggctctgaggtggtggaggcggcggaggcggcggcggaggcggcggcggctcgggactgggctcggctggaagcagcgagggtcagagcgccgcagcaagcgccgatctcccggctcgaccatccgcctgccgcccggacgcctgggccgcggagtttgtgtcccggctcggaccccggcgcccagcccggagccgtaaccttgaggcggcggcggcggggccgggccgggccgggctggggggcggtggcgctggatccgcggctgcccgatcgttggcgggagatgtcgaaccccgggacacgcaggaacggctccagcatcaagatccgtctgacaggtacggccggcgggaggcccacccgcgccccggcgccccctcgcccgccccggaattccccgcagggcgcccttggaagcggccctcccccacgccggccgttgtcccaggacctcgtcaccccaatcggcgtgcgcccctcgcttctccctcctggccccgccccctcgccgttgcccggccccgccccctggccgctcgcgccccctcggtctcgcgttccctccagtcgccccgcaatccatcacacaggttccgtcgagcccgacgggctgtacccaacaaagtggccgattaaaaacnnnnnnnnnnnnnnnnnnnnatttccattcatgaccacgccccttgcatctccttccctggccccgcccctcgcttctcttttcctggccccgccccttgcatctccttccaggccctttcccctcacctctccccggctcggccccttgcctctcgcttcccttcctctccctagcacctgacccctcgcttctccccccaggccccgcccccttgcctttcacctccatccctgtggtcctttctcttccccacctttcctccccaaacctgaccccgcccatctctctggccccaccccctcgctcctctctgctcccgcctcctaactttctgtccccgccccctcgcttctccctgcgtccagctccctcgcttctctctggtcccgcctcctcacttctttcctagcctgggccctcacttcttcctggtcccgcctcctcacttctttcctagcatcggccctcacttcttcctggtcccgcccccttgcttctctcctttttttctcctccgcctgcttttaccccctccctccttctcctcgcttcccatcctctccgcccacctgccccctcgcttttccctcctggccttgctcctgttcccctggtcccatccctcacttctcaccactttcccatcatctctcttgctttcctgttttccctcccacctgctccctcccctcatcctcctggtctttcccaccacttccaagctattttgctacctccccttccacttgcccccttgcttctcccctcctgcccccacccaccctcttctcactcccccatcctctttcgtttctccctcacccccccacaccgtcctcctcccttcttcccctagccccgcccctcactttcaagccccgccctcattcctgcctagccccgccccctcgctgctgtctggcgaggcctccaccctttctttccttcagcctgaaattcctcaatcctatcttgtagctgctcccagtcctgctctcttcacttccccctggtccagccctcttcagtctcagtctgggccacttcctgtctcttaggccagaccgctagctacttttaactctgcttcttcaatttttaccttttctgcattttgtttcaccatcacccccacactcagcaacccagagcgccgtgaggctctgatccctactcccacactcactggaggctttggaagctgcccacacgcaggctccttgattcattttgtcttcaatgaaaagtccgtgtttcctgggtggctctgtagtgccaccttcaagggtgagcgcaacgctctgccgcgggcctgcgacttggtggcgcggatgtgatgccaacctgtttccccccgggctccagaggttctggaccaggctgcatcctcgtcttccctttctcactctcattggtactactctctttccagtttcaattcatccctaaagcaggatggccgtgttgcaaatgcggctctgctccgggactttccaaactcgaatatttccagctctggaaggaaactaaaaagttcattctaatccccgtcagggattttcccctggatttttctgttcagtggctcagtcgggtgagaactccaaagtcctggtttggtcaggtcctttcaaagagagaatgagcgttttgaacactttatggcagatgcgcagccataaagtcatcggtaaaatccatgcaaacaataggtaatttttttaaactaaaatttactttgagagcccatagttgttgcatggcccaacttttgtcttaagagaaggttttgtttttttgtataaagatatcaaataatgatttggacccaaacccagaccctggttttgtaacgtargaggtagtttcctctgggatctttgcttctggggaaatacatttctttatgccagggctgataggaaacgcttctcactttgtagatacaatgtagatacatttttatttatgtggtaagataaaagtaacatttttgagattgtaatacttgtaaagcttttaacttggttctgatttacagctcagtctgtaattgacatcagattggtttcagttatcttgttaaaagcgaaagcaactgattttgtgttagaaatatgatgaatgttttagaaggaataggttttaattgaaatgtttatgtctggtgtatgtatattaatcaatcctatttgccaagcctgagccttgaaagggaggacttggtttctcctcctaccaaattatttttggatttaggaatttagattatcgaagcaagaatgctttgaggaatttttggatgacatttgatagggaaggatcaggtgatgagtgttgtttctgaaacaccttttccctttccctttccctttcagtagatgttatgaatggtttgagaggatttgtgagtgtgatcatccttacaataggattgcggtttagcggtaatggtacacatgcaatgccagtacgtggaaccttagtttacctcgaaaggtttgaactagaagtttgttgacggtggaataggttttagtctcatctttctggttaagggaagtttgaattctcacttctgggatgttgagaagcaatctttcaaaatttgaatacttttgttacaggtttcagagtttatttccatgtttgttatttggaaaaaaaaaaaagactgttaaaaatgagggatatttcaaccagtcaatgaatagacacagagcgaaattcagtgcaaagatagtgaagatggcctggcgccgtggctcacgyctgaatcccagcactttgggaggctgaggcagatcacgaggtcaggaggttgagaccatcctggctaacacggtgaaaccccgtctctactagaaatacaaaaaattagctgggcgcggtggctcacacctgtaatctcagcactttgggaggctgaggtggggcggatcacgaggtcaggagattgagaccatcctgactaacacagtgaaacctcgtctctagtagaaatacaaaaaattagctgggtgtggtggcgggcgcctgtagtcccagctactgggtaggctgaggcaggagaatggcttgaacctgggaggtggagcttgcagtgaaccgagattgtgccactgcacttcagcctgggcaacagagtgagactctgtctcaaaaaaaaaaaaaaaaaaaaaaaggatactgaagatactacatttagaactttggggtccacgattctatttgggggtgaatagggcattagatttacagttaggagacctagattctagacagatttctcattaactacatgttacggaacaagttatttaacctttttgggtctcagtttctttatatatcaaatgagatttcagctccattataatactctttgatcctccttctcacaggatatatcaatttagctacctacttatttcaaattactgttgggcacttgggcttagtggtattcttaatcctgatattcagaaaattgtgttggagtgtagcacatgtgtttgatttatgccaagcattaattttgtgtattgattacatttatgactttatttcttcatgtgggattgtttttgaaaactgttgggtaatatgttgaactgctttggcaacctggtctaaacagtagaagaatatttgagcctttgtatttaaaataataacattttaacgaatgtttttgtggtattttagtaggaaaatagtttttaaatggtttcagtaggtttaggggcataatatatccagaatcaagtgatcttttgttaaagagcattatcttgtagtcattggagttcactggcaaatcaaacactttagaaacattttgattgaaaaatcaagcaggatttgcaaaaactttgttcttatctggtacacaaatgaatcccagacacattgtttaggccactttgggtaaaagaatggaattcagggttctacaatgctcttcaagaaaattaaattttattgtaatgtcaaccaattagttgaaatacaagtgcctaaacttttttgtgcttttatgcattgaaatactctcagatatcctggtgtttttatatcttttggagcatgactgcatattgtgaagtaagaaaaactctaattccaaacagagaggaacaaagagactttccttgatagcatgtggaaatatgaggttgtttttaaaattgtagctcgtgggatgtaagggtgacttgtgttttggcattcagatggtgcaactgtgagtgaaatagttgtggtaatagctgttgatgatgttggttgatgaattacaggtgtctcaattgattcaaaatagttaagtctctcaagaaagattaagaaaattgttaagactgttgactttgtcaatttgtaccagctaagaacctcacttatgtgaggcaggcaaaacttttgtttcaaaaaccatataacacagttgctgtgataagatggaataagtggtcagtttttagctccctttgcatttacattttccttagggtctgcctcaagtttaggaagatacagttaaggcagttctttgagatgaattattggaaggtgtaggatgggttagaacaaatgctgttgcaaaacttgaattgcaattatactttaagaagaatcacattctgccaaatagaggtttttgtcattgattttgtgatttgatcacatttgtgttgccttttagaacaactttcttttttcaaatccatttttttttccttttaatcttcttggcccacccaactgactttagacatgaaatctttcatatgctttatttctatctccatttttacagtagttgtgatttatcaaactaggatttttaacttcaagtccatctgtcagagtttaaaacctctagtcttgcagttacaaaagtcctttctgaatgttgggtttttctttctcttccacacattttcattttctcggttcagtcacaatgtcaggttctagtgtggaaaattgggtgaaagaaaggttttggaggctgtgttatttatgaaatatttcctcatggattaagaaagaaaaaaagacaaaacgacaaatagtgtttcaatatcacctcagtgatccagttaactagactggctgttttgtacaacatcgtgggcactggttaacagttaaaatagctgaattgtgcgttttattcagtggttcaaaaaagcctcaaatggatgaaataacttgatatcttcgccatgctctgatttgctgggtaagacagctaacttttaggatgcttatttggatcaattttttataatttcaaaaccattttagaggctaatttttttttaaacaaggaatatacaatttttttttttgtcactgaacaagttttaaattactggtttgttattttgtaagtgaatttgtaagtgaaagcctccaacttaaattagcttcttgtccagggaactcattctgactgactaaagtccctaaggcctttctagttaaaggaaagccatggagctatgtttaaaaaacaaaagcacatagctatggggcttgggcatatcttctttttaaaatgtcactattactgttttgtctccagatgcaatttaatccatttagatatttaaaccaagtggaatgttgtttccacatttctggactaatgggggaaaaaacaccctcatattgttttaaaacaaggcttaaataatgtataatcagcgcgtctggtgacgcgccccactctgtaattccagctgtgttcacctccactgcagctgaaaggaattctaattggctgaggaatgtcggcaacatcgtttatcactgagcaggaacctatcctcctggctgctgggtgatgcatttcagatgttttaagctccggagcccaacttgcagcttgctttcaggagtctggaggagcatgtcacgaagctgcagattgtagatggcagcctgcgttctttgtatgttgggcatccgctgagttctctaaagggcatgatgctttcctgtggttccaacactggactggggatcagaaggtctgaatttgatttctaattcacacaagtaccacaatgaagaaaggggagggggtgcataggattatgatcttttcatgattcagttttcctatctttaatgccagagatctgtctttttagagcacaaaaggacctgctagagatggattaaatattttaatgagtagttatgaattatttatagagtagcacagtattaatacagtcatagattcctgttatgtcttattcctaaatagccaggtaaataataaagctaataacgtactttgacattgaagaaaatctatagaaccggttaataaacatggaaaaataatacaatgaattgataaattatgtattcagaaattccttagagaaatagtgttagaagccaaaaccagtattatctttatttttattttatgtttttcccaggccaggtaatgtgccatcggacagtatcatgtttattttttgttttgtttggagatggggtctcactctgttacccagactggggtgcagtggcaccataacagctcactgcagcctcgacttcttgggctccagtgatcctcccacctcagcctcccgagtagctgagaccacaggcatgtgccaccacggctggctaatcattgtagttttggtagagatggggtttcgccctgttgcccggctggtcttgaattcctgagctcaagcaatccacctgcctcagcctcccaaagtacgtggattacaggcatgagccactgcacctagccagcatcatctttaaatgatgaaattgtggaaacattcccattaaaatcaggaacaatgcagggatgtacactgtcaaaatagttattattaataactagagaaagacatcagaaagcaggaaacaaaattgctgttatttatagacgttatgatatatctttaaaagcccaaaagatcagctgaaaaacacttataaacaataaaaaactttagctggatggaaaatttctccatggcaaaaaataggataaaatcaacatgcaaagacaaactaggaacaacaatctgtaatggatacgaaaatgaaagtctggttttcctaatatataaagagccttcaaaatcaattaggaaaaggccagtacctaataggcaaagaatatggacaattcacagaaaagaaaatggaaatggatttgaaacatgtgaaaagacaaccctattttctctcttcttctttccttttcttctttagagatggggtcttgctctgtcgcccaggctaggctagagtacactggcgtgatcatagctcactgcagcctggaactcctgggctcaagcgatcatcagcttcctgagtagctgggactgcaagtatatgccgctgtgccctgttctctcttatgcccattttctttctctaaaaatttatttttaattgataatcagccctattcatactaaacaaactacaaattaaaagtaagaatgaaacaatttttcatctagaagagtggcagatcaaagagattgaaaatcttctgtgatgagacaagggtgtggaaaaacaggtcttttactctagtggttgagaatataaattgatagagtaggtaccaagagcagtttggcactgtctatcagatcataaatgtttatgctctttgatctagcaattctgcatgtaggacttttttcttatgggtgttttcacacatttatgtaaagtccggtgtgtaaaatcattgcagcattgtttgaaattataaaagactgaaatcaatgtgaatgtgtatcagcagggactagttaagtaaattatcgtgtattcccaatgatgtgtagctgtaacataataagatagtgttttatattctgatatggaacattctccaagatatattattgagtggggggaaaaagcatgattcaaaacagaggctagtgtgtgtactatttgaataataaaacaagaaataaaaataaagggggaaatctatagataggtctgtatagaatacgactgaaagattttgactgttgatttcctttgaagagattctcctgttctcctcttcagaggaaagagagaggagagagggagagaggagagaaaagagagaagagagggtgacttttcattatatgccttttgtaatatttaatctcctcccttttctcacccccttgagcatgtattgcttttcaacaattaaaaagattaaaaagctcttaaatagataagaatttcttagagcaactagtaagtacactaactgccaattgttttgaaatgtagacattctgaaaaatcaaaatgattgtgccgaatgtactttaaaaggctaaaatattatagcatttcaaagtacatactcatatttataaggacttcctcactaggaagattcctgggttctacagaataaaattcttggctacttgtcttatagctctgaacagacttattttcccagagagtatgtttattatgtaatagcgagttgcctgaccccccaaaaagcttgttctatcatattaaaataaggcaaaatgattactttcagattaagaaatttggactctagatcttgtttatatagtgagttctttaaaaaactgaggtcttggttctgaataatagtggtttacataatttatttagaatgtcatttggggttatctctgacctatttttataaaataatctcatctttaaaataggagtaaaatgctcatttgcataagccagtaataataatttagtatttttccaagtatttatagtcaatgtgtttgccatgaacttttttaagggattgtttttaattttagaagtgctttaaaaagcaatattggcatctggctctgtagaagtagaaaacatggtaacttcaatgtgatatatttgcttttttcccctcttaggtctttggggtaaaaaaaatccaaagtttactcaattttatttctacatatattacctacaaattatagaggtgagacctgcttgctgcctgttcatacctgtcagtgatactaatacctcccgtctgtacagtgtttcatagtttccaaagggttctcgcatggttcctcacttgagcctggtgaggaaatacctgtaaacatgggtagaagt

SEQ ID NO: 97241 - DNA, 32721 bp, Homo sapiens
  misc_feature (1)...(32721): n = A,T,C or G
agcctggaattgcacggcaccatctggtaacactttcccagttctccctttgatctgtgcatttatgcagctttgccctttgtgatctgtctatcttctctggcatctctccctctttttagcccactgtgcaaggaatccccaggacctcagagatccactttcattagctactccctaactcagcgcctctctttcttctgtgtgtaaacaagctccttgttctacgtctaggatggagatggtagaagcagggttgccaacagaggagataggaggggaaagggggatttactccaggttttgaggcacagagaaggaagggtttgtcaggggtagggagagctggagaccagggagttggaggcaagcctagactcccctctggtggcaaggggagggtgtgcaggtgcaccagtgaggatcaggagacagagatgcgagttattctctgtgggatttagcaaaacccacagacatacagttgttttttgtttgtttgttttttgagatggagtctccctctgtcatccaggctggagttcagtggcacaatcgactcactgcaacctccacttcccgtgttcaagcgattctcctacctcagcctcccgagtaactgggattataggtgcatgctaccacgccgagctaatttttgtatttttagtagagataggatttcaccatgctggccaggctggtctcggactcctgacgtcaagtgacccacccccctcagcctcccaaagtgctgggattacaggcgtaagccaccacgcccagccacagacatatagttttaaacacaagaagggacctgcagatgtgtttggtggtggcttagacactaggctttgggtcagagccagtataagaccgtatatgccagtataagtggagcacctgctggagacctaccagcaagaggaggattatgtttggtgaaccaaaacctccttccaggctgggcgcaatggctcatgcctgtaatcccagtactttgagaggccaaggcgagagaatcacttgagcccaggcaacacagtgagaccccatctctataaaaaataaaataaaaaattagccaggcatagtgttgtgtacctgtagtcccagctactctagagtatgaggtggaaggattgctttagcctggaagttcaagaccagcctgggcaacacggtgacacctcatggctacataaattttatttatttatttatttatttatttatttatgagatggaatcttgcaggtatgagccactgtgcccggcccaagactctgtctctaaaaaaagaaaggaaggaaggaagagagagagagaagaaagaaaaagaaagaaagaaagaaagaaagaaagaaagaaagaaagaaagaaagaaacaaagaaacaaagaaagaaagaaaagaaagaaaaggaaaaggaaagaaaagggcccggcgcggttgctcaagcctgtaatcccagcactttgggaggcggaggcgggcgaatcacgacatcaggagatcgagaccatcgtggctaacacggtgaaaccccgtctctactaaaaatacaaaaattagccgggtgtggtggcgggcgcctgtagtcccagctactcgggatgctgaggcaggagaatggcgtgaacctggaaggcagagcttgcagcgagtcgagatcgcgccactgcattccagcctgggtaacagagcgagactccgtctcaaaagaaaaaaagaaagaaagagagaagcggggagagaaagagagagagaaagaaagaaagaaaggaaggaaggaaggagagaaaaagaaggaaagaaggaaagagagaaagagagaaagaaagagagaaagaaagaaaaagaaaagaaaagaaaagaaaagaaaagaaaagaaaagaaaagaaaagaaaagaaaagaaaagaaaagaaaagaaaagaaaagaaaagaaaaaggaaagaaagaggctgctgcgctcccgggagagggacggcagtcgagacggctgctgctccgcgggcctgcagaagggggcgccaaagatcacgaaagttaacagctgccgctcggatgcctggaggtagtggggccggggcgaagtacccaggtaggggggctaagctggaggctcctgcagcgccttctcttaccggatgccggtccctggaggctccaagcagcttttcgtccgggaaatttccagtggcactcagtcctcaacctgagaacttagcactaggaaactctggtctttccagtctaatgcgtatgctctctttggttagaaaagaaaaaccacgtgtcccttttgcattggtcgattggaaatcaatctattattcattgcaggagccgcctcagaatgccatgaagaggtaaagtccacctctgtagcgagattgcctgggttggaatctctgctctgccagttactctttgccaataactttcagggtcttgacctgttgcccatgctggagtgcagtgatgcaatcatggcttcactgcagcctccaactcctgggctcaagtgatccttctgcctcagcctcccaagtagctggggctgcaggtgggctccaccaagcccaactaattttttttttctttttttagagttggggttttgctatgttgcccaggctggcctcaaactcctgggctcaagcaatcctcccacctcagcttcccaaagctctgggattacaggtgtgagccacctcacccagccactaattactatttatgtcatctctgttgacttaaggtcaagtcacttaaccactcagcacttcagtattttcttatttgtgaaaaggaataataggccaggtgtggcagctcaacatctgtaatcctagcactttgggaggctgaggcagctggatcacctgaggtcaggagttcaaccagcctggccaacatggcaaaaccccatctccgcttaaaaaaaaaaatacaaaaagccaggcgcagtgactcacgcctgtaatcccagcactttgggaggctgaggtgggtggatcgcctgaggtcaggagttcgagaccagcctggccaacatggtgaaaccctgtctctactaaaaatagaaaatttagctagatgtggtggtgtgcgcctgtagtcccagctactcgggtggctgaggcacaagaatcgcttgaacccaggaggcggaggttgcagtgagctgagactgtgccactgtattccagcctgggcaacaagagtgaaactccgtctcagaaaaaaaaaaaaatgtagctgggcacggtggcaggcacctgtaatcccagctactcggaaggctgaggcagagaagtgcttgaacccaggaggcggaggttgcattgaccgagatcgagccactgcactcctccaacctgggcaacagagtgagactctgtggaaagaaagaaagagacagagagagagagagaaaggaaagaaagaaagaaagataataatagtacttagctcagagctgcgatgaggaacaaataagttaatggatggggctgggcacggtggctcacgcctgtaaccccagcagtttgggaggctgaaggctgaagtggaaggatcacttaagcccaggagttccaggtcacagtgagttttgattgcaccactacactccagcctgggttacagagcaagactcagtcaataataataataataataatgtacagaaagtgcttagagcaagtagaactggtctgctctgtgagctcttaggatctcacttcaggcatctgttgctgtttcaccccgccctactctgtgccagaggttgtccaaggtgctggaggtcccaagcataggagagccaggcaggtgtggccccatcccatgcccatgggagcaatccggctgctgaaagaaaacagatattaaatcatcacacttggggaagggcacagtggctcatgcctgtaatcccagcaaaaaaaaatgcagagggcctgagaaggtaggatctttttaggtcaggagttcaagaccagcctgggcaacacagtgagaccatttctgaaaaaaaatgaaaaaaaaaaattagctgatagccaggcatggtggttcatacctgtaacctcagcactttgggaggctgagatgggcagatcacttgaggccaggagtttgagaccagtgtggccaacatggtaagaccctttctctactaaaaatataaaaattagctggacatggtagtgtgagcctgtaatcccagctgctgggaaggctgaggcacaagaaccaattgaacccaggaggcagaggttgcagtgcagtctgcagtacaagattgtgctattgcattgcagcctgtggggacagagtgaaaccgtgtttcaaaaaaaaaaaaaaattagtggggcatagtggcacttgcctgtcatcccagctacttgggaggctgaggcaggtggatggcttaagctggaggctgcagtgagctatgactgcacaactgcactctagcctgtgtgacaaaaaaatatgaacaaatacataagtcaggtgactaaggggtcatctttatgccctgtaccttctctcagcaacctccatcctataagaaaggggcaattggccaaagtatgcctctgctgtagttgtagattaccatgtttgcacgattatcattgtcaatgcttcacatttacactagggcactatgattttcaatgcagtttccatttttattttggaggcccctcccacgaaccttctcccattttactgaggcccagggagaatgcacagggagctgagcccctcctttgatcttagtttggtggcagagacaggcagtgatactgacgatgtgatggcagtgtcaggtgcactctgtcttcactagaaaactggcctcctggaagggctggaagctcccacccttgactgctctgactctgtctccagcagctcttcgctgttagggcttccctgacaagagtgcagtccctctcgaggctgattagtgcagggcgggctcctcgtctccgaccaccggctcctgctggctgttccctccaccctccgtctcgggctgcgaggcttcccttaacactcgaaaggggggcccgtgaccaggtacgaccacgtcggcaacgaccaggaccctcttccggctccgctcctgggctgcggggtcttcactcagtgcctgccacgaatcctcgtccccatctcgctcaaacacatctcccgccaccaccacggtgcccagagccgtgccggccaccaccacgctcacgtcgcgctggcccccgtggcccggcgtggcccacacctcgagccccgggcccaggcgcaggggctgcccctcacccagcccgtggggcaggtagcggcctccgggaaggcagaagtcgtgcgagaccagcagagccgcgcctgggaacagccccaagttcccgatgtgatccgagtgcccgtgggtccccaccactagcgtcacgtctcccggggccacgccctgccccgccagcgcccccagcagcgcctcccgagcccaggggcccccggtgtccaccaggatggggccacgggccgcctcctccagggcggcctctgcgccgccactcccgcgcggggactctcggtggctggaggccgggccccgggtctggggtaggaccagggtcacggagccgtcggcgcgcacggcatcgcccacaccctctggctccgcgtagccctgcagcagaaccaccacagagtaggggtcgccgggcaccagcagaggggatgccccgcacagcggctcggtccgcatgaggctgctcctggcagggagggacgggctggggagaaaggaaatggagcagtgggcgaccgtcctgtccctccgcgatcccccacccgcgctcggccccgccactgcccctaagcctcggttctctgccacccgcctcccattaagttggtatcaccctcaacccctgcccaaaatggtatcgcccagactcccttcacacttgggcccgcccctccctcggcgtcctcggcccccgccccattccgttcgcggtacgtacgtccttgcccgtcaccctccaaaggctatcctttatgtttccctccatcgaatcctagccgcgctctaccttgggcctctgctaggtcttgcctcactcgaagaaagcgcagaaatcgaaaacgcgggtgagagtttgtcctctgcggttcccgtgtacccagatatggcggccgaagcggcgccgcggaggtagctgtagttccggcgccttcaccgtgtgcccgaggaggctgcctggctgggctccagcctcctggcggttctccgctccgcaaccccagcaacttctttgcactgcagaattttgaagcgccattagctttgaggagggttcatgctcagttgcccaggcaggagtgcagtggcgcgatcatacctcactgcagcctcaacctcctgggctcatgtgatcctcccgcctcagcgtcccgagtatctgggaccacagatgcgcaccaccaagcccagctaaggtttctattttttctttctctttttttttggagacacggtctagttctgttgccaggactggtctggaactcctgggctccagcgatcctccagtcttggtctcctgaagtgctrggattacaggtgtgakccaccgcgcctggtctttttttcttttgagacagtctcgccctgtcgcccaggctagagtgcaggggcaccatcatagctcgccccagtcttgaacccctggttctagcgatcctcctgcttcagcctcctggagtgctgggaatacagrcgtgcacgcccctctaaattttttttgkttttttttgagacggagtcttgttctgtcgcccaggctagagtgcagtggcgtgatctcagctcactgcaacctccgcctcctgggttcaagcgattctcctgtctcagcctcccgagtaactgggattacaggcgcccaccaccatgcgtggcttttttttttgagacggagtctcgctctatcacccaggctggagtgcagtggcacgatcttggctcactgccagctccgcctcccgggttcccgccattcttctgcctcagcctcccgagtagctgggactgcaggcgcctgccaccacacccggctaattttttgtatttttagtagagacgggctttcaccgtattagccaggatggtctcgatctcctaatcttgttatccacccgccttggcctcccaaagtgctgggattacaggcgtgagtcaccgcgcccagccgcccggctaatttttgtatttttggtagagacgaggtttctccatgttggccaggctgctctcgaactcctacactcaggtgatccgcctgcctcggcctcccaaagtgctaggattacaggtgtgagtcactgcgcccagcctccaggctggtcttgaccttttggactcaagtgatcctcccatctccacctctgcagtaactgggactacaggcgctgcaccaccagccctgcagtcttctttgtgtgtgtgtgtgtgtgtagaattggggtttcactatgttgctcaggctggagcttgagcttaacaagacagcggccattctgggtgctgcctcatcgaccagctagctatgtgtgcccggctgttgtttgaaactttgggcccagctagtttttagaaaaaaagaaaaaagtttaatagcgatatagaaaattgagcacctataaaactatatggtgggctctgggttacattgagcttaagtagaccaagtatctatcccacctaaattatcagcaactccaggccatgacccagtgtcccattctccttcacggtttgctggtgtgtagcctcctggatacaggcaatgtatatagatcgcagagaatgtccgttctggyctcttccttggaagggtctaaaaacagaccttaaggagctaagtgacttccccaaagcccacagctccagtgccactgctgacttttgggtgggggtgggatcagttaaagaggaaagctttcagtactgtcagcacatacacctgccaattaaggggctggatagagttcatctctaggagcaggacctccacccccaccctccaccccagaagccatgtcatgctgtttcaccaggatcttgcctgaggttagatgggagagaacagctacaagcttgggtggagtcactcataaacacaccctgaaagctgtggagcagggagagtgcaggctttagagggctctccatgatcccttcccctcctgggggctcaaaggcaagggtcaaagatcttctcggtcaagtttggggtggcttcctgtcttggtcatcttgtctcccccttcctcttcctcctcttcctcctcctcctcctgctcttcctccccttctgttttctcttccccatctgtgatctcctttccagtccaagtttcctgtannnnnnnnnnnnnnnnnnnnnnnnnnnnnnnnnnnnnnnnnnnnnnnnnnnnnnnnnnnnnnnnnnnnnnnnnnnnnnnnnnnnnnnnnnnnnnnnnnnnnnnnnnnnnnnnnnnnnnnnnnnnnnnnnnnnnnnnnnnnnnnnnnnnnnnnnnnnnnnnnnnnnnnnnnnnnnnnnnnnnnnnnnnnnnnnnnnnnnnnnnnnnnnnnnnnnnnnnnnnnnnnnnnnnnnnnnnnnnnnnnnnnnnnnnnnnnnnnnnnnnnnnnnnnnnnnnnnnnnnnnnnnnnnnnnnnnnnnnnnnnnnnnnnnnnnnnnnnnnnnnnnnnnnnnnnnnnnnnnnnnnnnnnnnnnnnnnnnnnnnnnnnnnnnnnnnnnnnnnnnnnnnnnnnnnnnnnnnnnnnnnnnnnnnnnnnnnnnnnnnnnnnnnnnnnnnnnnnnnnnnnnnnnnnnnnnnnnnnnnnnnnnnnnnnnnnnnnnnnnnnnnnnnnnnnnnnnnnnnnnnnnnnnnnnnnnnnnnnnnnnnnnnnnnnnnnnnnnnnnnnnnnnnnnnnnnnnnnnnnnnnnnnnnnnnnnnnnnnnnnnatggaggaaaagagtgaggggaaaggggggggagaatggattggggaaagggggaaaggaaaggaaaaaaaatgggagaaaatgggaaatgcggagagaggggataaatggttacagtaggggagaaaagtcacccagactgtttagcaggggttgccccccagatcaatgcgccctccgcctcccgggttcaagtgattgtcctaccccccctccgtgaccacccgggaggccagatgcacgggcccccaccaccacgcccggctaattcttgtatttttagtagagacagggtttcactatgatggcccggctggtcttgcacccctgatgtcgtgatccgcctgtctcgccctcccaaagtgctgggattacatacgtgagccatcgcacctggcccattattactttttaaaaattttccttaaggcagggcccaatggctcatgcctgtaatcccagcactttgggaggccaaggcgggtggatcacctgaggtcaggagttcgaccagcctggccaacatgatgaaaccccgtctctactaaaattacaaaaaattagctgggcgtggtggcaggggcctgtaatcccagctactcgggaggctgaagcaggagaatggcttgaacccgggaggcggaggtcgcggtgagccgagatggtgccggtgcactccagcctgggcaataagagtgaaactccgtcttgaaaaaaaaaattctttaaaattattattatttgtagagaagggggtctcttatgttgcacaagctggtctctaactctggtctcaaacagtccttctccctcagactcactaagtgctagcattacagttgtgagccactccacccggctcattatgatttctttktttttgtttttgtttttgtttttttttttaagatggagtcttgctctgtcgccctggctggagtgcaatggtgcgatcttggctcatggcaacctccacctcctggattcaagcaattctcttgcctcagcctcccaagtagctgggatcacaggcgtgcaccaccacgcccagctaacttttgtgtttttattaaagacggggttttgccttgttggccaggctggtctcgaacttatgacctcaggtgatccacctgcctcagcctcccaaattgctgggattacaggtgtgagccaccgcaccccaccgctcctggacccactttaatcaatggcacagtcctcactctgsccccttccccatgcttaggggtagacatcccctatagtcaaaccctagaacctagctcccctctcaggttcccttctcacctccctggatggtgcagtgtcttatcctacctgcttcttgaggtatgtgacctccacgctgggctcatcccaaagctccagagggatccccagatccaccttcacccccttctgcactaggcctttcagtgttgccatggtctgactctgaccctgagagattaagaatttggcatcagcccagctcaccaccccacccctyccttcccctttctgccatttcagttttgtcaactactggagattcaagggtgagttccatgatggtgagatgatgggcagataacctctggagggcctcaggggatacagatctttgtatctgagaagtggggtcctgccctggggaagggtctgaccttggcatatctcagtgagcccttgcgctcagcgtgaacactatagtccaggatccgctcacataaattctctaaggcctcttccagccttgtctctctgtggaaagagaggaaacaaagattccctggatgctgtaggaactcccagggctccgttgggggttggaaaggggaggagcacgaaggactcacgaaacgctgtaaggcacgtgtctcttcctcttgcctgtatccagcacctgccccagctccagcacctctcgagatcgaccggtgcgactcagttccgcctgtagctctgtgctcagcagcttacacactggtggggaggagaaacgtccggggggaggtaaaagacaaacacaccagccattcattctgcagatgacctgaggcagcagagcatacaagtgcagactatggagccagactggctgggttggaatcctggctcagccatttagcagctgtgtggcaatcttcctgcttgctgtgcctcggtttcttcatcttttttttttttttttttcagacggactctcgctctgtcgcccaggctgtagtgcagtggcgcagtctcggctcactgccagctccgcctcctgggttcacgccattctcctgcctcagtctcccgagtagctgggactacaggcacccaccaccacgcccggctaattttttgtattttttagtagggacggggtttcaccgcgttagccaggatggtctcgatcagctgaccttgtgatccgcccgccttggcctcccaaagtactgggattacaggcgtgagccaccacgcccggccggtttcttcatctttataatgggataataggccaggagtggtggctcacacctgtaatccccagcactttgggaggctgaggcgggcagatcacttgaggagttcaagaccagcctggcccacatggtgaaaccccatctctattaaaaatacaaaaactagccaggtgtggtggtgcgcacctgtaatagctactcgggaagctgaggcaggagaatcactcgaacccaggaggtggaggttgcagtgagctgagatcccaccactgcaccccagcccaggcaacaaagggagactccatcttaaaaaaagtaaaatacattaaaaataaataggccagcacagtgactcatgcctgtaatcccaacactttgggaggctgaggtgggtggatcacgaggtcaagagattgagaccatcctggccaacatagtgaaaccttgtctctactaaaaatacaaaaattagctgggcatggtggcgggcgcctgtaatcccagctacttgggaggctgaggcaggagaatcgcttgaacccgggaggcggaggttgcagtgagcgagattgcaccactgcactccagcctgggcaacggcatgagacgctgtctgaaaagagaaaaaaaaaaaaaaaaaaaaaaaaaaaaaaaaaatatatatatatatatatatatatataaaattaatacaattggataataatagtatgtccctcataggagtgtgatgaagattaaataaatcaacatatataaaggctggcacatagtgagcactgtataagtattcactgttatcctgcagttatttattgagctccttctgtatgcatactaacaatatagacagcaataagacctattatctctatctacaggtctctgtcagtgtagttgggacagataaaccaaggatgacaagctgtggtgaagctgggcctgaactcatgggctcaagtgatcctcccaccttggccttccaaagtgctgggattacagatgtgagccactgtgcccaggcccgttggctgtattctgatagaaggcctgcagaggtgttaaagcaaggactgatacaattaggtgattaagtctgtttaaaaagattgacaggtcaggggagaagagcggcacacggaggtgaaaggagacagagatgaggaccaagtcatgagactgtcatgactgcctttcatgatactggaatacagttgagggggtgaagcgaagagaaaaggaatccagggaagaaacgtaaagtcaggagggcagcaaactagggcatcagggccagccccctttctcaactgggccccacgctagtgcagctatggaaggcgctgcttgctgaaaaatccatatagtacgcaccgtctgcaaagtctcaccggatggggacactctcctagttgtgtggcttccttttgtttatgagcttcaaaggctgaattactcaccctcaaaccccctcagcggggtgtggggcctgtaatttgggagcgtctatgctagggtagggcagcggatgtccacaaggcctgagcctcacacccggctcctgcagcctctgcagattaaggtctggtgacatgaggtaaacactcactgaagatgctctaaaagttggcagtcccgggccgatggtccctgaactacaattcccacaatccattggcgggcggggggttccaagccagccaaaaaaatgcaggctctctctggatgcagtttgaggtggcactacacgttcgcttccttgaccccatccaaattcagccaagctccaccagaacctccctcaagccttcaaggaggtcgggtgacccacccaatacaggctaggatgtccggcctagaagaaggaggtgtggccgggcgatgcctataggggctacccccttcaaataccttcgcatttgctgggcaagcgttctgtgtcatcgtcctcctccttcaacatcccagcccaagcctcgtgcacggccaaaaaaaggaaaagcaatattcccaaccgcacaggtcccatgacaaagcgccgtctacaaacaatcaccgcttgccttcaacttcgggaaggtagtgtgggtcccttaaattcccaggcggctagcggcaaccttaaatccagccgaggaaggtcggcgcatgcgcaggatcagcccaacaagggtggggcctcgttgctacgggtttccctgcctccgttttgtggcgcctcttgaaggtcctggcagccgggtagtgaaggaataaattgcagtaattacaccaagagggagtgctccttatatatagatgtagaaacaaacttttaaaatataatttcattctgcgagcctagaggacttattctgktacggggaaggggcagtgacttgctcttaggctctgccaggacctgctcccacgagggggcggggccaagatggcgccgagcgccgggtgagcagcgtctcggctgccgctagagttttcctgctccccgcgctcggstggcgggggcgggtctgagtggtaccccggaggagaccctttgaaggtcccttgtggggactggaaagaggacggttggttgtgtgtctgtgctcgtggggaccccgtgtgtgtgcctgcattggagagatgttgcaggagatggggtgggctctctgaacctcctttcgcgctgcccggggatcttcgacctgcttctctgctgggatctcgcttaagttaacccttccctgggacgccttcctgccgcctccactgatctgaggagatcctgtgactgtagcgtgttttatgagcctttactggcagagggtaccgccgggtattgaaggattcgtaggagttcgccagggaagtgggacacgaccccctcttgtaaacccggcgccaggcacagagtatgtctcgaatagttgtgttccctatagataagacttataaaagtcggggaggagatcagggatggtttgaaaagaaccaatttgtttttcggcctccctcttcccatccttccagcacggccccaccctacctgtactactcctaagcagtattgatatgttaatcttcctaatgtccaactgcaagtgtgccactttaatttttttttgttttttttttgagacagggtttccgtctgttacccaggctgttgtgcagtggcaccatcttggctcactgcagcctccaactcctcagttcaagcgatcctcctgcctcagcctcctaagtagctgggatgacaggttcacaccaccaggtccgtctaattttttaatttttgcagaaatgggggtctcactatgttgaccaggctgtctcaaactcctggcctcaaacaatccccccacctctgccttccaaagtgctgggattactggggtgagttacctctcttggctccaatttgctttttttttttttttgagatggagtctctctctatcgcccaggctggagtgcagtggcacgatctcggttcactgcaacctccgcttcctggttcaagcggttctcccacctcagcctcccagatagctgggactacaggcgcccgccaccatgtctggttaatttttgtgtttttacaaaaagacagggtttcaccatgttggccagggtggtctcgaactcctaacctcaggtgatcttcccgccttggcctcccaaattacaggcgtgagccactgcacctggctccactttgctttttttgttttttttttttttttgagacagagtctggctctgttgcccaggctggagtgcagtggtgcgatctcggctcactgcaagctccgcctcccgggctcacgccattctcctgcctcagcagcctcccgagtagcagggactataggtgcctgccaccatgcctggctaattttttctattttttagtagagacgaggtttcaccttgttagccaggatggtctcaatctcctgacctagtgatccgcccgcctcggcctcccaaagtgctgggattacaggcgtgagccaccacggccggcccagtttgcttttaactacagtgtaggctcaaagcttgggcctatgacctattaataatagtgataccaagtatttactgagcaccaatatctctaagccttacaactaattcatttacttcacaaatatttatgatgtcccaggctgggctcctggaatacatcagtgaacataataaagagctctgtcggccgggcacagtggctcacgcctgtaatcccagcactttgggaggccagggtgggtggaacacctgaggtcaggagttcaagaccagcctgagcaacatggtgaaaccccatctctactaaaaatacaaaaattagctgggtgtggtggcgcatgcctatcatcacagctactcaggaggctgtggcaggagaattgcttgaatctgggaggcggaggttgcggtgagccgagaccacgctattgctctccagcctggcaacaagagtgaaactccatctcaaaaaaaaaaggtaccagatttggagttaaagactgggccccaagttttgccactcatcagcccaactgatgaccatgcatgcacaagacattgagaccgctactctcacctccactttatttacttatttattttttgagacagggtctgtgtcacccaggctggactgcagtaatgccatctcgggctcactgcaacctcggcttcccaggctcaagtgatcctccaacctcagcctcccaagtagctgggactacaggcatgtgccaccatgcctggctaattttttggatatttggtagagacagggtctcgccatgttgcccaagctggtcttgaactcttgacctcaagtgatcctcctgcctcagcttctcagagtgttgggattacaggtgtgagccacctcgcctggactactttcactttccttacctgtaaaatgaggaataatactagctgcctnnnnnnnnnnnnnnnnnnnnagtgaaactctagctcaaaaaaaaaaaaaaaaaaaaagagccctgtctagatggtggacggagacggggtctcactctgttgccaggctggagtgcagtggcacaacctctactcactgcaacctccacctcctgggttcaagcaattctcctgcctcagcctcccgagtatctgggactacaggtgcacatcaccacgcccagctaatttttgtatttttagtagagatggggtttaaccatgttggccaggatggtctcgatctcttgacctcgtgatctgcccacctcggcctcccaaagtgttgggattacaggcgtgagccactgcgccatgcccaaaagatgttaaatgctatggaaaagaaaaagtgggctgcccccactctgagggcagagtgcagagttaaatagggtggtcagggtaggcagccaattagatatttgggaagaacattccaggcagagggaatgcagcaaaggctattaagcaagtacatacctggcaagtttaaggagcagccagaaggaatgtatgtgtctggatcaaagtggaagaaggaagggcgttcagagatataatggggagaaggtaattttgaagggctttgtaggacattataaggatttcgtctgttttttttgttgttgttgttgttgtttttgagaagaagtcttgctttgttgcccaggctggagtgcaatgacacagatctttgctcactgcaacctccgcctcccgggttcgagtgattcttctgcctcagcctcccgagtagctgtgattacaggtgcccgccaccatgcccatctaatttttttatttttagtagagatagggtttcaccatgttggccaggctggtcttgaactcctgccctcaagtgatccgcccaccttcgtctcccaaagtgctaggattacaggcgtgagccactgtgcctggcctgagatggggttttgctatgttgcccagggtggtcaggaattcctaagcccaagcagtcttcccacctcaccctcccaaagtgcacagattacaggcatgagctgagccactgcacctgcccattataaggatttcaggttttactttatggcaagtggagagccattatgagggtttgagcaaagaaatgacaatctgctttacagtttgacagaagcattttggctgcaacgttaggaatagatgtagagaaaggcaagggtagactccggttgacattgttaggaggtttttggagttacccagtggatagatgatggtgacctgggccaagcagtgggagcagaggagtcaggttggactacctggtggattgattgatttttgagacagagtctcgctctgtcgccaggctggagtccagtggcacgatcttggctcactgcaacctccacttcccaggttcaagtgattctcttgcctcagcctcccgagtagctgggactacaggtgcgtgccaccacgccaagctagtttttgtatttttagtagagatgggatttcaccatgttggccaggatggtctccatctcttgacctggtgatccgtccgcctcggcctcccaaagtgctgggattacaggtgtgagccaacgcgcccgaccggatttatttttttaccttttttttttttttgagacagagtccatctgtcactgaggctggagtgcaatggcgcaatctcaactcactgcaaactctactgccgaggctcaagtgattctcctgcctcagcctcccaagtagctgggattacaggcacgcgccaccatgcccagctaatttttgtatttttagtagagaaagggttttaccatgttgctcaggctggtctcgaactcctgacctgaagtgatccacccaccttggcctcccaaattgctggaattacagacgtgagccaccgcacctggcctacctggtggatttgatgtgaaggctcagataaagaacaagtgtctggatggatggcattgctatgaagataaggaaagctgagcctgggccagacacttcggctcacgcctttaattccaacactttgagaggccaacgctggaggattgcttgagcccaaaacttcaaagtggtgggattgaagccctgaggtgtaacagaaaaagataaaaatctgggctgggcctggtggctcaggcctgtaattccaacactttgggaggccgaagcaggaggactgcgtgagcccagcagttcaagaccagcctggacaacatagtgagactctgtctctgcccctgcccctgcaaaaaattggctgtgtgtagtggtacacacctatagtcccagctacttgggaggctgaggtgtgaggattgcttgagcctaggagctcctgggctctatcagttttcccacctctgcctcctgagtagctagaacaacagccctgtgcctgcatacccagctaatttttgtattttttgtacagatggggtctcactgtgttgtccaggctggtcgtgaactgctgggctcaagcgatcctcctaccttgggctcccagagtgttggaattacaggcatgagccactaggcccagtccagattttttttttttttttcctgagacggagtcaccctggctggagtgcagtggcgtgatctcggctcactgcaacctctgccctctggtttcaagtgattctcgtgccttagtctccctagtagctgggattacaggtgtgyactaccacgccctgctaatttttgtatttttagtagagatggggtttctccatgttggccaggctggtctcgaattcctgacctcaagtgatccgcccgcctcgtcctcccaaagtgctggtgggattacaggcgtgagccactgaacctggccccagcccagatttgtatctttctctgttacacctcagggctgactcacgtggggatggacataagacactcggagttcctcccctgtctccactgtcctccctttgttggccctctccctgtgtctcacgtttctttttcttctgcctgccccgttcctctgccagggtctccgtctctccaccgggggcttcatccttccagggaggagaagagggactccagaatggctgaggagaagaagctgaagcttagcaacactgtgctgccctcggagtccatgaaggtggtggctgaatccatgggcatcgcccagattcaggaggagacctgccagctgctaacggatgaggtcagctaccgcatcaaagagatcgcacaggtgacccggcccttctgtccagctctacattgggtccatgtcacccagggccccgtccttaggattttgggctgatgtctgttctgtcaccgaccccaggatgccttgaagttcatgcacatggggaagcggcagaagctcaccaccagtgacattgactacgccttgaagctaaagaatgtcgaggtgatttggggagacaggcgggggggggtgagacgccatccttcagccaggtctcctccggctcccttcttacccatgcccctctctcctgccacagccactctatggcttccacgcccaggagttcattcctttccgcttcgcctctggtgggggccgggagctttacttctatgaggagaaggaggttgatctgagcgacatcatcaatacccctctgccccgggtgcccctggacgtctgcctcaaaggttgggggaggggagagcagggtggcagggaggagggaaaggaggacagatgtgtgtaggtgtgaggagcctcacaatagaagaaaagctcagtgtgagatccctggtgagttgcaaggggagcaggagtggaaacacgcttccatagcatggggcaactccccaatgtccatgcgtggcaattcaccttgacacctgycttccttgcagctcattggctgagcatcgagggctgccagccagctatccccgagaacccgcccccaggtaacctccatgccccaccctctgggtctctgggtccctttccccttccttccaccttttttttttgagacagagtctcactctgttgcctgtgctggagtgcaggagtgctggagtgcagtggctcaatcttggctcactgcaaacctgtgcctcctgggttcacgcgattcttgtgtctcagcctcctgagtagctgggactacaagcacacaccaccacgcccggctaattttttgtaattttagtagacacgaggtttcaccatgttggccaggctggtctcgaacttctgacctgaggtgatccacccgccttggcctcccaaagtgctgggattacaggcatgagccaccgcatccggcctcctcccaccttttacttttctactatgctcatcacccctcccgctgtgcctgctttcccaccagctcccaaagagcaacagaaggctgaagccacagaacccctgaagtcagccaagccaggccaggaggaagacggacccctgaagggcaaaggtcaaggggccaccacagccgacggcaaaggtcagtcctcctaggctaggcctctctggactcttgcccaaagccacatggccgtttgttttgtttcctttttttttgtttttgagacagagtctcactctgtcacccaggctggagtgtagtggtacgatctcagctcactgcaacctccacctccagggttcaagcgattctcctgcctcagcctcctgagtagctgggcttacaggtgcccaccaccacgcccggctaatttttgtaattttttttagtagagacagggttttgctatgttggccaggctggtttcaaactcagcctcatgtgatccgcccgccttggcctcccaaagtgctgggattacaggtgtgagccaccatgccaggcctccatgtggccattggtgaagtggctgaggtcagggccagagccccagaaaggatgggggagcctaagaagaagccaggtctcctgggtctcaggggaagtggagggttaaggttcttctgttactgaggtttcttctggagctttctttgtcagacccacctttccaatcacacagggaaagagaagaaggcgccgcccttgctggagggggcccccttgcgactgaagccccggagcatccacgagttgtctgtggagcagcagctctactacaaggagatcaccgaggcctgcgtgggctcctgcgaggccaagagggcggtgagggccccaccagcttgccctggccctgagacgcctcctcctgggggccctatgaattgctccccacatcccacccccacctgactggcttccctcctcccacaggaagccctgcaaagcattgccacggaccctggactgtatcagatgctgccacggttcagtacctttatctcggagggggtgagagcatgaggttccacagtgcagggacggcagtggaagctcctgtgagggtctccctgccccatgcccagcacttctccctcccacaggtccgtgtgaacgtggttcagaacaacctggccctactcatctacctgatgcgtatggtgaaagcgctgatggacaaccccacgctctatctagaaaaatacgtgagtgatcctgcccatcctcccttccagggactagggaccctgctgccaccaacaggaagtcagtggtcagcagtggctcacacctgaaatcccagcaactttgggaggccgaagtgggaggattgcttgagctcaggagtttgaggacagcctgaggacagtagtgagactgctatctctacaaaaaaaattaaccaaaacaaaattagccaggcatggtggtgcacacctgtggccccagctacctgggaggctgagatgggagaattgcttgagcccgggagattgatgctgcagttagccatgattgtgtccctgcacaccagcctgggtgacagagcaagactttatctcaagcagacaaacaaaaccagaatcagctgtcccgcccyttctcccttaggtccatgagctgattccagctgtgatgacctgcatcgtgagcagacagttgtgcctgcgaccagatgtggacaatcactgggcactccgagactttgctgcccgcctggtggcccagatctgcaagcattttagcacaaccactaacaacatccagtcccggatcaccaagaccttcaccaaggtgagccaggaaaacttgagcgtcatttgcttcatcactggccacctctggttgggggaagtcacactggaaacaagggggcagagggaagagggactggaacttgtgggggtctaagggtcttgaggcttgtctgtaataccttttttttttttttttgagatggagtctcgctcttgcccaggctggagtgcagtggtgcaatctctgctgaccgcaccctctgcctcctgggttcaagcgattcttctccctcagactcttgagtacttgggattacaggcacctgccaccacaactggctaatttttttgtttttgtttttttgagatggagtttcgctcttcttgcccaggctggagtgcaatggtgcaatcttggcttaccacaacctccgcctcctgggttccaatgattctcctgcctcagcctcccgagtagctgggattacaggcatgtgccgccacacccagctaattttgtgtttttagtagagacggggtttctccatgttggtcaggctgctctagaactcccgacctcaggtgatctgcctgccttggcctcccaaagtgctgggattacgggtatgagccactgcacctggccacaactggctaatttttgtatttttagtagagacagagtttcaccatgttgactagggtggtctggaactcctgacctcaggtgatctgcctgcctcggcctcccaaagtgctgggattacaggtgtgagccaccacgtctggcctcattgtaatgtcttaatgatttacaaggaaagtgtctatgaaagacttaggtccctrtcaatcatcctttcagaccccttcatcttagtttatttccttccccttacagagctgggtggacgagaagacgccctggacgactcgttatggctccatcgcaggcttggctgagctgggacacgatgttaggcctctgggaggaagaaatgggggaggggacacagtcatgaggttatagagggcactgtacccccatctgggagaccctggtgaccctccggcttttgcttgtccytttcccttctaacaggttatcaagactctgattctgccccggctgcagcaggaaggggagcggatccgcagtgtgctggacggccctgtgctgagcaacattgaccggattggagcagaccatgtgcagagcctcctgctggtgactgaagcccctgtccccacacctgcccactgagacacaggcagtgtttagcaagcatatggcatattttattcacttactcccatctttgcctcatgttttcagaggacattgcagagtctgatactattttacagatggaaagactgagattagactgagtaagaaataagggggctgggcatgatggcttctgcctgtaatcccagcactctgggagcctaggagtatgaggccagcctggacaacgtagcgagatcccacctgcaaaaaaaaaaaccaaaaagccgggagtggtgacatgtgtctgtggtcccagctactagggaggccgaggtgggaggattgcttgaacccaggagttcaaggctacagagagctatgatcgtgccactgcactccagcctgggttacagagggagaccaccgccccccaaaaaagaagggtttaacacgctcagcctgtggcatttggaccatccttccccaatgctcctgttactctgtggtcttctctgtacaaggcaaatgcgctcttgattaaccatcctgccacagtatttagcaagttcattcacacattagtgcccatgttttctttttcttttctttttttttttttgagatggagtctcactctgtaacccaggctggagtgcagtggtgcaatctcaggctcactgcaacctctgcctctcaggttcaagcaattctcatgtctcagcctcccaagtagctgggaccacaggcacgcgccaccatgcctggctaattttttgtatttttagtagagacggggtttcaccatattggccaggctggtcttgagctcctgacctcaggtgatctgccagcctcagcctcccaaagtgctgggattacaggcatgaaccaccacacccagccattcttttttttttttttctgagacagtctcactctgtcacccaagcgggagtgcactgatgcaacctctgctcactgcagcctccaccacctgggttcaagcattctagtacctcaacctccccagtagctgggactacaggtgcgtgccaccatgcctggctagtttttgtatttttagtggagatgaggtttctccattttggccaggctcttgacctcaagtgatccacccacctcagcctcccaagtgctgggatacaggcctaagatgctgcacctggccccgtgcccatcttttcttatgagaaagcccacagtgttctgtacacacactaatagttcagcataatttggcctycaacaggggcactgagatgataaggaatgtccttttttaccccatccccaaggttcttctcaagagtgtcaccagccctccctctacctggcttttttccccagccctccctctacctggctttttttctgttctgcagaaacactgtgctcctgttctggcaaagctgcgcccaccgcctgacaatcaggacgcctatcgggcagaattcgggtcccttgggcccctcctctgctcccaggtggtcaaggctcgggcccaggctgctctgcaggctcagcaggtcaacaggaccactctgaccatcacgcaggtccgtggccgggtggggaggaggaataggaggaagcagaggagaacccctgtgtgggacaggcacttgcacacagccacatgtgccctcagtcagtagtctcagggcaaccaggccctgagtgaggatgccccagccctagtgagagccactgaggaagagcgaggggagcccaggcctctcccttcagactcctcttcttagtagatggtgccacttccccctttcctcttctccccgcagccccggcccacgctgaccctctcgcaggccccacagcctggccctcgcacccctggcttgctgaaggttcctggctccatcgcacttcctgtccagacactggtgtctgcacgagcggctgccccaccacagccttcccctcctccaaccaagtttattgtaatgtcatcgtcctccagcgccccatccacccagcaggtatgcagagctgtgggacagggagcatctggagggcctgggttacctcagagcaccctggggaggcccaggagtagagcacagtcccctctgggccccaagtcaagagctggaagaggcgcccaccagggtcctgcagggctgtagctgccctgcatgaacaaggtctccagccatagctgtctacagggtgaactacaggaacaacttgttcaggcagggagcgagtgaagcgtcctcgccaggcctctggggggcagggagggcacagggcaagcggcctgcctttcctttctatccaggtcctgtccctcagcacctcggcccccggctcaggttccaccaccacttcgcccgtcaccaccaccgtccccagcgtgcagcccatcgtcaagttggtctccaccgccaccaccgcaccccccagcactgctccctctggtcctgggagtgtccagaagtacatcgtggtctcacttcccccaacaggggagggcaaaggaggccccacctcccatccttctccagttcctcccccggcatcgtccccgtccccactcagcggcagtgccctttgtggggggaagcaggaggctggggacagtccccctccagctccagggactccaaaagccaatggctcccagcccaactccggctcccctcagcctgctccgtgatgctccacctgccagcccccggattcccacacatgcagacaygtacacacgtgcacgtacacacatgcatgcwcgctaagcggaaggaagttgtagattgcttccttcatgtcactttctttttagatattgtacagccagtttctcagaataaaagtttggtttgtaagttctgatccactgcagtccttcctgcatcagataccacagaaaggctgggcccattgccccctcctggtcttgggactgaggactcttcctgcccagattcagagtccgaaggccaggaggctggaaaagaaacgactgtcctcccgtgggacaaactgccaccttggccgtcgtgtcctcgtttggggagcctcagatccgaatgacataggcgtcgctgtggcttaggtgtcgcacccacttgtgggggttggcattgccgcatggcctgaaggccagcctgaggaatcggacctggaggccagagcacgtgtgccggggaagctcgaaggagagactggcagggcccagccccagaggagaggccgaggtggagagcccatggctgggaggtcctgggggccctgggacgtccatctgtgaggggcagaggcagggagaggaaggagggcaagaagctgaccacgctgggggaaccaggcagcagctgcttcgggagggtggggtgggggctgcaagtgaatgtgggaggagaggggctgggggtccacagcgaatacctggaaaaggcctgagagttgagagcctccttgcacccgaggcaggtcccagcgaagggctccctctgccagctcagccttctgctctgggctgctcagctcctgagacaggctggagtttggaaagggaaggtgctgggcttggcaccttcttgaggcagacccgtcatgctgagctcactctctccccaggaatctccccgtggtgggtgcacacactcacctgaccacccctcgaggcagggggaggtgcagcctgacattgagggcttggctacagaggagacgggaacaaagtcagccccaggaaggcacagtcccttgtcctgttcctcttcaatgtcataacaggatttcagcacaggtgccccccaccttcccaaattctacagcctctaccttaactggcttctgaggctggcagctgcatctgaagggagaagcagcaggtgccctggccctgtcttccgtcccatagagctgaactcagccaggccagcctcactcttacctctttgagagcaggtcacatcgcaactttagataaacctggagcctggatgagagggtaaaacaccacgactcaggccatcttctactggcatctcaccattccccaccagggacctccatgtggggctgtgtgggtgtgggctgtactcccaagagggaaaagggctgaagcccagcccaactccattagccaaagctttttccttttttttttttcagagagatggggtctcactatgttgcccaggctggtctggaactcctgggctcaagtgatcctcccgcctcagcctcccaaagtgctaggattacaggtgtgagccaccggccgcaacccaagcctttttccaatttgcactccatcaccactaccaccacccccactctgcagtgagtcttgggaacatacaggtcttggcttgggttccaaggtagttctagaacccaggaaattgtctcaccggcctgagcctcggtcccactgcacagaggggaagagccggaaggggagcggtgaggggaggtcatcggagagttggtaccgcatcacagtcagctgagagaccagagagcaacaaggttagtttggtctcacgaccccactgcccccttccccatggtggacggaatttatgaggccaccccaaccctgacctcgccctgaggtggttgcaagcggaggattcgatgagactcaaattcgtccagattcacagagctgtgaaacgagacttcatcgacccggattcctggcccataacctggaaagagagagagagagacttctctcctgactcctgttttgggagaggagcaaggagaggggaggctctgtctgacttctctccatgaactctggcaatgacctactccaaggggagaaagacccactttctcctcacctctcagctctgacttccccacacaaaactcttccgtcaagccaatgcgcatctctgtcggaggagagaccatcaggagagctcagcaatgccatggtttaagacaccaaggaacccgccctaaccccaacccttggtcctgcctgcagatgcctcaccagagccgctaggaaggaagctcttgagccgaatctctccctgcacatccaccttcagcagggatccctgagaggcaggggcgtcaaggttagagtctttttttctttctttttttgagacggtctcgctctgtcgcccaggctggcagtggcgtgatctcggctcactgcaacctccacctcccaggttcaagacattctcctgcctcagcctcacaagtagctagggttacagatgcctgccaccataagtagctaatttttgtatttttagtagagatggagtttcactgtgttggccaggctggtctcaaactcctgaccttaagtgatccacccacctcggcctctcaaagtgctgggattacaggcatgagccactgtgcccagccttttttacttatttattttttttaagagacagggtcttgctctgtcatccgggctagcgtgcagtgactcgatcttggcttactgcagccttaacctcctgggctcaagtgatcctcctggctcagcctcccaagtagctgggacagcaggtgtacactaccatgtctgggtaatttgtttatttgtattttttgtagagacggggtctggctatgttgcccaggctggtttcaaactcctggccccaagtaattctcccacctcggcctcccaaagcactgggattacaagcatgagccactgtgcccggccgttgctgggagtcttagccaccccaccatgtttcccaagtcccatctgtcctcagctccaggtttgggagctcaaacttacattagatgctatcagtacagacaatctctcgaccacatccaaaaaaacttcattcttttggctctgagaaagagagagaatttgggtggttggaagcagaatagcctatgttctgaaatggacagacagggagaaagaacaggacagtcaaagctacagctctagggtgaggacatgggtgatggaagggatcatctcccacctccacccacatctgggggggtgggagatgtgccaagatctttttctttttttttttttttttttgcatttttagtagagacaggttttcaccatgttggccaggctgctctgaaactcctggcatcaggtgatctgcccacctcggcctcccaaagtgctgggactacaggcgtgagccgctgtgcccgacctaagatcttggactcccggatcccagagcaaaaccagagcgtctgaccccatggatccttccctcacctggtcagagcgactggacaggacggggcggctggctgcactgctgggggccactttgctctgttgtgtctcagccccaaactgtaaagcatccaaagcaatcaatcatcaggtctgacaaccccagccaacccctcttttctttcctcaccctcctctttccctctactgaccaagccaacgctgctgaggtcaaagaggctgaagggcttgctgaccacagcttccgtctggatgaaattcctcagcatctccgtggatgtggtctgtacatagccatagtcctagtggtaaaggaaggacagtctgagtgatcagtggagggaaggggtaaagagggggagtggggccaggcatggtgactcactcctgtactctcagcgctttggaaggccgagacgtaggagaatggcttgaggccatgagttcaagaccagcctgggcaacacagtgagactctagtctctacaaaaaataaacaattagctaggcacaggggaggctggggcaggaggacggcttgagcccaggagttccaggctgcagtgagctataactgcaccactgcagtccagcctgggcaacagagcaagaccctgtctctaaaagcaaaaaaaaaaaaaaaaaaaaaggtagacttggcctcctaaccacggcatcccacagtagaagagcagatgtatcttcaggggaattgggtaggggccacagaaggggattgttgattctcaccagcacttcatccaggagttcgtataccagagccacattgcgggagatggtcccctcgcccagggagccacagtaatcgcccagaagggtggccaacctgaggaaacacttggagcgtgtattttctcctcctctcagacccctcctagctaccaggtgcccagcccaaccctcctcacctggagagcagttctaggaggctgaagggagaaacgttttctgaagttgtgaccaccaaatagaggccgctgtgtctgatgtgaatgaaatgacggccatggtgatgctgagacacaggcagggagaagagaggcgttaaaaaaagggaggtggagtgatcagaacccaggagacctgagctcggatcccgatgcctcttactagtcacaacagcagtgcctttgggagatacatgacatatgcctgggcccagcttcccaatgtggaaagggggttaattacactaactaccccgagttgctgaggatggagtcacgcagggagctgggcctggtgtgttgctggcgcccgattgactctttttttttttttccccacccccacctaccccgagagggagtctcgctctgtctcccaggctggagtgcggtgtccggatctcggctcactgcaacctctgcctcttggattcaagcgattctcaagcctcagcttcccgagtagatgggattacaggcgcccgccaccacgcccagctatgttttttttttttttgtatttttagtagaggcggagtttcaccatgttggccaggctgatttcgaactcctgacctcaggtgatccgcccgcctcggtctcccaaagtgctgggattacaggcgtgagccaccgcgccgggcctcacgttagctttatttggcggaatgcaccccccaagtggaatctaccaatgaaccagtcctgggagggagctggcgcccacccggcccgacgggaccccgctcctcacccgcctcccgccactggttaccatgacaaccggggactcgtctcctggcagtcccgtcagcttccggtagaagagctcggccacatcccggccgccactgtccccgcggactggcgggtggaaggactcagtgaaggatcctgcgacacaggctggccctgggcgcccctcccgcccggcccctccgccccttcccagccccaagggtctaggatacagtctttgtagatgagcgggtcccccttggaggacagaatgaagaattgggaaatcatggccgttctggagagtagacaagaagacggcgaaagtcgggcctgccccgccctgcggccccggaacaaaagaacgcgtgtgcgctggccctttaagagcgattctcctccgcccgcgccagctcggaccgcgggaaacccggcgcctgcactaccccgcccggagattcccttccgacgcccgcaccgcctccccgtcactcattctaggcccgcacggtgattggcttgcggctagcgggaggtgaagaaggccgccttgtccgattggcccgcacgcagtggcgccggtcacgtggggggcgacgtttcgcgccaatttcggttggccggccacagtccaccgcgcggagattctcagcttccccaggagcaagacctctgagcccgccaagcgcggccgcacggccctcggcagcgatggcactgaaggactacgcgctagagaagggtacgggtctacgagcccgggagggcgtcctgcgcggggagcctcccggggaacacctgttggtgtgagctggggtcttgggggaccggggtcggcgggttctggggtgcgcgaggccagaggcagggtcgagctgcggcctggctaaggcccacggggcctgggaagcgtgcggggggccatcgatgttgaag

SEQ ID NO: 97242 - DNA, 13945 bp, Homo sapiens
atccttcacctgcattttagacataaatttccaaagccagccaggtgcggtggctcacgcctgtaatcccagcactttgggaggctgaggcggatggatcatgaggtcaggagttcgagaccagcctgaccaacatggtgaaactccatctctactaaaaatacaaaaattagccaggcgtggtggtgggcacctgtaatcccagctactcaggaggctgaggcaggagaattgcttgaacctgggaggtgggggttgcagtgagtcgagatcgcaccactgcactccagcctgggcgacagagtgagactccatctcaaaagtaaataaataaataaatataaatttccaaagcctgctagatagatctaaaaataaacactatagccaatgactggaacactctgggaatagtattccacagtgtgcactttgaggtctcttggagttattctaaaagcacagtgaggtttagaaccaattgtatagagaatgaagaggcacaatagcagagtcttgataaaaaaatttccatttaaggccaaagaagccaacgaagagtcagtgaaaaagaggaggtgctttgtcaaaggagcagagcctgtaggaagatgaggggtgtctgaaactatataaattgggacaaatataataggccaccaattaaaggtaaaaagatggcttttgagaacattgttttggttctaaagagaaagagaaaagttatatgaacgtggtctctctctttctcattgtctcattgtcatactcacccttcttgtgatggtgtgagatggtaaaatgtgtgtgggataggatgaagttgtgtgaatggcgtaggcactgtgatgtgcctactagtgattcagccactatcgaccttctgacaacgtctcagaagatggagcctctgctttgtgtgatcctagatcaccaagcatgacaatgaagatggcgggatgtcaagagcagacagtgttgatgaccaagaagggggtagagcagacaacatggatacgctggacaaagggatgattcacgttcttattgggacggagcagaattgtgcaagatttcatcatgctactcagaacgacgtgcaatttaaaacttgtatgttgtttgtttctggagttttgtttaatattttcagatcacagttgatgcaggtaactgaaactgcgggtaagggaagacaatcatgtttgtaggttgtagcagggagcccatagggctagaaagtctacaaagaaaatcaagagagaataatggctcaagttcctaggggaagtcttctctctttctcttctttcggtatgacatcaagacagactgaccaaccttttcagtcaaaatttgatttagaggcaatcatttaatcaggggttggaaaactttttcctaaaggtgctagagagtaaacattttaggctttgtgggaaagtggcaaaattgaggatactgtacataactatataacatttaaaacataaaaacacattcttagcttgtaggccataacgaaaataggcagtggcttggatttggcccatgggccatactttgtccatccaatttaaacaaaggacctgtgtcctttgacttgagtagaagttttgaatttttcctttttccttaatgcaaatgcttcatgttcaaggaaatattacatttgaatactctgggtcaaatcatagaaaatcaaatcacaactaaagacaagatcccaatcccaagccagtgcaaatggcccaatttgtacctgaaagcaaaaagccctctctgtgaagttctgcttggcaaagcaagccatgcattgctttgcttaggacaagcatttaaacctgaacagtgctatttacctagggaggtcaaaccttcataggtttcagatctcttttctgtgctctctatgtcagagtctactctcccgtgaggctgaatagagctgccgatttcactgtggctatttgagaaaagtagaaaaatcagttaaagggagaatgatgcacaaaagtaaaagatatcagtagcctagtaggttgttttaattttatatttcctattacacaagtaatacaagaatatattcctaatataaaaattcaaatagtatagatgatgctaatgacctccagtgccagcacaggcccccagagttaaatgcagttattggtgtggcagtacactttccacttttttctgtattttattttattatattttaagagatgaggtctcactctcttgctcaggctagagtgtagtggcatgatcatagctcactgcagccttgaactccttggctcaagtgatcctcccgccttagcctctggagtagctaggactacaggtgtgcaccactgtgcctggctaatttccaagttttttttctaagaatttatacacctttgtatttacagaaatatatgtagctttgtattgttctgcacaaatactgcgtgacttattatctccttaaacaatatgacttgatgatttcatctccatacacggatcttccttattttttttaaacggcttttgtgtgcgttttcgatgatttacctatttattctcctactcagccatttctaacttttcactactacaaaccatgctgccctggatgtccctgacatgccttcttgcaccccctcccagaagcactgaagattcaagagacctgggcttgtcacatcattgtcaatatttgttttttgtttgtttgtttgtttgtttttgagatggagtcttgctctttcactcaggctggagtgcagtgctgtgatctcaactcactgcaacctttgcctcccagggtcaagcaatcctcctgcgtcagcctcctgagtagcttggattacaggcacgagccaccacgcctggctaatttttgtattttacttagtagaggcagggtttcgccacccaggctggtctcgaactcatgatctcaaaagatccacccgcattggcctcccaaagtgcttggattacaggcgtaagccaccatgctcggccaacaatttgtattttatatttttatttattaattaatccaggttatttaaagtctagggttagttttttgtttgtttttgagatggagtctcgtttggtcgcccaggctggaatgcagtggtgcaatcttggctcactgcaacctccgcctccaggttctcctgccttagcctcccgagtagctagcgggattacaggggcacgccaccacgcccagctaatttttgtatttttagtagggacggggtttcaccatgttggtcagactggtctcgaactcctgacctcaggcgatccgcccacctcagcctcccaaagtgctgggattacaggcatgagccaccatgcccggcgtggttagcttttttatatcctatcttttttgtttatatatttacttatcattgtgtacagtgagtgccgcctgtaaaatttatctttttggaatttgtagaaattttgagacaaaattctaatgatcattcatttgcatttgaaaagaaacaaaaaagttctatcaaacctgttaattacgccacccaaatcctctacatctgttcttaccttccacttgacttggtgatttctaagtcagcaactatgattatggctttgtcaatttttttcattgtatttctattcgctttgctctatgtagttcccagttatgttgttagggacataaagtttgtgactgctggacttttttggtgaactcttcctttttatgacatatcctttaaaattatttttgcctttaattccgttttgttagatatcaacattgctattcatgctttcctttttgtagcatttgtatggcctttttccatctctttatttcaactttattgtgctgttttgttttaggtgtttctaactttatgtagctgggatttaaatttttcgtttgcaccatctgaacatctgagtttaacccatttgcaactacaaataatactatgtttgcctatcttcccgtcttattttctacttaccttgatttcttttaaaaaaaataaggttttttccttatattgtgagctatctgtataaataattgcgtagccaccactcagatttctatcatgattttttgtcattctccccaccctagggtaactttgagtctttacttttttttttttcctttctttttctttttttcttgagacaggatctcactctgtctcccaggctggaatgcaattacacctaaatgtaacctcaacttcccagactcaggcgatcctctcacctcagcctccgagtagcagcggctacaggtatgtgctaccatgcctggctaatttttgtgtttttgtgtagaaaaggggtcttgccacattgcccaggctggtctcaaatttcctgggctcaagaaattacttatttttatctttttaagatcaagaatcaaacatggcacatagcaaatcccaggcaaaactctagagtgagattatttggtatttccttagttttcttttcagtgcttttctcatccttctaactgcatcttcccattgctttacctactctgccaggtcttctctccaaacacacgtttccaccacacccgttcgtctcgaaggtcccattctcagctagtttctctgcctcaaagtatctgaaactcattcatgaagaattattaatgaataaaggactagttggtggtggtattttactggaaggctcctgaagataaacaagacttagacccaaaagaataaatctaggagggccttcatcagcaagactgctggagtttgagttccatttctgccatctatgaataagcatcttatctaacacctctatgcctcagtgtccttgcctatgaaatgagataacaaagagcacctccctcatagggctgttgtgagttaatatgtgtcaagagtctagaatcatggctagcacatggtaggagctcaagagatgtcagcgcttactgttatcattctaatggatgtaaagaaatatttctttataggggtgacctcggtagctttctactcaatctttctgtgatgaatagaaaagacacctgaatgggcgcacatttaaacaaggagctgttcttattcatgtttgcatggtggctcagcgtccacagcactttggacatagcgaccactcactacatgttgctgaatgacaaaggaaaaaaaaaaagggactaatacctagatttctaaaatgatgtagaggataatggggagaagataagttgaaatttcctatagccttaggctacagtgtaccactgagtaaaaagtgcaataatatacattttctaaaagtaacactataaagcacaggcatacatatcagccagataatatctgtacagcaaggatacgctcaaaagaggtgaactctctactgaagagctgcttattttgccatttaaaaaaaagggtcctctggcaacattttctttagtatcatgaatttaaactcagtctacattataagacctcttctctgaaaacaaacaaaattggcttatgtgagaggcaagctattggtttggtaaacaaagatgtatatatcttacagaaagattacattattttcttatttcatctgtatgtataacaaacaattttgctttataagagtaccaaaaatctccagttaatttagtcctttatttttttcattctccatagaatattggttttgtaacaacgaatacaatccaatatataacattaaaacaatccgatacgtaccattctgctttatgaaagatcagcaaaaatacataaacaaggatataactagtacatttataaaatacatcataacaatgaaaccaaaggatcccacacaataatcttcacatttgacatgctggttacagctgaggagagccagtgtctttggcaagtgattcatatacataagcgatgacactgactaatcctaacacttctgaaatgttcattctttaccagttaaacctaaaataaatcagcaagagtactgaaatataacaagaatgaaatccaaaatttgtcgaaaggggcaatgtttaatactaggaagaacactgaatttggggactaattcttgtccccaagtacatttggattcttgtcttcgttcctggatgatcttaggcaagtaatctgtgctatgaatccttcacttttaaaatgagagagttggttggctggttctctaaggtctttctagattttaactttccatgattttaaaatctttgacacaggcttatttttgtgttgtaaaatgaaatctctaacaatactaacttggcagttgggtggaatccagtgccacccacacacatctgctcaaatagttctttaycttctgagccccaagacagcccagtcctcaaattaacaatgatggcaggcttcaggaggctgatggctagttctccgccagacacaaatgcaagatagatagttttaaagctcctgaagtcatggttatcagaagaaaagctataaaggaagaactacagggaaaacctacaacactctctttgraaaaatgacaaaataacacatttmctgatgcactaacggaagaaggtaggtgcatatattaactataacacataattaattttaactgttattggtgaatatgcacaaaatatacatacaaattagaacttgatcaataaatataaattcaaggtctagatgcaaatgggaagctctctgatgctggtaatttgaacaagaagtttattgtactttcacatgtttctaattctatgggaagaagttgggattccttttactaatgttggcttctgctccattatctgtaaagtccacctctttcacataatcgcagaaattaaagatgtccaaggcccctgtagggcatttcatccatgtcatactcttatcagatgactgtctttttgttctgaaagastgaatgagtgggttttcatcatctctccatttgaaagtcaagtaagctttatctcttcggattcaaggtctaaatttgtccttgtttcttcctaatattttaatgtaattcctatgtcaattgtatttacacaatttttaatatttaactctgatttgcattatagaaattagtccacttcaataaacatgaatgtgcaaaacaaaattactctggaaaagtcaggttttttaaataaacattatccttttattaaattactaaaatgtttctcatataacagtaatgattattctaagcaactgcatgagccttggaagattcttcatctctaacacatgttcctctttcagaaaatatcaaaactctcatttctctgttgtccaccttcctcctgaggggactcaggccacacagggggtctcttctgactgagaatccctaatactgaagaagtggcatcaccagtgatatggtttggctatgtccccactgaaattgcaacttgaatttatcttctggaattcccacatgttgtgggagggacccagggggaggtcatcgaatcaggggggccagtctttcctgtgctattctcatgatagtaagtctcatgagatctgatgggtttatcaggggtttccacttttgcttcttcttcattttctcttgccaccaccatgtacgaagtgcttttcacctcccgccatgattctgaggcctccccggccatgtggaactgtaagtccaattaaacctctttttcttcacaatcttgaggaatgtctttatcagcagtgtgaaaacagactaatacagtaaactgctaacagtagagtggggcattgctgaaaagatagccaaaaatatgaaagcaagtttggaactgggtaacaggcagasgttggaacagtttgaagggctcagaagaagacaggaaaatgtgggaaagtttggaacttcctagatacttgctgaatggctttgcccaaaatgctgatagcaatattgacaataaaattcaggctgaggtggtctcagatggagatgaaaaactttttgggaactggagtaaaggtgactcttgctgtgttttagcaaagagactggcagcatctttcccttgccttagagatttgtggaacttcgaacttgagagagatgattgtgagacgtggagtcaaaggtgatcattttggaggtttaaaatttgactgccctgctgaattttggacttgcatgggccctgttacccttttgtgttggccaatttctcccatttggaatggctgtatttacccaatacctgtacccccattgtatctaggaagtaactagtttacttttgattttacaggttcataagtggaagggacttgccttgtctcagatgaaactttggactgcggacttttgggttaatgctgaaatgagttaagactttgggggactgttgggaaggcatgattggttttgaaatgtgaggacatgagatttggaggtgccaggggtagaatgatatggtttggctgtgtccccactgaaatctcaacttaaatggtatctctcagaattcccatgtgttgtgggagggacccgggggaggtaattgaatcatgggggccagtctttcctgtgctattctcgtgatagtaagtctcacaagatctgataggtttattaggggtttccacttttgcttctttctcattttctcttgctgccgccatgtaagaagtgctttttgcctcccaccatgattctgaggcctccccagtcatgtggaactgtaagtccaattaaacctctttttcttcctggtctcaggtatgtctttatcagcagcgtgaaaacagactaatacaaccagatatatattttattgcattttgcctgtttataacctatattgcaaaacaatagattcatttttgccttcccaaatataaaactattttaatattgaatatgctttttcaaactctacagcccccttctctccctcattccttatgagattttgatacacttcttaatgggcaagagatctttttcttgagaatcactgaaccaaaacccaatttctgaattattattcaggataaagtgcaataaccatgactgaagaaacagtattcaattaaaatacagaaattgtcaactgaaaaatagtgcatgacagaatatccaacactgtattgaatattttctgattattaaaccaaattacttaaaccttatacttgaaaactaatgcacattggtttttaaaatgacctactgaaaccaccataaaatgtatcttttatacaggttaattatagtaacaaatcatattgctttacattgttaaaataatattttcttcaatcatatgacctacaaaattatacccttattttccactgattctcatatttaaaaccagaatttttagatttttctaaataaattttcatcagttttgacttcgcttgcaacttagagttgaatctataaagtactggataaaaattgcctactatgtaacaaatatttccctgatgccacaagattaagatttaataggaatataaactatttctataagtaatattgtacttcagatgcctttatttttccaaatgatgggatgaaacttctgtatactctgaaactagaatgataatataaatacccagccaggcatggtggctcatccctgtaatcccagcactttgggaggccaaggtgggcgatatccagaagccagaagaccagcctgggcaatatggtaaaaccccatctctactaaaaacacaaaaatgaaccaggcatggtggtgcacacctgtagttccagctacttgggaggatgaggcatgagaatcactggaacccaggaggtcaaggctgcagtgagctgagatcgcgccactgcactctagcctgggtgacagagtaagacagagtaaaaatatatatatgtatgcgtatacagctttaaaaacagttttggaaaaaaatacaggtgcttatttcccaagtttaaaagtggatctcctgtgcctaagttaaacagcctgaaaagagaaaaccaaaaaggccaacaccaggaccctgactaagggcttcattaaaatattcgaatgctgtggaagtttattcccacgcaaggcacttactcccaacaagacacaaccgtttaaaattttacagcagtgacaccagggaggggtcccactcctatagacgtcagtattctgcatcgatatgctttgcaatggtgttcaactggatgttggaagctccttcatatatcgtaccttaagcaaaaggaagcagaaggaacaatgaggagttggcgcatggttaagacaagaaatagctctataaacatcacctctgcgcttgctataaaacagttactagtcacatcacttcatgtcccctgaatatggtactatttcacagtaattttgactaagagatgacaattttccatttggtttctcgatgtccaggatcagtattaaactgactaaaggtgtaaacaaaagttgaagattttgattcttcaacaattgatgcataagctcagactgttatttgtggcagttttactaaaaagcctgttgaggcatttaaaaaggcaatttgatattttttaaaaatatagaacaattttttttgaaggacgaggtaagaaaaaaatccagccacataaatagagccaccaaacatatactgaagaaattaaaattgcttttacctaggaaaaaaacgacaaataaaacagccaaaatacctacagaggcaaataaaacaaaataaaatgtaaaaaaaaaaatctatttaccaatctttgcatctcggaagtatttctccacagggtaatctttggtgtagcctactccccccatccactcgatacatttactcgttgtttgtcctgcaatctaccaaaagcaagtgcaaatcacacactgaaaccacataacttatacatgataaacacttctgggtaacattttcagcaacatggattcactgttagtggcactggaaggactaaagttatcttctaaactagcattgtctcttcagtcccattctccataccatttctgtaaaacatcctattaattcacagaatccccattttcttaagaaattagagcattgttcacatgaatctgcatgctgagagatatcatttattcaggaaatgtttactgggggcctaacggacgagctaagggacatttcaagctgaggaccaacacgtcgaaatcctccaaggggagaatgagctcttcaacttccagcccctgagacagccagtgggctgggatcggggtgaaatgtgaaaagagaatggaggagcgagagaccctgcagaatggcccctcaaggacgtccacatcctagccctcagagctgtgaatatgctgccttccatggcaatagggactctgcagatgtgggtaaggacacgagatggagagattaccctgaattatctgggtggctgtgatataatcacagggatccttataaggaaaaggaggaggcaggagagttagtcatggaaggtgacgtgaccatggagacaggaagcagagtcagagagagatctgaacatgccacattgttggctttgaagatggaggaaggggctacgagtcaaggaatgtgagcagcccctagaagctggaaacaactgtctgccagaaccacagaaaggcagcccctgtattccagtgagacccatttcagatttctgacctctagaagtgacagaaaacgaaactgcgttgttttaggtccccgactttttggtaatttgttatagcagcaattggaatctagtacagatagagctccatttgttgtgagaagccactgaagggttaaagctggaaggtgacatggcctcactgccactttgaaaaaggagagaggctggatgggaggaagcaccagggaccaggagggcagtgaggtgactgaagtacagaggtggcagtggagagggagacaaacacaccatttaaggaatcttttaggggtagaatcataggaaatgatgctggactcaatgtggggggtgagggaaagcagggtgccaagatgacgctcaggttctgatggtgaagcagaagttggacatgttagtctggaattcagaaagaagttgaggtaggatatttaatttatgggctggagaggttaaatgagaatttaaagccatggaatgaataagatactgctgaggctacgaaacagctgcccagtgatttggctaaattctctagcctcagtctaatgtgttagctctagaaagcaaatgtatgagtagaaagttttagacaatcttttcttggtgttttaaatctgatttgttcacatgatggacccatcatcttccacggcattcactttgcccgaacttgacaccataggcatgacaccctcattcagaggaggctcagccatggatttgagatgggtggtctatctgagctgggctactcacgaaacatcgagacctcacagaactgaaggttttcctatggcagtttgagatgggtggtctagctgagctgggctactcaacgaaacattgagacctcacagaattcaagtgttttcctatggcagttttccttttttgcttttctattataagaaataaaagtccatgttatcttaacttgaaaaacaaccaaagtacaatcaacattcccaagagaaaatgttaataagtatatatctgaaaaaaaaaaaggctgaattactttttccttttttttttttttttttttttacctctgatgcatagtatttggccattgacgcttcttttatgaatggctttccagcttctaaaagcctagcagcattgtatgttagtaatcttgcagcttccagctgggtggccacgtgagccacttggtgttggaggccctgtaacagtcaggcccaagttagagaattatgatttcaaaaaagcaagcacctcaacctcaaagtcctgcctagatacacaacactgacagactcaaaatacaccccaaaggaaatttacattcacgtcttttaaatactttaaaatgagtaatctaaaatgaaatgtgacactataagtattgttaaatcctcttttcctagaaaaacttcaaagttcatgtaagtcttcatgattttcaagatttaaatagtaaagtataacaaagttaggtttaaaaacttgactgttatatttaataattatttcaactcttttgatcaaaattgagcttaaatgaaatcctggcacagcaaaactttgaatatattctttatttgcttgagttaagaaaattttgatttttcatatggcttccaggcattaaaaaatgttagctacaaagtaatgaagaatatttgaagcaccaattactaccaccctgaaattttagagggtgattaggtccacactaaatgtttgccaatgaaagaaacaacagttaacttagtgagccagaatacaaacattaacatttataaacaatttcctgcaaataacaggcacagatgtttactacaaactgaaatgtttctcatgcctaacctatccatccacccagatagttattgggcacctctgagatggcaggcaccgccctgagtgacagaggcagcacactgaacattacagccagagttccttgttctcatgatttataatacatagtccagcaggaagaacagacaattaaataattataataatgtgtgatgaatattaagacagtgaaccttgattaagtcaatcacacacgaatcccaggaatggcctttcttaaacaaaagggagggaaaagttggagaaaaacagcactgtttgttaataccctacagattcttctctttctctttctgaaatatgtgatacacacaacaatttcgtatgtacaaaaagagacgatgttccgtatatgtaggctataaagcataatagtaag

SEQ ID NO: 97243 - DNA, 14348 bp, Homo sapiens
cccaaagtgctgggattacaggtgtaagccgctgtacctggccaggcacagtattttcttggcatggcttcatctccaggtcaatttccctttgaccctggtacctcttcacgttcctgccttttgactcccacactgcttacaaagcagctgggttgtgggtcccctgaaatcacaggatggtacagcaacctgctgcccgccttctatgactgtggaagccaggagccgggacatctggaaacagagctgtggtctcagggtcctccagcacctgttgctgtgccacccccacgcaggttctgtgtctgcccgaggctgtcctgtcttgcagccccgggtttggcagtcgtaaatgttttctgtctacccaatggccccgcgtggtggcagagttctaacctacatccttctgtcttatttcaacagagagaacgacatcacgcctgtactggaccacaccttctgcgtggaacacaacgccttcgggcggatcctgcagcatgaactgaaacccaatggcagaaatgtgccagtcacagaggagaataagaaagaatacgtccggtaatgccacctgtcggggacggccaggtgcctggggcgcggctgagcctgcatttagttgctgtagctccttcgctgtgtgaggcctgcatgtccctgatggctggtgcttatgatcagatcacatgaacagaggcgactttcagaaaccgacagctcagcagcagcgtcagggatctgcttggaggggccctgatggggccaggcctggcctgagggacagagcccatgtggggaaggacttttcagtgaccacctaattctgggtgcaaaggtggggggcaaaggagagagcagcagcttggagggtctctcgtgctcagtccgaggaagccaccctctcagtttttttccacccctaacttgaggcagatctgtgttcaggcctaggcacttgcggcctaggcacttgcagctgagaactatgtgggcacgtctgtgtgccacgctgtcctgtgctgtactttcaaatgtacttttacacatttaaacaatttttaaatttttacatggtcttgctatgttgccaggctggtctcgaacccctggcctcaagcaatcctcttgcttccgcctcccaaggggctggcattgcaggcgtgagccgccatgcctggccagaacatgctttcacattgcagcaattgatgtgacagatcaggttcaatcctcctgttttcgcgagcaaatcggaatgaatcagggcacgtgctgagtcatttttaacgtgatgccaaggtttggtactactagctggtggtgtgtttgtctgtcttggagagatccggggagtggggggctcagtgtgttcccatgtttgtcagactgtgatatcagaacctgctcacaggtcgggcgcagtggctcatgcctgtaatcccaacactttgggagaccgaggcgggcggatcacctgaggtcaggagctcgagaccagccatggccaacatggtgaaaccccatctccactaaaaatacaaaaattagccaggtgtggtggtgggtgcctgtaatcctagctactggggagggtgaggcagaagaattgcttgaacccaggaggctgaggttgcagtgagccgagattgagccattgcactccagcctgggtgacagagtgagaccctgtctccaaaaaaaacctgcccatggcggaaaatccacttggtgttgcatccaacttgcgagtttttcttccaggttgtatgtaaactggaggtttatgagaggaatcgaagcccagttcttagctctgcagaaggggttcaatgagctcatccctcaacatctgctgaagccttttgaccagaaggaactggaggtatgtgcctgctgtgcggagtcgacccagggcgtccctgtggctggcgtctgcctgttttaaatccttgctgcagggggcagtgtgtgccgctttctagtaagcctaggagctgctggggttcccagactagagccagggctggagcaagagtggggagtagagggtgttcatgccagttagtaaccggcgagatgtctgcttggcggtaggaaatctgactaactcccgggaaactgttcaaggtggctgtggcttcccttgtttgcaagatctctagcaggggagattgcatagccctctcctgtcttgggagaaccaggttctcccacaagagcatcttactgctttttattctggctcttcctagcctaggaacaaggggctactgtcttctctagtcatactgcatgcacttgaacacggtgattcattcagcccttatccatctctggtgccaaatagctcaagccgtgtagattgttctccaagtctttctgctgccagtgaggagagcttgggagccaagagcttggatggagcagtagttctggggtgaacttttgtggttttttttttttttttttttgagacacggtctcgctctgttgctcaggctggagtgcagtggtgcgatcatggctcactgcagcctcgacctcccaggctgaagccatcctcccacctccgcctcccgagtagctgaggctacaggtgcacgtcatcatgcctggctaatttttgtatttgttgtagagacggggttttgccatgttgcccaggctggccttgaactcctgggctcaagtgatctgcccaacttcggcccccacaaagtgctgggactacaggcgtgagccactgcacccagcaggggttgaactttttaagccaattgcggaaacatgccctatcggccccagccccacctaactcttgctgaattctcctctcttcagacttgaaactccacatgtccttgagtgtcctggagagaccctgggacgtgccgttattcatggttagctctgttcagtgtcaccggttggttctttgatactcctcaccgatgcagagcaaaaaccccgctttggttataaaataacatcccatcaacagctgtgcaccgcggtccttggggttggagacccgtttggaggaggcggacggaagcatgtgccacaggcctcctgtttgtagctttcttcctgtctcaacatctgcctagtacacagctgctgctttgcttgggaatcgacttttcactgttgtgtgtcgggtacctaggaggcgcatcctgacgtgggtttatgcattttggaagtaattcacctttctgcacctcctcagctgatcataggcggcctggataaaatagacttgaacgactggaagtcgaacacgcggctgaagcactgtgtggccgacagcaacatcgtgcggtggttctggcaagcggtggagacgttcgatgaagaaaggagggccaggctcctgcagtttgtgactgggtccacgcgagtcccgctccaaggcttcaaggctttgcaaggtgactgacgtggaggcagggctattcgatgacgcgtctatgtgcgctgtgggcaggaagagctggaaggtggctgggatgtttttctgagatgtgtgctagaaaatggcataaggaatgttctccagtagctaatgctctgccctacagaggtggttacctggcaggggccgtgtgtgagcaggtgtggggccccgctgagcaaagactgtggagccactccagggcacctggattccccctcctcactgcttccaaaaagccaagagggtctggacagcaggggccttcagagtgtctgtgaggccagcttagccaagatcccggggagggagctatgggggaaccgcccccagtctcagtggctccaaagcttggagctgcacatgaacccgtttagccaccaaccacaccgaaagatgatgtcctgctcactctgtttaagccactgaggtcgccggaagtggggtggaattctgtgcgaaaggtgcccatctgcctgtagggcaggcggcctaatgtctcatcttttacacttagggtttggagggtacgttgctggaaggagtgaggtgagtgaagggtgtcaccatactgaaatttagctgattggactgtaaatgctgatagacacacagacacattgtaaacacagaatattccctctgcctcgctgagtaaaatgaggttaattccatttcagtcggctttggccatcagggcacctgcatcttttccattgtgacctctgcctatagatttgctgctgggggcccagcatggataaaaaggggtttgaggctgagccccgctcgtatctgggagcctctgtctgcctgaccatgacagctgctcccagagcttgctggtgcctgtcatttacaaagcctttctcattcagttctcccaacaaccccgagagcctggctgatggggattattagccccattccatggatgaggaagccgagactcactgaggtcatgggatttattatccccccgaggaaaaaaaacaggaggtgtgagtggggaggcagggcaggaatccaggcttcctgaccaagtcacttttctcatggcgccattgtcttgcccacagcaggtccacatgctaaaccttcctgcttagagatagtccctgtcattgtaagggtctcattagtcctccaataattggatagactttagcccagtgtcctccaagtgtctagaaggtgggtcagaggtgaccagggtcacagtcccgaacagggagtgctggtgctgtgggagggcactgaatggtggcccgggcagagtggccagggccctgcaggaggtctctgaaggccctcacctggcccagcctgtcctgactccccaggaggctggggcttggagggtgtggcctgtgagggggaggagccagcttcctgtcccaggaccccagaaaccaggggctgcacactgagaccctctgcccaacataaagatggtgtctctgctggtcctcattgctcccggagtcctgtcctgccactgaccttggcccagcttgaaaggagtatctgtgaatacacaggagcaaggggcagcagagccaaggcccgtgccctctgcgccctcctttcccagcacctggcacccctgtcagctagccgtctttgcagcagcagtggtggctgctggccagcctggtgctcacttggggctgagtttggaaacacctgagcaagaaggggcctggtgcctctccctgccctacagaactggtgggcaagtcgtctattccagagggtgggtacaaatagctctgaccctcagggagcctgtctggagcaggcccatggtcagggtgcactttagggggggccttagcagtccttgctctgccccctgcgatattctaaaatgttggcatcttggctgagtgtggtggctcacgcctgtaatcccagcactctgggaggccgaggcaggtggatcacctgaggtgatccaggagttccagaccagcctgggaaacatggcaaaaccccgtctctactaaaaatacaacaattagccaggcgtggtggcatgtacctgttatcccagctactcgggaggcaggagaattgcttgaacccggcagtcagatgttgcagtgagccgagactgccccactgcactccagcctgagcaacagagtgagaccctgtctcaaaaaagtgtctgaattttgtcactttgatagccattgcaggcatgtcctaaaaccaggcctgggaacctcatggccctctcacaggacagcctgcctgggtgtgggggtgggaatgtggtcagggccctgctcctgggggctgtgtggccgggaagcgccacggctgtaactctgaagtacattaactagaatgttgtcttgtaaggttctacaggcgcggcagggccccggctgttcaccatccacctgatagacgcgaacacagacaaccttccgaaggcccatacctggtaagcaccgcggccaggaagtcacggcgtcctgggagccccagaggatgctgacgttcacgttttttttttgttgtttttttttgagatggagtctctgccaaaatatttttgtcatcatcagaactcaaaagccacagcacctgagacagaaggagaaattctagagttgaatgacaattctgaagccctcaagcaagagactttccccccgacattacgacactgtatagagcggctttactggccatgtaaaaaaatacctgtaagagggccaacattattgctaaacttaacatacatctttcttacagtatatataacctaaaatttaaatatagattttctcttgatttagttttttgtttttgagacagtcttgctttgtcactcaggatggagtgcagtggcacgatctcggctcactgcaacctctgcctcctgggttcaagcaattctcatgcctcagcctcctgagtagctgggactacaggygcacgccaccacacttggctaatttttgtatttttagtagagatggggttttgccatgttggccaggctagtctggaactcctggcctcaggtgatctgcccacctcggcctcccaaagtgctgagattacaggcgtgagccaccaagcccggcctcatgttattttttaaagctgttttccgatttgtaggactctgtttcatttatgccaattctcaatgactggcagtagtgcttgtgtcagatgggacaagtactttgcagcgtcccacacaaaggttgtcagagtctcttatgaaactaattttgttatgagccatgtaattaattaatattggtgtttcagtggagtgtggctaccactccagcaggctcaagtcttcctctctgccaggtcttatgtacacacacctgttggtaaggaaaattgtatagtttttagtttggatgtattgggcttcactttatctgacatttctgggtccccatcttcttggaatcctgcttatgacacacgtaccttgtctattgcaaatgttttcttcctaaattttaacttaaaaacgagtctccatagtagattatttcctgtatggtttacaaatacaatcacttgcgtacactttgtcctggaaccatccattgagacgagtagccacatttccttgggggaaccagttctagatgctgctgagatgccccgtgagatgatggaaggttcctgtcttggaacccaaggatgcggggtcagatgctagctgtgacaccctctgacatgtgatttggggcaagtgacttcatattctaacttggttttccacacctgtgaaatggggtaatgcagctggtcctggaccatggtgggtgccaaggtcctgctccaagcatggctgtggcgtccattacgggaacgcaccatgttggctgcacaccctactcacaaggcttttgtcctttagtagtttagtgcttggagttagatggatgtggaaagtatgctctgaagctccagaaaaaagagtgcccgccctggaacccagctctgtagagacagaaaccatccttaattgcttaccctagaaagccagaagtcactgtacatcctctgggtcacaattttgtattttttggtttgctacgatagcttcttaaaggatgtctttttctttgcacaaatactggaaatgagcttccccctggaaatatcgagtcagaagttgaatattcatttcatcttttaaggatctgtcatcttgttagttttgagatctattttgtttttgcagggaattttccagactgccctgttttggtctcagatcaagtcccagaggaacagacagacacgcagtacatcgttagtggtgacgttgcctgacagccagtctaggttacaggggctgccaaagaggcattcccagtacagagaaagaatttctcccaaagacagacaaacagaaaacaagtggagagctttgtcctgatagaagcagtaaatagtaacttggttatgttttggttgtgaaggcccaagacttactttactgtgtgttgattgggcacagtggctcccagcacgttgagagggcaaggcaggaggttcacttgaggccaggagtttgagagcagcctgggcaacctagcgagacmctgtctctaccaaaaagcaaaaacaaattacaaatctttgtattagaagcagaaaaacacaggggacatggagaactcatcaccaaccctgccccaccccccattcctctcccctcccacatatacttctcactgcctgtccttggccttgaggttggtcctagggctggactgcccacacggtgactctcttttgtcctttttcagctttaaccggatcgacattccaccatatgagtcctatgagaagctctacgagaagctgctgacagccgtggaggagacctgcgggtttgctgtggagtgaaaagcaaccaaaggcaacagagtctagctcatggccaccagaccaaaagcatccagcttctgtgcacctcctgcaaagctggcagaggccctggaattccagatcacctgaggggaaagggttgtctctctcctttctgttgggggagggggatgggggacttttgttggtggctcccacccatatatccctcctttaccatagtactcccacccacttccatcacccatccaataaaatgcagccaggtttagcctttggctttggtcacacaggatattctgctgtgttgcaacccatgtggtgataaggctcacagccctgagctctttacgggagcatcaactcacagttaggggactgggcgtggctgattgagggtttggaactggtggctatgccagctattccatctcaaaacagccttgaggccccttttcaatttgagcagctgctagatatcttatcagagctcagattccagatttcacatcccagcagccggttctgggtagcagatcaatttccaactggaaaataactatataatgtatgcttattggaattctgccacagcaggaagcttgagtcaaaatgtgtttcccctttgaaaggagaaggaattggagcagcttttcctggaggcccaggatatttcttttctgggtatcttggctgaaaattttgttttacatagagaaaaacgatcttttaagggtcccttttgctgcattatctgtccagtttgacttttttttcagtgaaaacaccatgtcatggagtgtaggaaagagcagaccaaaatcagccctagagccaaccagtcagtcccaaagctgtgacctctgtgccactgttgtccatagaagagcatcgactgtgtcacttaaaatattagtaaaccatgatgcagcaactgctaagagctaaactaacaaaattgtgtcatcatagctgctggcttggtgtgaactcgcttaaaagcaatggtgaaaggataacctcgatgatgtaaatccacccaaagatactgttctacaaaaagtagggtgtggacgcaaacctgtgacagcagagggggacgacttcacactcactgcctcatgtggcccctttcccagtggcagctggtgacactaacgattgctactcggttcacttgcccagatgtcttcatatgatgagcaaggccagaagcaaggctagattcgaagtttctgacaccatttccagtttgcacaaaagtcagtattttatcttaaagtggcttgatttccaatagctgaacttgggcagaaaacagcaggccaatgttcctatgtggtttctttgttgttgtttttgtttggggtgggggcaagtacagggtaattcatgagcaagacatttcactgctgtcgaagtctctgggatcccgctgtgggtctgagatggcctgggaaggaccttgtggacaatggttttatctgttctttttgtcactgttaatttctgggctgctgaggttctagaatagaagggctgccaaatgaggtttgctgcaggaggaaagtttaatcccccattccaaaagtccaggccaaatggtgggcttagcctctttgaaaagttctgccttgcccccacaggtgggcacatcctgtgtctcattcaccatgatgcttcctgagggtgttctagaagcccgttccccagtggctgtatccagcctttccttgcatcatcttcctcttgaaggtgaggaagtgaaaactacagacctcccccggacagcccactctctatcacgagcctaacccgcgggaggcggaagagacatccattcgagaactgaagcggcctccgggatgaggtcagaggccccacctgattttcctggtggtggtatccaaaatcttcagtaactaggaaggaaaccagggtctcatggtttaaaagactttgaagcaggaatgttgcatttgacgcctttaaaactacctttttgctgttgggaggagtcgggggcgagccttagcagctgcaccgccatccccatgctggttggtgctgccctgcctctcgtgccgggtgttgcttcagcccagagccagagggctgggtcccgggtcctccacaggtgaccccggtggacacacgcgttcccatcctggcctccgtctctgcttttccacttctacctgcgtgtgggtttgccgccttgtcatcggttgtgtgagtgtcgcagacctttccagagctccggttcactctttccaaacaggcctccctgtcggtggcactgcactcctagaaccttcagtttctacgatggtttgtttggtccttttgaaccaccccaaagaactcaacatggcaaagcaaatggtaaaagcttcccgactgttctactttgggtccgcgcgaagcccactcacgtgtgatctgtgttgcccctctcggtggtcccaggcgatccagccatgccccctgcccctctgcccagatgcttcaggggcccggcttttcaggcttgccctcaccagcggccgtcagccgacactcagggatgtagctaacaccactccgccagtgctttcagtaggaagagctgaggctgcctgggaggcccggggcgaccggaaaagggctctctcaagttctgaaaagagaatctgccaccagatcgaatttcgacccctgagcttgttcggacgtatggtccaaattcagattaaggtggtcacccaacccgagatgtcaggaaaggccttctgcagagaaaatgtccccccacccgccatctgcagccaggtgtgtgccacacggcagccttcccgaaacatagtatggattttaaaaatgtgtttatttttgtttctcaaccactttataacgtattttttaatttattttgtaatgtcttgttttgaagtattgctgctatccttgttatccttcccactgtttttatcactgatttattttgtgaaagttgtacactaatgttctatgtcaaaatcaaaagtatttaatgaaatactagttctatttaatgtggttatggaaccagctggaaacacaaaacaaacagtgattgtacagcaggctgggcccaggaggtcaggttcattttgttacatatgcaataaactcacgactttacatttttggcgtctgttattttggtgtggaaatgagattctagtgtctttgcaaacccacaagaaaggaagtgtgtaggcagcaggaatactggcaagggccttccaaggaagaaggacagagataaggatagaattgtaagggaaactaatggcaatatggtagtgggctgaaagtgctctatcgggaaaaaacatgggattgagaaaatttagaatttctttgcgcaccggttatcttttcgttttttccttttttttttatttttttgagatggagttttgctcttgttgcccaggctggagtgcagtggcgcaatctcggctcactgcaacctccacctcccaggttcaagcaattctcctgcctcagcctcccgagtagctgggattacaggcttgcgccaccacgcccggctaattttgtatttttagtagagatggggtttctccatgttggtcaagctggtctcaaactcccaacctcaggtgatccgcccgcctcggcctcccaaagtgccgggattacaggcatgagctactgtgcccagcccttacttttttaaaaagttgtagtaaaaatactgtcagccctacataccagtgggttccacatatatggatccaactggggatcaaaaatatttttttggctgggtgcggtcaggagctggagaccagtcccagcttcttgggaggctgaggcatgagaattgcttgaacctgggaggtggagtttgcagtgagctgagatcacgctactgcactccagcctaggcaacacagcaagactgtctcaaaaaaaaaaaaaaaaaaaattttttttttaaatggatggttgcatcagaacatgaatagatttttttttcttttcattattccctaaaccatacagaataaaaactacttacatggcatttatattgtattagaaattataaacaatctagagatgatttaaagtatacaggaggatgactttttttttttttttaaaaaaaagagtctcactctgtcacccaggttagagtgcagtgacacaatcttggctcactgcaaccttcgcctcctgggttcaagcgattctcccgcctcagcctcccgagtagctgggactacaggaatgcgccaacatgcccggctaatttttgtattttcagtagagatgaggttttaccatgttgcccaggctggtctcaaactcctccacccacctccaccttccacagtgctgggattacaggcatgagccactgcacctggcattactgacatcttaacaaagttaagtcttccaatctatgaacatgggatgtcttttcaatttacttaagttttctttaacttctttatacaatattttgttttcggcagacaactggcaagtcttgcacctgcatggttagctttattcttttagatgctattataaacataattgctttcttaagctcttttgtggacattcattgctagtatatagaaacataactgcatttgtgtgtcaatcttgtaccctaaaactgcaaaaattcgtttcctggctctagtggctttcttgtgaattctttgcaattttctatctgtaggagatagctttaccttttccttccaacttggatgccttttattttttatctattagctctggcttatactttccagtacaatgttgaatagctgtggtaaaagtgggaatttttttcttgttcctgatctcagagggaatgtttataagtaaaatgcccttctgtatcagttgagatgtacatgtttttttccctgtgttctattaatgtgatgtgttacattgattgatttttcttatgttgggccacctttcccttcctgggataaattccacttggttgtggtgaataattcttttaatatggtcttggggccgggcgttgtggctcatgcctgtaaccccagcactttgggaggccgaggtgggtggatcacgaggtcaggagttcgagaccagcctggccaacacagtgaaaccttatctgtactaaaaatacaaaaattagcctggtatggtggcacacgactgtagtcccagctactcaggaggctaaggcaggagaatcgcttaaacctgggaggtggaggttgcagtgagccaagactgcggcactgtactccagcctgggtgacagatcaagactccgtctccaaaaaaaaaaaaatgctgttggattcaatttgctaatattttgttgaggatttttacatctatattcataacagatattggtctatagttttcttgtagtgtttttgtctggctttcaaaaatcaccgtaatgctagtctcatagaataagttaggaagcattctttccttttcaactatttggaagagtttgagaaagactggcattaattctgctttaaatgtttgctagaattcaccagtgaagccatctggtcttgagcttttctttgttgggacgttttagatttttgattcaatcttcttactagttatcagtctattcagattttgtttctttatgattcggtcttggtaggttgtagagttctaggaatccatttcatctaggttattcaatttgttggcatacagttgttcatgatactctacgatcctttatatttctgtaacattggtaataatgtcccctctttccttttagctgattcttccttcttaatcatctaaagttttgtcaatcttgttgatctttttgaagaaccaactcttagcttcactgatttttgtcatttgtcttttatttcctctgctatagtatttattttcttctgttagctttgggtttagtttgttctttttttcctaattc

SEQ ID NO: 97244 - DNA, 20153 bp, Homo sapiens
tagaacttaaagtattaaaaaaaaaaagaactgtgcaagaacaacaacaaaaaaaaacatagggcataagaggattaacctatcatgaggtctagggcacaacaaaataagaaaagaacagctatactgtgaactctcgattatttgggggtaatgtggagattataatagtaggaaatgctacctacatgggaggtgctatgaggcttggtataaaaatccaagcataaaaggaagttagaacagagcagatcttggaaaaatcttcatgaatgaactgagccctgagagcacaaagcaaacgtggaaaggtcaaggggaatgtattcgtgtggatgaaaagttgctggctctgaagtgcagcatttggcttagagatcagactgttagcctgagatcctgggtggacacagtctccaatgtccctccctcctcctctgcccctgcacaattactgtctatactcatctgtctcactgagaaggaaaagaaaagctggggagcccaatttgctccactttgggggaagtgaggaggtcaggggacaatagacttttccttcccctctagaggtttaccttctagtccaggtttgatgccaaatgttctgagcattctgggctagtcaccttcggctgcgactttgcaaccattcaaagaatgtaaggttctaaggcaggtcctatggaggcttttcaatttccctaggtcattgtgacttctcttttagtaatttctccccagagcccaggtcatagtaagacccagggaacagacccagagagacactcattgagacatgcatgtatctgtgcatttagaaaactgaacttggccttcttaagccttgttttgattcaattatcttcaacgatgcccatctgctgcattttgtttccttagcatggtcaagggagttcctcagtaacccctcactgtccacccttctaccccctcctccattattaccctagttgaacacattgtgacagctatccatcccctcaacaagcccaagcttccctgcccactgccactcccattcccgcatcgtcacattgctattagaatacttccactctttaaggcagtcttaatgtcactgcttaactagctatatgaccttagggcagttacttctctgtgcttccatttcaaaatagtaaaatggagataactgtgtgataattgaatgaatgaatacatacaaagagcacttagcatagtgcctggcatacagtacattctatgaaggttcttgtctttttctcacctacggctcccagcccatccaccctctgaacactcaggtgctatttggaatacaggtggtaactaaacatctccaaccaggatttactttattttgccctcagttattgtccccattttattgtctattagttttgaaaggaatgggtgtatagtactgagtttcttctctgctgttcctaatttacttattcagtgtgaagtcctcatgccaaaaggaacccttggcttttttttttttttaacagcagctttattgagatataattcacattccatacaatttattcatttaaagtacacaagtcaatagtttttaatatagttacaccacaatcaattttaggtccttttttcacctccaagttaagtctcatacccatttaaagtcactccctactttcccatcctcactagccctaagcaaccaccactaatctaccttccatcgctacagatttgcctgtttgggacatttcatataatccctggcttctttaagaggcataattcttctttaactcagcattcatctgtttcatcaaagtccccagccctaggaccaggcacatagtaggtacccaataaatgttctgttgaatgaaaaccaaagcagggggttgatcgagttaaatatatttttttcacatttcatctttagaccttattggtccaaagcaagatagagaagtaggtgaggaacaaaggcattgtgtttttctaaggtataccaaagctccattgagactccttaaaatgaaattctagtgcagtggttctcaaactggctgcaccttagagtcacgtggggaacaaaaaaatactgaggcctgagccctgccccactgcataccatatccaatgtactgatttatctgtgtggagccatggattatatcttttaaagtttccccagtgattctatgagcagccagggttcgttgggaactcttgttccaatggaaacaatcattcaaagcaagaataatttgttgaattccagccatgcccagcatgatacacagccaaagttttcaactctgtcttcagggaaatgaacctcaaaatttttaagaaagcaataaaaaacagaatattcatttcacaaaaattttctttatagccaacattactattacactgagccatataaaattgctgatatttgactgtttttgacctagaaaaatcaaaatttcatatcattcaacctaattgaatgcatttgtttcatgaaatgagatacatttaatattcaatctgaatcactatcttgttaatcacccattcaccttccttgtgcttcatgcatttttaaaaaagaatattttaaattttattaaatatatatctctaatacaggatggaaaataaattagccatcaaagggggacaaaaatcatggaaattcacaacagataaaacaaacagaaactttatagatgacctctacattttgccacacattatttctggaaagcacgtcataaagtagattgtcataaagcaagatgtattttcccataggaaaaatttcatgattagggattctgttcctgtctaggcctcacataaatcaaagatacgatcaacaacaggtcatgaaagcaaaactgcgacagccataaacctttataaaccttcggcggcactacaaacatttaaaataataaacttattattcaagcactataaaatgccaaaataatatccaatccattgatcattatactggcatttagaaaggcaactgagtactacccatcgaaattcaaaaagtgtacattctttgatccacttctagagatctttcctataggaaaactggtttggcttctttcctctcttccagaaccaagtgtaaatgcctcagtctagacccacggcccttcacagtaagtatcactactgagtgggcagtgccttgcaggggctctctagccacccactcttccaactccttatccaagtccccattccttccaccagcaagctgagggctgccctaggctctgaggacaatcctgttccctgtcaggaggaatttaaggagctttagttctctggtgcaggctccacaatgtctagtcaactgcatttctgctttcattcccatctcaggctgggaatttggcttccacctccttttgtgaccaaaactgctggtgtctcagtcctagtgagcctcgttgcttgccaggccctttcttcactccacctctgcccgcaaggggctgaattcctcccactgaatcccaccctgcagctggaaggaaccctgcttcctattgccacatttttctgatgccaaacacctttctggaaaataaatgtctcatgagtgagtgaacgaatttctagatttctacatactccattgctgtgtacaactgaatacccactgccacctcttgctgagtctcccagggagtgggtatttgggatgtatcagtgcatgattctagaacagcagttctcaaccagacgttattttatcacgaccacccacaccagggacatttggcaatgtgtggagacatttttgtttgtcacaactgagggcatgctacaggcatcttgtgcgttgaggccaatgatgctgctaaacattgtccagtgcacagggctgctcccacaactagctgaggttgagaaacactgttctagagaaatcaaaagcactttctgcagcactacaaaccaaatcaagctgaaaattaccaacagagaaggatgatgcttctgttttcagtaaaacacccttttcccattccaattttcaaaattcttgcttattacagaaaaactggaaaataaagaaaagcaaaagatcacctgtgataccactaccactgtgtagttttccatagttgtgatgtcatattacacaacatttataatctgcttttctacataatgtattaaccaagtttttctccatattactataaagttctttagacctcactttcaattctatgtgagattcctcctcatgatttcacaacagtgtaagtaaccattctcttattactattaatttgtttctgggttttcactattgtaaagctgttgtgatacacatatttgtgcataaaactttttctgcacatgaggttatttccttgacaacccttagaaaaggtctatccttggccaggcacggtggctcacagctgtaatcccagcactttgggaggccgaggcaggcggatcacgaggtcaggagatcgagaccatcctggctaacacggtgaaacctcgtctctactaaaaatacaaaaaattagctgggcgtggtggcaggtgcctgtagtcccagctagtcgggaggctgaggcaggagaatggcatgaacccaggaggtggaccttgcagtgagcagagatcgcaccactgcactccagcctgggcgacagagcgagactccatctcaaaaaaaaaaaaaaaaaaaaaaaaagaaaaaagaaaaaaaggaaagggtctatcctcctgatatcaatttgaaaggcaaacatgatttgccaaaggattctaacatcaaagcccatgtgaaatgttcctctgaaccccatctctgcactggtctaaaaacatacaacaaatctgcaacttcaagagtctttgtctgaggaacatcaaaggagccaggaaaaaaaaaaaaaacatcccagagctttctgaatagagaacattgcagtggatcatgagaacaagaataaaagttcttgtgatttttggcacagagagacaaaactgctatgtctttaatatggtagaatttgctggttgcagaggcaaaatattttatgtagaatacctttcttataagcctaatgccattttccatttattaaggaagtttagctttattgtatttaattttattttttggccatattttctcctttgagacagagtctcgctctgtcacccaggctggagtacagtggcacaatcttggctcactgcaacctctgcctcccaggttcaagcgattctcctgcctcagcctcccaagtagctggaactataggaacgtgccaccatgtatggcgaatttttgtatttttagtaaagatgaagtttcactatgttggccaggctggtctcgaactcctaacctcaagtgggtcacattttctttttatctcaggtatttatttagattttggggaatgcaataaatttgataaacatcttaacagctatttattgagataagtccagaacattttgaaacaaaaataggtcaaaaataatatttttttcattaacatctagatagtattcttatgttttagcagctgactacagtataactgcaaagcagaagttaaactcttaccttcatcctgctcccagattcacagggaaacctacaagtctgtataaatcaaagcaaaggccaatatatctagatacaaaaactcaaaagatggcaggaaatggtaaaaagaagttgggaatcagaggacctgggtttctgcttgtctatatcaactagcaagcctgcaccttaggacaagtcattgatatttctacatttcaattgcagaaaaggaagtctatcaaatatgaaacgacatatgtgaagtgctcttaagagacaaagttcttttttaaatgcagtaacatacaaagagggctgttactgggtatcactgtgtatgatgtattgtgctttgtgatgtcactgcaggtataatcaaggacagaaaatcagtattgatggggcaagccatgggactggaaggcagcaggcagatgtcagggttggggattactggctcagaagcaggtatcatagcagaagcccaagtctcttccaagtcacagggctaggaaccaagatatcagcaggggaagcagggggtggagggggtataaaaatgacccaactacaaccaccaatactaccatttactgaggcttcgccatgcagcaggcaccctgaaaagtgttttgtttgcattatcttagtcagtcctcctagcagcctgattagtagaagttgttacagaaacacagatgaaaccatgggttagaaagaggttgagtgctagagaatcttatggctgcaaaatgagtaagcagagacttcaaccactgtcttctgactcacagcccaagggaaagaccaggcaagagtaggrgtgaagtaagtagctcggtgacagcacagaacctgtgagccagggctcaggctgaggctcctggcctccctgactcttccttcaaaggcacacagtaggcaaggcacttggggcactggctgcaggggagctcccaccttgcttgtgatagggtggaatggggttgggaggccttaccaatggactgggatgttctttcagaaacaggagcagttcttgctgctgcacttgccttctctcacctcaccaagtcctcacctcactgaggtcagggctgagctacaaggctgtcagactctagcttgtgctatggaattgagagaagcaatggtggagccttggtccatgagtaaaatttcctcccgttggttagatccacagtccatccagcccacggcttgtctggaatagtggagtcaaacaactaatgcaatcgtttgtagactttaaaaaaaataaataaataacaacttttttttgtccctcacaaaggaaatctcatgtagaagcccagaactttcaagagataagaagtagagagattctggtttaaagagagatgacagaagccctgaatgtcctctcttctgctcccccagataccttcatggactacagggctgtacatacggttagactccttgacctcaatgtgaatgtctaaagactccaagcatcctaactccaattagaaatccagcagcaatgtattaccatgcagttgtctaaaaccttaaaaaaaaaagctatttaaattgtccatcttttcacacttttggttacagagtccactgtttactagccccatttggaagtactacttactacctttctcttgtcctaaactcactctgctgtaacttcatggggtatctttgtagttttacactagaactatttatgacttcagaaactttgctcacatcctcctcctgtcttccagacagaccattcctaatctgtttagtctgttctcactgggggattaaatgcaataatgtatgtaaagcaccaagcaaggggggtggcatgaaggaggagttcagcaacgtcttgcctttatcttcctttttctcatctccgtcatcatttaaaaggctcttctccagttttgctttcctttgtaactctttgttcctttcttaatcacactcactgctgtgccctaaataacggataccaaatggggtcatctttaacaacacagccaaatactgaggctacaaacatcaacccaattggcaccacataaagcgtcgccactgccagcaacagtcagaactcactcttctctaggtagcctccgagactccttgatgtgaatattgtatcaaagaaactactatggttttatataaccaaggaagcagaggggagaggggaaggagaaaagggtgttgggggggggaggggagggggagagagagagagagagagagagagagagagaaacaagagacaacacgagcaccagtcagttaacaaggaggatttgatattatggggcagcaggggaagaaaaaatacattcactgtgcaaaaagagaggcatagaggcatgacaagcagagaatatgagctcccagagaggagaggactggaacggttaagaaggaagcattcaattcccaaatttgtgtgcagaggaaaagggaatcatggcaaactgcaagacactatttgtgggaggataaattggcaaactgcaagacactatttgtgggaggacagcattttgggggccatttatcagtatctatcacagttttaagtgtgtataccccaagactcagcaatcacattttttaggaatctgaattacagaaatatttagcattacacacatagatatataaagatgctcactccagcattgttcctaagggaaaaatcttgggaataactgaagtgttcatcaacagggactgaaaaaataaattatggtgtgtatccatacaagagtatactaggcaacaatgaaaaataatgtggctgtgatatatgtaagagatatgtgtaggaatatttatggaaatatctcaaaaatatagtaaatttaaaaggcatgttgtagtatgtataattttggttttaaaattatgtaaatatactagttaacataagaaaagcatctggaagaatacatattatctaaattctttttgaagtgggtgaaaaattgttactttttatgtacttccagactgttgaagtttataactaaaaataaaccaataggaaagctagccatgccatagtggctacatgcatgggatgtgaagccacacttcctgagtttgaatcccagctctgcctcatcttaaaagtgtgatcatagagaggtaacttaacttgtggctcaattgccttatttgtaaaatggtaataatgatagtaccaaccttataggtttgttgtgtgaattaaacgagttaacactcataaaaaggtgaaaaaaggcttggcataaacactcaataagttgagtatttattggtaaacaataaatttttaccttaaaaaagagctatttggttgtttaattagcagaggacagaagggaggaagcgagcaaaatgggaaaagattaatgccagatgataaagggccttgactaccaagctaagaaatggagattaatttctttagtaggaaatgaggagcctttcattcattcaacacatatttattgagtgctttcagtgtgccaacatcattctaaatgattgggatacatgagtgggagtgagtgaagtggacaatggcagcattttagaaaaggattaaggtaatcaacactactttttgagaacaatgggtctgtgccttaaaagtgttttgtgtgtgtgtgtgtgtttaggggagatgatcaggacgatggggaggcgctatcagtcaatgtattgtttgggtgagtggtgataagtgcctaatacacaaagcgagtacaggcctgaagcctgaagagatatctctggtctgagataactgacaggtgatccctggtgtctgggtgttgactgagactggaggggtcaggtggggagctgtggtgggcaggaacaccagcttttcagagtttacctcaacactgtccaactcagttggcctagagtcaggcaacctggttttaagcccatgttcmccacctttgattggaggaacccaggcaaactgcacttctctgggcctcagaatccttctataaaatgaaagggtctcctctgattatttccaaggccctccatcagctcaaacatgctatcaytttcatggcatcacaaagaggcgaatgaatggggcttccttcctcatttccaactgattatattccagactcaaaagagaaacgaataaataaaacataggattcagatgtgcaggataatatatgagaagactgtttacatttgcttcctttttgagaaagcgcatgttgaattttaagccaaatgtatgtgtcaaggtttgaaaataggttactcagataatttcattccatatgtgcagctgctgttctaaagtataaaccacactcgtctagtaaaaccatcatctgttctataaggaatatgaacattcatctggcccttatttttagagtgagaggtcaaatgcacaagaggtgaactgtacttgagtccaccgtgccagatgcagatgggggactgaaggccaaatataaatcgtaatatctgaatttgtgggtatttcaattagatggcttagaagatcaaaagaaataaatcctggaatatcaaagtggcaaacagaagccgcaaaaggccatcattcatttggttcattcattcaacaaatcactctcacaaaatcaatcatcaaaataaacaggctctgactcatttcccattgcttattgtagttaggtttctttttctccccagggtcatgggatacatgaacttcaggcttaatctctgtgtgagaaaaacagcatgaagataatcaactctatgtcagaagaaattggcaacactactaaccacgagtaatgcacaccgaaggcaagctacctgagccctgatcccccacctgccactctagcgatgtgattttgggccagttaattagctcctttctgcctcactttccccttcatagggttgtgaagaggacgttactatttgtacactgttttgagcagtgcctgctgtacagtaaggaccatatatgtgtttataaaataaatcttagttgctataggcaacaccacgcagctgagrgtggccgcacattgactctcttaaagaacacttcctctcttgctcatcctactcagctcataaaagttccagggaaaatcatacattggacaagacaaggatcagctgttcttcatttttacttaggaaggctaagaggaatttacactgaaaaacctcctgcaaggatggctgaaatcaaaatgacatttctctttaaaaaggagatagtttgttggtagacccgaaatgagaatgtcctggcctggtgcctactagccttgaagtctgtaatttcaaatgactttgcttgagttattcgaacccattttattcttagctgttttggtgtgtgagttgcactgtgtgtgcatgtgcatgcacacacaccgtgtgggtaaggatagaaggaggcaagatgcttgagtttgcttcattttagctcaacacttagaattgcctacagcaaatttctttcttccttttttttattatactttaagttctggggtacatgtgcagaacatgcagttttcttacataggtacacacgtgccatggtggtttgtacagcaaatttcttgagcctcaattactgaaactgaaacatagcactgatgttaatctaaaagaagagaaggatcttgacaaatggtcttttgcgtgctttttttctggatcaagaactattattcaaagtggctgggataatctgtttttacaatgattgctctcttgaaggccagagggctgctgccactcccctggcttagatgctttctcagggtgtctggtagcatcagtaattaacagcacaaacactggagtcaggcccaaggttcaagccctagctttgccatttatcttgtaaaaataagcctcagtttgcctatctgtaaaatggtgataatgacagtaacagtatctgtcttatcaggtggttgtgaggaataagtggaagactcagaaactcagcatgacacctgacagtcagcgcctaataaacagtagattcatagtaacagctgttcttgtccccaggtgccccagtgaaatttttggtatatctatctttagattgtgatgggcagtttattagttagtttttatattggcttttaaaatctccagcaagaactcttttaaaacatgccatctgcctcctccactgtttttcttctttgtatttttaaaaaatttcaaaacaaaccaaactattttaaactatgcctgagtggttacctattattcatcagaagagattccagggctttttgtagacggatttcacattgggatgctttggtcaaagagccgcctgtcccattctgtcttcctgctggatagcccctgggaatgggtgggcttctcataagacccgtcgtggcaccaggatgaggagatgggagtgcagcccagggctggggtgtggaggatgcagacaggatagccatgggagaggcgctggcatgagttctggcctaggcctctctgataaccagctgtgtgaccttggtcaggtcactcaaacacactggaatgtattgtcttcacgtgtgacatgagttgcctagcaatgggcaaagccaagaagacaatccacccaggaggcagatggcagacacattgttcaccttcactagttatcaacaaaatgcaaaaggggacaaaggtatcattttaatatttattaaagtaaaaactgaaaaacaataatactcaatgttgcttatgttttacattaccatgagcacagcattggtgcaactgcttgggattggaaaacacaacttagactatgtctctctcgtgaaagagaaattggtacacttgggtgtggttcctcatctctgcaattcactagtttgaaggctcaatgtttctgaagctcactggaatatggggcaaaatggggattaaaaacaatgccccctagacaggttgttgtgaggtctgtgaataatgtagataatgggcatagcctaatgcttggcatagaacagatgcttattgttgctactgatgtgacaatgctgatgcctgattcaatgcatctggctcatgttataatgccaaggagaaaaaacccatttgcccccctttctcagattccctgtcagaatctcacttctcaataggctgagcagagacctgcccatctgcagccccactcatccgagtggttctgacccatagcccctgtggtccccaggcaactctgggtacatgtcctgggtacatgtctcctatcacatgcccaccaccgcacaagagatgccagttctgcccagcccaggtggcattcactcagctctacaaatggccttccgggccagaccccttcagcgcctccacacagagcagggggcaacatccttcccgtgcccacaacctctgcctccaaaggcaagccagcccctccaaagagctcaggctctctgactcactcctgctgccaccatcactccggcacatcttcctgtgccagccactggccctgtatttaccgagtagctcaccccatggacaggaggtcacctgtgtcacttgttttcaaatgcccacttgcttctcaggggggttttctcctcttcctcacgtctctcctttgattcatttcttgtttgttggtaactcaagcccagtgtagactagaattgccataaattctttatctactcaatatcaaagatgtctcttcttaaatgcttctttgaattatttctcaataccaggttctgtctctgtttccattttgcaacctaataaggactgaaatctgttttcagtattactttatttttttttcctcagctttaaaaatattttcagagagccaaagagctgaggaactgaaaggacttcattaagtcctcatttcattcatgagaacaccgaagccccgaggggtgagccatgtgctgtgcacacaggggtgaggtgcgcaggtgaggctaggaagtacccttctagcgccttgctgtctcatgccccatttcctcataagcctcacgctgcctcggcagggcttctgacaaacaatgaccatatttcctctgtggagagctctgaggggcctgtggatctgcagaaatagctccccacaggggtcccaaatccatcatggactcactcctctctctcacttctaggcttctgtaaatgctgttccctctttgtggtaactacagctaagtcacactccatctctaaatgcttcctggaggaagccccatctgagcctccaattccagacagggaaccctcccctgtggcccctgcagaaacttgtatgccctccggagctggtattgctcaccagtcttccaacaggccattcctgttgcatccatcttccatagtggtctgcatacagtatgaggaagagcagacacaattaactcacaccaaagtgttagtgacttgaaaatctctcttatctgcaggaggacccggggaagaaccaagagaagacaagaactgaagttcttccattcccacctctgcatcaccttccctgctttctctttccccagaagagactcagtcaacatcccaaagaccaatgatttcattgttttacaccaaatatccctcctctaaatttttcaagaaattgggaataaacttcttacgcaagaaaatttggggagcaaaagcaagtaaccagcctagatgagcacatccaacctctctcctcttgattctcacatgtattacccagggtcctgtttctgcagaaaggagggaacccttgagaacattttcactatgtcactttagcagcctaactctgtggtacccctgatttagggagggtgagggggtggtgaagactgcaaccccaatagaagcagggaaggtgacatagaggtgagaatggaaggacttcagttcttggcttctcttggtttctgccctgggtctttctggcactatctttccctaaagtatttcatctaattcctcaaacatccctggatagcctatatcataaagtcctttatgatctctgttttacctggaaagaaagtgagatgcaaagaagtttagtaacttgctgagaccacagaaccagacagaggttgtgctgagacccacccagagcaccaggctcttcatcacaacctctttttgtaatttcccacacagtcttcttaatggcatcaggggtgcacatgtgtgttctccctgaccattaaaccctcactggcattaactggacaaataggaagtttaaagagggtatttaacaccccattcatctagtctccctgcctgagctgctcccccatcctagaatgtgcttttatctcctgtgataaccaaagacccactggatcctccctgccccctctctcaccataagggcctcaatgcaagttaatgtctccattttccacattcctattatgtttatagatggttctgtacaatttcatgttttacagacttgttcaaccattgatataataacaaccatgaaaacaaatacttttgagcatttgttatctgttgagtaggttttgtcttaatttccatgataattccataaagttgatatgatagctccctccttataaacaagaatactgaaccttgacatatgtgttcgagagaaataatatatcttggcagtttaaagtttgagctttgactttgtctgggtttaaatcctaattcactaagtaggtaaatgtatgcaaactgcttctctaagcctcagttttgtgatctgtaaaacagggttgctgagaggcctaaaatgaggtaatgtgtatgaagtactgagcacaggactggcatggagtaaagtgcccattgactgcaggcacttaatatcagaaggaagcagggtttaaagtctaactccagggcccatgatgcctgcttttcatataatcctgaagtaggcagagtttttcctcgctattttaaagaagaggaattaggttcagaaatataaagtgacttgttcaccaacacccagctgttaagagtcaaggttggggtttgagccaagtgtagctttacttgacttcccaacactgagctgcctatgttaatctgttagtttcatgcaatcttctttcttccaaattcgtgataagctccttggagccaagcaaaggcacttccactttgcctgcatttcccagatggcctggcacagcctcacacgtgctgtgctctcaatatacctctagtaaagaaaatccttgctgcccttgcacagcctggcactcagctccctagaaccacgaggagtatcagctatggaggactgagaatcctaaaacagaaggaatacaagataggtcattgcagaattacctaacaattttatgcctgttgtattcgtaagaagtaagcctcaaacagtaactcaaggtgttccaaagaaagctgaatgtcgtacaggtccatagccacagattcttcagtaagtaaagagtgtatataaagagagaataaaaagagataatctattagagatgaaaagattcacaagacatatcagtcaaatgtaatatttggacctcatctgattcctgttccaaaaaccaaatattaaaagccattttaaagacaatcagggaagtctgaatataggcttgtcattaaatcataattcggaaatatttatttaggtatgataatattgcagttctcttttttatgaagtctctatttattaaaaatatactaagaagtatttatgcatgaagtgatataaaatctaggatttaaatactccagcaaggtagaggggaaatactcctgaggggagattgataaaacaatattggcaatgtttataaatgttgaagctaggtgatgggtaaagagggggtcattatactattctctgtatttctgtgtttgtttaaaattttacacagtaagtttttgttaaaaaaggaaggaatggtgaatccccagcaatcttccattttgttctgcaactacttgtcttccacgagagttcagtctccttgacgacatgaaaagtcattctcttcctaagggtcctaaatgtacttatccaagtgagggctaagcagctgttgtgaggacagctcacctggaccattctccagtcccttccaaatcaggctacttcagactgaccttgtcactttccccaaatatccacactgtctccataatctcatctctgtcgcctgtccactgctgtaggtcagaaacctcagcaccacctttgtctctttcctctccttcaacccctaggccaggcagccaatgctactttggagcatgactcagatgacacatttcctctccattctgactgccccagctctggctaaaggctcagcaccacatacttggacgatggcagcaggctcctgctgggttcccttattttgacatttttcctttctgtgcaaatagctgaactttccaaaatactagaccaccaagcttaatgcttttacttggaatcacccattttgaaacccatttgttacatccctgtctcaaataggcctctcaggagttctcatggttaagctccgccttactacctttcatagctcactggataccttccttaatcatttcagaataagtctggtcacagctagactggaagctcaaagggaaggaggcttgtctgtctactctacatcctggcacttagcatcatgcttggcacactgttgtgggtgcacagtaaatattggttggataaaggaatagatttattaatgaataaattctgtgaaaaaaatcattttttcccccttgatgtgtgcctgtgtggtgctttcttcagcacaggtcctaatcttttcaacacagcatacctccagtgcatgatgaccaaatctttaagagcctctggagggagacataatctccctacaaagataattttcaagtaaaatctaaataaaagatattctagggtttcccttctcccatacacacagtgtaaacaaacctctatttataggtcaagtagccttagctttagctctgactacacatgaacttggtctacccatccatgtctctggtcctcagtttcatcatcagttaaaggagaggggtagttgggtaatcagtgtgatcctttcagttataaacttcttggtactttctttcatagaagccacaataccttgtgcccaaaatgtcattattacctaagtatagaaagtttccctttattacaattccaattgctagcctcatgaggaagtcagactcgctgatatgaatgtttctctctagaactcaccttcttatggagtcaccttcatccctctgctcagcaaacatgtctctcctataagcaaattcaataaggaatttttcccctttattgttgacacagtatctctttacgatggtaagttgtgcatcttttcagcctgtcttcataaccatcatgtgatttcgtgcccagggcaatcagttgagacaatcaggtagggtttatggttggtgatatggtttggttgtgtccccactcaaatctggggatttaatttctataatccccacatgtcttgggagggacctggtgggaggtaattgaatcacgggggcagtcaccttcatgctgttctcatgatagtgagtgatttctcacgagatctgatggttttataaagggcttttccccctttttcttggtacttctccttgctgcgaccaggtgaaggacatgtttgcttcctcttctgctatgattaagtttcatgaggcctccccagcccttcagaaccgtgagtcaattaaatctctttcctttataaattacccagtcttcagtatgtctttattagcagggtgagaatggactaatacagctggtttatcattttgcaaaacaatctgttagataagcaacagatttatttgttgcttcgtcttgagtgtgttagcaagtggaaggtagaggtacctagtctccatattttctaaatcctggttctggaatctttaacatcattccatactgccctaggaacaggcagtgggacagctgtgagggtaaggagaactggggtccttgcttttgaagccatctcagcaatctgggaatgggcaatgaagtcacggcccaaataaggatgtatgtagatcacaagaagcccccaataacagctgaagatgacagcctccctcaactccagatctgccttgtagcctgaagacccctgatgatattgtcctaatggcctgggagctgggccacaaaaaggcccactggcctggatagttcctccaaacacagaagtagaaggaacatgggcttcagggtctgacaaagggctcaaatcccacctgtaccccttaatagctgtataaaatcaggcctggtcctcatctgtaaagtgaggaagacaccacccattaagggttttctgggagtattaagggaaatagcttacttgaagtggctagtatggtgctaggctttaattttcttttcccctaccttttagtgcctctctctcctctcccatgcggccctgtggctggtgacacacagcaagtgctgaatgtcaatcattgttattaagaaatttccagcctgggaaacataatgaaacctcatttctacaaaaattacaaaaattagccaggtgcagtggtgcatgcctgtagtccctgctactcaggaggctgaggtgagaggatcgcttgaacctgggaggtggaggttacagtgagccaagattgtgccactgcactccagcctgggtgacagagagagatcctgtctcaaaaccgaaaccaaagcaaaacaattgaaagaaagaaagaaagaaagaaagaaattgaaaggcccctgagggacaaggggatcaaggagccaataggaaaaggcatgctgcagaggggatcctacgatgtgaagacacaaagtgcatctttcttgaatgtgcctgtcattgcatgagtcccgaggctgacccagtatgtggccaacgggtctttgctggcagaaatacagaccagtctctctctagaaaggagccagctataaagaaaatagagggaaaagggaggtattttaaggatgattacaatgtattctttgctaaacagttgccaaaatggtctgcagttaccagcagttggaaacagtttgtggagtagccatgtaagaaaagaagtttttttgctaataagtttttaatcttggtcaaatgaacttagatttagctaatcaaaaataggcattggagttgaaaggggcagttaatttagtgagaattctacttctatggaattagatatcgatttcctccccttttgcacccgagaccactaagcctaaggatctctaaaccagcatcactcctcatctagtggcagctacgtgcatgagcacagcctctgaaagcatgctgtcagatgccgggtgtgaaactctggcacttgggattgataaggctggcaccaaaaggagcgtccaccactggtaagagtagttacccatgactgacccagggtttcc

SEQ ID NO: 97245 - DNA, 23374 bp, Homo sapiens
ggtgaaaccccgtcataacaaaaataaataaataaataaataaatacagaaaaactattataagtatggcaggaaaacttgaatacttttatatgataaagcatgcacataagttgattaaaaacatcaaatccaaataagtattataataaacaggaaaaggatgtaaaaagtatacaaaagaagtatatcgtgaaaaatgtcaaatttactgtaattaagaaatacaaactaaaacaatctaaaaattgataaaattatttaaaaacaaaaacaccaaagctgtcagggatgccacaaaacaggaactgcttttgagagcatgaagggcccaacctttgggaatgcaacctggcaacagtaatcaagaactttaaaaaacattaacaagtttcaatctagtaagtctatttctgggatcctgtcctcagagtgcaatcctacatatggaaaaaacttcctgcacaaagacatttattggaaatggaaacatcctcaatattcaataacaggagaactgttaaataaactatgtgactataaaaattacgctaacaaagaccacgctataaaatggaaaatacatgtgcttcactgctacagtaaaaccaggctttaaaactgcatatatagcctaatgatcatggtgccatctcataacttttcaaggtcctattcaagtgaatgccaaatgagagaaacaacccaggcatagtaaaaaaaaaaaaaaaaaactgccaggaaatggcaccaaaatattacaagtgattgtttttcttccctactgtaatctatagtatcatgttttctttaatgggcatgtgctatgttacttgtatcctcacggacataaagcaatgctttacatccttcctatgaatcaaaaggaaacacttcttttttttttttttttttgcttctttttaaatttttttaaaccaagcagtggttatggaaggaaacacctctttgtgtaacagggcatgtactgccactgtcggtctctaaagtcactttgatgatctaacaaaaacagcatgtttcatacatgttagacaacctctactctggatttttttctccaacaacttattttctcttcacaaccccctcaagttttcaagcctaaagaaattccatcggttctctctgcacccactttccttgctttgctcctagaattattcccacctttcttctgcagagcgtagacaatgcctcaggcacactgttgccagtctcagagccctgagtccctgctacctctagctccctgggactccaacacccagcacaagattctgcaggcagccacacattctgctccagtacttctcaagttgaaggcagagaataagggaagtttagggaagcttggagccatggagaaaaggtggagacatgcaggaaatctaacacaaggcctttttgtgtaacagtagtttttgtgtgctgaagattccagtttctaggatttggcaaattgggagcctcaatttcctgttctagggcatatatttgctgaatgaataaatgaattaggcttcccatcatcctgcaatgacacctgaccagtgactagaagtggcagcttggtgagggagtagagggtgggaagagcttggtcatttagtaccaaaataagccctgagactaaggcatgcgatgaccctgccacattgccagtcaaagtgtggtctgtggaggggcagcattatcatcgcctgggaacttgttagaaatgtagacctacttcagagctattggatcagaatctgcatttttaacaagttctctaatgatacatactcatgctaaagtttgagaagcactgcttcagaacatatgcacacacacaccaaaatcaccaagacaaacaagtgactccactcttgcacacttcaccaaaccatcaagacatttagtgattcttcaccacaggggctgcccttgattttggccttcctccgaagtacttaaaagaatagactctatggctgggcgcggtggctcacgcctgtaatcccagcactctgggaggccgagacgggcggatcatgaggtcaggagatcgagaccatcctggctaacacagtgaaaccccgtctctactaaaaattacaaaaaattagccgggtgtagtggcaggcgcctgtagtcccagctactcgggaggctgaggcaggagaatggcgtgaacctgggaggcggagcttgcagtgagctgagatcgcgccactgcactccagcctgggcgacaaagcgagactccgtctcaaaaaaaaaaaaaaaaaaaaaaaaaaaaaaaaaagaataaactctatgtaatttactccaggcctcaccttcactctacacagatggagcccatcacctctggacagtagttggtgcgattaaacactagtgcccttcagcaccattaccagttataaagagcggagaaacaaccaaaaagacaacacaagagggaaagcactctcaaaatgcaatttgaccaagtaaaggcaataccaatcacaatgatttataaaaactgtttaccagatgtatgttattaccccgcagtgcaatcatgattaaggaaatcatttaatgtgcagctgattgctttgtaaaggcttatttgattacacgacccatagtgaaggataaactctgtacttctgccttcaaatctccaagatggacatgtaagtaggttgactgctcagagcttgggaaaaaagggggctttttactcttaaatctacactatagttaaggtaaaagagagaaaagatcttcaagcactgctgggagggtgaaggggcttgccatgggcaccagattctactcatctttctagatccaactgaagtgtcctatcctttgagaagtttctccagaagccatcgctccctattctgcttctcatggcactttctcttgtattattattttttatttttattttgttagagacaaagtctcatcatgttgcccaggctggagtgcagtggttattcacaggtgcaaatatagcacattacagcctcaaactcctgggcccaagctatcctcctgcctcaacctcctgagtagctggaactacaagcgtgcaccactgtgtcatggcactttgtttagacttacattacagctcttgaggaggtagaacgtatccattaggatcccagactttgcagcctaaccacatcagtcaaaatttcccctctgcctattattagctgtgtggccttaaccaaatgacctccttccacagctggaagatgcagaaaccaatatcatggaatttttgtaaagattacatgagacaacacacattacaatgtttggcacataataaatgatcaatgttagctattattattagcacttcccagctattattattaggcttccccactagaccgtgagcaaactgtttatccaaggatctgtgtggcatgggaacttacaaatggtagacacacaataatatttgtcaaaatggtttgaaggtatgccaggaagaggaaagggagggtgctggaaaaaaccatagcgtactttatgatttttcccagggccaacttctgtagtgtttgtttttatttcattaccagagtacattatctcagacagcaaggttgctataaagtagggctagaaagacactatttatggaaccagatgttctgttcagagaaagcaaagttggctatgaggcatctgaaatctccagtttggcccttggctgagcagggagtaggggctgaagttcagccagagcttcacttgcccaacagggtgccctggcatggggttacattagctctgaaaatcatccacccagagggatgcattttgtttttcagtgtatccacatagagggacgtctttacagattgtgccaaagatctatatgtaccagtggggaaccctactgcaaactcaaaggtccccttttaaacaagcctcttgaaggtctcaaatgagcatcagctaaaataataatacttcacttactaaatatttattgagttcccattagggaactcaaggtgctaatggctgacaaggaccttttggacttgcacaagagcctggtgtgtaccaccttctaaggaaagcttgggatgttctctgagaggaacaccaaattcaagaacctgtcccaggggctgatgaatgtggctgcgaagctgacccacaataagtacgtcagaggacctcacagacctcatggagaaggtcattgaaacctgacaccttaaccattggttgctgaatgacatgtgctcttcctgaatcagtactcagcatatgtccacttcctgcgtggcttctggccctctatgactgctatatggtcatcctctgtggctacctcctgtacccctatcatgactgaggcccctctcccaccactctgcccacactgatgagaaagttgccacaagtttagagactaaaaataaaattgcactagacactgcagatctaaaggtgaatacagaaaatataattggaagggagagaaggtgatgcagagggcaggagcatggacaagtatgatgagtgccaccttaggcataactgatgaggtactatagaagcatccaagatgggggctaatctagacttgaaggattagagaaggcttaaaggggaataacacccaatatgaggcttcaagcagtgatagcaaatgttaatatttatttagcaatactatatatcaggccctgttctaaaaactttgcatgaatccctcattcagtccttaccacaaccctgtaagatagatgttactgttattctcttcatgttacagatgatgaaactaaggcacacagtaaatggtggagctgaaattcaaacccaggcagctcggctccagactaaaggggaagcagagtaccagataggcccttaaaacagaagaaagtgcctagcttcagtctgaggaaagatgcagttcctttggggaactgaaagcaactcaatgaggcgcagcttggggtggggacagacgttcagagatgactgggtctgctctgtaggttggaagaaaaaccagaagcagagggtttcagatccagtccaaatcttttttttttttttttttttttttttttgagacagtgtctcactctcgcccaggctggagtgcagtggtgcaacctcagctcactgcaacctctgcctcccgggttcaggtgattctcctacctcagccttccaagtggctgggactacaggcgcacaccaccacacccagctaatttttgtatttttagtagagacagggtttcatcatgttggccaggccggtctcgaactcctgacctcaggtgatccgcccacctcggcctcccaaagtgctgggattacaggtgcgagccaccacatccagccccccagtccagacttttgacaactagctgtgactggtgtcaccaaactaaccccttctgacctcagtttctcctttttgcaaaagaccataataacaatacctgcttctcatagagaatggccatgagcaccaaatgaggaaaatgtatgtgaacttgagtgcaaagtacaaattccttcacagacttaagattttaccagtatcacttccccagtagcttcaaggatttgcaaacctgaaatccacaatgtcagggcaccagaaaaagcagagaaacagtattggggagtggaaaagcccaccagccctgcctcagaccacctccatccacactcagcccttactaactatgagatctcaaggcaagttatcctctcagtacctcaattatgccatctggaaaatgggaatgtcaatgatagcacttgtaaggttcatgtgacaagtaagtagcacatgtaatatgctaggtatagctcccaacacagaataaagacttagtcaacattaacagctatcattattgtaagtattaagaaatatgttggctactcatgctattcttccatgttctatacggtataagcatgtgggaatgttagaagttagagatgataaagaaggaggagaaggaggtttacaaccctatactccctcactgctgcagagattcttcctggctctcacacgctggcaagcagctggctctccgtcytggcagaaaatgcccaaaagaggtaaaagatagagactgcacaccatctgtgcaaaccaggctgctcttgtagtttttagacaaaatctaaatgtagtcagatgtgacctgcccttttaagatagaattattctatttcctccctctacccgtccccgtcccccactctgtcccccacataaaactcccccacatatctcaagaaactttcagcattttgaaagacatactctggggtcctgttgtgacagccttgtgccacattaacttctctgtcttgttcccagcaaagaagcctttgctaatttcacaacaggaaagcatgcaagaaattcgagaacaaaacaaatctacacgcagagcccagcatcttcaagcaaacaccctgaggtacagacccgaggctagatgagtccggactgcagatgaggcagctgcctcttaaactgcaaggggactgaaaaagtcatttgcctctaaaaaaaccaactctgaatacaaattgataatgaatattcatgagcccctccagcttgctctagagccacccttgactgcaaccctggactctgcttcctaaaaagtttcccaaagctctttctctgcctcctctcagaaggaagagggtgggaaagttcattcagggctttttgcctccagctttcaagtacttgctttttggtctgggcttttatttttccttctattttttttttcttaaggattcagatcaaatcaattttggtcttaccctttgtatcttccataagtagcagcttttgttttcctcctctttcctcgtctttccccccyccagcctctgcttgctgtggtccgtctccgtgagagaggtcctcaaggaaacagagatataacagacccttgggctcgtgggaggggctaaattagccggccccgtttcggaaggaacctcaaaccctgtctttttcattgactagaaaggacagattgactgaggagtccagcagctcattttcctaaagttactcgaagccttttccaggttgtaattttttgcatccttgaagcaatgtatattcaaatctctctctctttctcccttcttccctctctcccttactccctccctcttcatctctctctccctctcttcgttatagaaatccctttttctcccttgaaaaagtcatctcrgctgcaagcaaaaaaagctattccttactgcaattatgaagctagataataagaaagttgttaccttgaaacccgctcgaaaaactgaaagtcaagaacagttcttccctccccataaagcctctggtcccatgaccagcaatcctttctcaaggctcattagagcaaagagcaacaggtgacccaagcgatgagtttcctgcaggagacgctgcgttattggttggaaggctgggtggaaccacagaggagctgctcaatgggaaccgctgcctggctatgaattgatgaaagtcatccaccatttcccaactttgacttcctacctttgaagtctaatgagcatgaattaccacatccagaccgtcaagattaccccaatgtagatgagagcctgaccaaattatttttaaactgtgtaacaaaattattttgaaatcaaaacaagggytaatcctttgaaaggaaggtaagtcctcaagtcccaaggcgacttggcagcttctccctccacaaggctgttgcaaaccttagcatttcaggtctgaaagatacctcagacattgagtctaaaagaggttagagatgtggagaggttaagccacctgctcatgctcacatacatggtctctcttatttgctaccatgttccccagcacctaatacagtttctctcacagcatgggctctcaataaatatttgatgaatggttgaaaaaaatgaatgaattgcagcaaagcagaaatgtagatctgttttcctgtttcctagttcttgatttttctacattgcttgtctggcatgtaaatttgtatctaaagccagttataccatataaatcattaaatttgtgagcccgaaggactgttttgactctatgtagaaactatattctccagcgagctttcagtcatactttaataaggacaaaggataaccttttagtttaggcatctctgttactttgcayggtgccacatggtatatactcaatacattttttatactttaataaatttggagctgtttaacaatactttatttctgaaatgctttatagttataggattttgcatgtatgataacaactaattacactgaatgaaagactcaatggatgtcttctcycgagtcagtttagactacatctctaataatgaatattggtctgatattcatcctgttatgataaaactggtttttggtgatatgatgggattttttgtaaaaaccaacaattggtttatgactgcctttgtactattgttttggagagaaatttgaaaagagcatgtccacaaaatagtgtgcgaattacagaatggaaaccaaaacatcaaagctagaaagagaaaagaatgatcaaagggaagatccagagtggctgaggggtaggcargagaaacagacaaacaagtacctgagcttgtcaatgagagacacactttggtgggtgctgtggcaacggttctctactttattacattaggatattaggttctttttttttttttttttttgagacaagagttttactcttgtctcccaggctggagtgcaatggagccatctcagcttactgcaccctctgcctcccgggttcaagtgattctcctgcctctgcctccaagtagctgggattacaggcgcccgccaccttgcccagctaatttgtgtatttttagtagagatggggtttcaccatgttggtcaggctggtctcgaactcctgacctcaggtgatccgcccgcctcagcctcccaaagtgctgggattacaggcgtgagccaccatgcctggcctattttactacgttcttacattcttttttttgagacagagcctcactctgtcatccaggctggagtgcagtggcgtgatcttggctcactgcaacctctgcctcccaggttcaagtgattcttgtgcctcagcctcccgcgtaactgggattatagatgcgcaccactaagcctggctaatttttgtatttttagtagagattgggtttcaccatgttgtccaggctggtctcaaactcctggcctcaagtgatccgcttgccttggcctcccaaagtgctaggattacaggtgtgagccacagtgcctagccacagttctctattttaaacaaaattaaaattcaaggtcacttcagtcatgttgtatcagacgttgtcgacaaaaggttactttgacaattgtctcattctctttacatktcatcagggagagaaagagttagtaaaaagtaaattgttctagtacccaacttctggtttaaccaggagaggtaaaatctcattatagtaactagcacttcataaatatttgaagttcatccaaactgaatatggagtaatagaaacatagttttaacccctaattcatattacatgagccttttgacaacatttaatgctttttatggtaatatgctctgtgctacaatttaatcacgttgtccaggttcgcaccctcctcagcatcatgaaaatactatggttaagtatatattatcaccaattcatacaagaataattataaaagagatgggagtttgtgtgtatctttctaaaggcctcagaatttatcttaaaaaataaatcgtctttctcaacaaaaaattatcatcaattttattgtttttttttgtaatagaaagtagaaaattaaaactgcactcagaaagatggaaggagttgtcagaaaggggtaaagatatttgtctgtcttttaatgatgaaatggtcttataaagttcttagaatggtagaattttcatttttcctacaccttcatcctctttcactgtaccggttcatccccctatgcatataaaatatttaagtgattctcattcttaaaaacaaattctgttgtttaatggtatgaattattagtgttgcaagatgaataaattcttgagattggcagcacaacaatgtgaatgtacttaaaaatacttaagtatactgttaaaaatgattaatatgggccaggtgcattggctcaccgtgtaaccccagcattttgggaggctgaagcagtaggttgtctggaggcctggagtttgagaccagcctaggcaacataacaagaccccatctctacaaaaataaaaataaattttaaatgattaatatggtaactttttttttgagacagagtttcgctcttattgcccaggctggagtgcaatgtcgcgatctcagcatctcggctcaccgcaacccctgcctcctgggtgcaagtgattctcctgcctcagcctcccgagtagctgggattacaggcatgcaccaccacacccagctaattttgtgtttttagtagagacagggtttctccatgttggtcaggcggctggtctcgaactcctgacctcaggtgatctgcccacctcggcctcccaaagtgctgggattacaggcgtgagacactgggcccagcaatatagtaacttttatgtctattttatcacaatttttaaaaaattaattaaaacaaaaacagctccttcacaaacaagctacttgagaccatggtctacctttgccttccttcatcacctccattctctcctcattcatttactcctccttccattgcattcccrtttctcaccgcaccaygccaatgaaactgccctaagattgccaatggcctgtaaagcaaagaccaatttttgtgttttatcttcttggatctatgtagcatgggccattgttggccttccttctttcttgaaaattgatctctccttattttccagaacccccctcatgtctgattttcctcctccatctgtgtatgatggctccttttcagtcaacttttgtgtcttgtaaatgttggtattccctagaccttcaccctttgccttctctccctacttcacttattctacctaggtcataacttcttatgcctttacatttctgccaagtccactcccatgagcaccagatccatatttccatccacctactgggtgtcaagagaatatcccacaagcagctcaaacttagcatccaaactgtactctgtatctttacttccaaatctgctcccatccagtaccagtattccctacttttttttttttttttgagacgatgtctcactctgtcgcccaggctggagtgcagtggcacgatcttgactcactgcaacctctgcctcccaggttcaagcgattcttgtgcctccacctcctgagtagctgggattgcaggtgcacaccaccatgcctggctaattttgtgttaggagagacagggttttgccatgtggtccagcctggtctcgaactcctgacctcaggtgataggctgcctcggcctcccaaagtcctgggattacaggcgtgagccactgcgcccaacccctacattagataatggcactaccatccacctagtcacacaacccagcaacctcagggtcctcctagacccctccccacatcccacatcttattgtttaccaaatccaattgtttctataccttaagatctctcaaattcatctcctctctccattctcgtcacttctgccatagtgcatactctctcatctttctgaaatcgatatctgataatgtcattggcagactttaaaaattctagtctccttatcatgcataaaataaaatttaaattcctgtcatcgaatatgtaaggactctctctacctctctaaactcatttcctgttataggcttcctgcactccaaaaactgaatctaattccaggacccataatccttataaaactctgaatttttgttttgttttgttctgagatggagtctcgctctgtcacccaggctggagtccagtggtgctatcttggctcgctgcaacctccgcctcccaggttcaagcaattctcctgcctcagcctcccaagtagctgggactagaggtgcgtgccaccatggccggctaatttttgtatttttagtggagatggggtttcaccatattggccaggctggtctcgaactcctgacctcgtgatctgcccaccttggcctcccaaagtgctgggattacaggcgtgagccaccgcgcctggccacaactctgaatgtatacaagctattaccctgctcagaatgctgtttcccctcttatccacctggtcctcctatatatctttcatgactcaaatatctggtcccctgtgttaggccatttttgcattgcaataaagaaatacctgagactgggtaatttataaagaggtaattggctcatggctctgcagtctgtgcaagaagcatggcaccagcatctgcttctggtgaggacctcaagaaacttacaatcatggcagaaggtgaagggggagctggtacatcacatagcaagagagggagcacgagagagaaaggggaggtgccagactcttaaacaaccagatttcaaatgaactcattttcaccaagtcattcatgagggatctgcccccaggacccaaacacctcccaccaggtcccacctccaacattggggatcacatttcaacatgaaatttggaagtgacaaatatccaaaccacatcatcccccgtgaagttttgcctgacccatccccgctcctttcccacagacacaaacactgtgctgacccacaaaagagatgccactcgtgttatcatgttttataatttcattaacatctcaggccttaaacsttggagtcacatttgaatcctctttccttacaatccaagtctaatcctttagcaaattcagcggttcctatcttccagatacatccaggacctgacctcttctyattacttctactgctaccacactgatccaagccacatcatctctcacctgtatcctgtattattgtgatagcctcctcactggtctcctcccagattctactcttcaaactcttcagcctattttcaacccagaamctataataattcagttaaaaattaaacaaaacaaaagattatggaactcttttgctcaaaatttataaaaggctccatctcaccccaagaaaagccaaagtccttccaacttcccaccaggaagttggtcacctctatttctttcctactactgtcctcttcttgctccctcagctctggcctccaagtctttgcatatgctgttctttctgcctggaatgctgtcctcccgaatatccacatggctcattccctccttccctataggtttttactaaatcattaccttctatcccagcaccaagatggctatttgtaaatgctattttctactaaaatggcctaaggccctttggaaaaatagctaaccaagtctggggcaggaggtataccagaaagcaaggacactatctaaaattactagggttgtgtcaaaaggattcaggagctaactttaagtggctcctactggccaaagtataagaaaagaagacatttgagcagcaataaaaagaataactgcaatggattgaaatgtatcagatatattgagatccacatagtcataatgaccctatgaagaaatcactgttcacctttagaacgaattcattattgtgaaaacacacaagggggataatagcaacactcaacctccctttgctgcacaaaatgtaccccaggacaacaaaatcattgatggggaaaagtgtctttaaagtattccagataatgaaagactaaaattggtagcatttgggtatcaccatcttgcaatacctcacaaaggaatgaayataaacaataatcatcaatgactgttcacataacaaaagggggtataaacattcattctctgccttctgatggaagcacacatcacatcctctgaagctgtcttcccaaaaatggaagcttctaaacctaataccagtttgtggggaaaagagggcacggataaacacgttaaaaaaatacaacaggaatgcaatcagtaaaatccagtttgtaggagactagactaaaacaatcaataaaacaactcaacttcttgaacaaataaactgcagagaagaaaaaagagaatgagttacctataaattaaaagagatttaaaagatataccaataaaattaataccaggaccttgaaattctgattcaaaccaatgtaaaagaaacttaaagaaaatcaaagaaatttgaaaactgactagatattttataatattatagaactgttaacttttaaggtatgatagtagtattgtggctataatttttccaaagcccttatctgctggagacacacacagaaatatgtacagatgaaatctgagattagtttcaaaaagaggaggaatgggtgaggtacagataaaacaagattagggatgacattataactgctgaagctggatggtatatggggatatgttttattattctctctactttctatgtttgaaattttttgcaataaaaggcaaaaaagaatcctggtgaaaaagtgggagattatttgatgatatgcagtggttatatggggtattattactgttatttaagaaatgtaactgaatatttcctgagtcagtagacatatgcaaaatggacttgggtagttaaaaataatgctataatttggcaagatgatactcacaaaataggctatttcactttaggggcaaatagaaaaaagaaataatttgggccgggtgcggtggctcacgcctgtaatcccagcactttgggaggccgaggtgggcggatcacgaggtcaggagatcaaggccacccgggctaacacagtgaaattccgtctctactaaaaatacaaaaaaaattagccgggcatggtggcgcatgcctgtaatcccagctacttgggaggctgaggtgacagaatggtgtgaatccaggaggcagagcttgcagtgagccgagatggtgccactgcactccagcctgggcgacagagcgagactccacttcaaaaaaaaaaaaaatcatttgccagaaaaatataagtaattgaacaataaactgatcaaagccaaaaaaaactgttaaaccagtgtaagcaagaaaagtatattcaccatgcaatttgtctgttgtgtaataatcaggcagcaatatcaaggtttccttagatttccctgtggaacttaacatcagatgtagaaatcaggarggaccatacacaatgtccaatatgcaatatgctattgtggtttgatggtttaaggcacactccataaacccaacagtgaccaagcaggaaccacataaattggactaagtagtaatggtagtttctgcatcattaggggccagataggggggacagaaaggacagagctagtcggatagggtggaagatgagcattctgttctctatattgtttccagttctccattaaaacagaattctattgataaaactcatgagaggtggtactctggttttacgtatcctaaaataaatgcccaaagtaactattgtatgaaatgacatgttttgccaattccaagaatgcctgtgtttatgtattcaactttagttatagatgaatatacgaagaggttcttcataacgtatgtcaaagtgttcaaaatattatgacatttgaacattttgatttgaatcaaaatattatgatgctcatggtcaatttcaaggttaaaaggagactgtaaaataatggatttttataattgagatgccatagatatggtaaatcgcaatacttcaaaaatcttggggtaaaatgttacatgttatatggcaattaacaaatctaatctcaggaattcaaaattattttcctaccagcaatagatccatgccccatcttttttatgatccctacaaaccaagataataagtcagtactatttggtgttggtgaatgcatattcaacaaaccaaagttgtcaacaaatttggaaaactgtatcaaattttcttgacactacttgacattgtgctttgacagtctatcagcactacatatacgtgttttatcaaaagaggaatgctgattaaattaattcaattgaatttgtatttctccactatcaataacaacctctcttctcattccatctgcttacttacagatatccagagatgaaaaggacactgtggtgcagggtaggaggagcagagaaaaagggatggatctgaaagtgttccaagagtatttagaatgcacactcgttcaaaaaatgccccgtcccttcttgtggaaagtagtaggagtggcactgcctctttagtcagagccatggttctcaacttcagctgcacactataatcacttggcccaattataaaaaatactaatgcccatcccaaccctcagagattggaatttaattgagtttggggtaggtttcagccacgtttttttttaaaggccaagatgattttagagtgctgccagagcattaagaagatctggattcaattctttttgtatgatcttagacaagttagcgagcccttctgaaccccaatgtatccataaaataaaggtcttttttttaatctacttcacaaagccatgttggaggtaaaaaagagaataaatmtgtgagaactcccaacacagactctggcacataggtggcactcartaagggtgagttctcttcctcttcactatgcactaatctatgttcagattaaacaaaacattgccttttgtacttgtgtctcttgctttttccccctctgatatcttccacttatttttcagaagtaacctaacggtacttgaaggaaatgagagtcaaagtcctttcccttctayagcacaaagggcctctccaccccttttcccaaagttaagtgattctatgtattcaaccagcagctgtgggactgaggccatgttgggagagggagtgaagtatgacatgagatcacccatgtcttcctatttccaggtagtcagggaggaatgccctaactgagcttggggaagcccttgaatgtggcagaatggccaactcttccaaagtgaaagtctacaacccaacgtggcagcaggagaaggtaagcctagagtacacagcacagcagcttcaagcacagcagacactcaatgagagtttgctgaactgaaatgaagatcctatgctacggcaaatatctaacccaatgctagtactcaatgaagtcagtgctgtgtaggcattaccttagtttttttagctataactacttcctctctcttgccttgcatgagtggattctcttacataaatgttctgttgaaatatcccctttaactcctttatcctactcccacatcaagtgcctcaatttgtctaaatgtctcaaaggtctgcagagataataagtgactgtcacttcatcaaaaatggtaagattggccaggtgcagtggctcaaacctgtaatcccagcactttgggaggccaattcaggaggattgcttgaggccaggagaccagcctggacaacataatggatctcgtctttaaaaaatgaaaattaaaaaattagctgggcatggtggctcatgtctatatcccatctacttaggaggctgaggcaagaggatcacttgagcccaggagttcaaggctgcagtgagctatgattgtgccactgcactccaacctgagaaagagagcaagaccttatttctaaaaataaaaaaacatttaaaaaaagtaagatgttattgctgcttcaaaacacaaatccaaatctgtgaattgcaagtataactgataaaagctataatttctttaaggtcaaagatactcattttcaaacaaagtactcattatctatgaaagaccaatcaacttattagagctccaaaacttaaaaatatttttaaaaatttaaattttttaaaaaactgcttactttaaagagagacaataaataaatgagtgattaccaaagattcatcagggtagggaaaggtcgaataagtaaagcagaggggatattttcagattgataaaatttttcagtatgatactgtaatggtggatacatgacaatatgcatttgtcaaaatctacagaaatttaaatcacaaagaatgaaccttaacccatacaaagttttcaaaaattattcaggaagtcaagggagcccagaatgaaatttaaattctgacaaaataatggaactgtattacaaatgtgtgaaaaaacctcacagagggaggtagaggaaaagggtgctgacctagtcactttttttttttttttgagacagagtcttactctgccacagaggctggagttcagtagcatgatcttggctcactgcaacctctgcctccctggttcaagcaactcttgtgcctcagcctcccaagtagcacaccaccaagcctggctaatttttgtatttttagttgagatggggtttcaccatgttggtcaggctggtcttgaactcctggcctcaagcaatccacctgccttggcctcccaaagtgctaggattacaggcatgagtccccactctcggccccaagtcactttagatgtgagtaaagtctacaggaccaaaggcaaaaggaactgtgtaaaagtacattactctgtctcccaagattcataattctgaaaccactatacatgtatactggaatcagaaattatgtaaatggatgacagacaataggagtcaggcttctcactgttagagtggaaggttatagacaagtaaggggaaatggctagaatgatccatgtggtaatggattaacgttagagacatcagtatgaactcaggtttagcttaatagggatacatatgaataaatgtagaactatttatagttgtgcatatatatatatatatatatatatatatatatatatatggtttaaaatacatctatattttcttgctctgtcagcagagtgggcctataagcaatgatactgcagtagcaataagcacatctaacccccagatttttgtttctataaccgttctccagtaaaaggaaccagaattcccctgataaataggtgactctaggctggggacaggaaatattacaagacaatcctggagtatcttatggggccagaaagtaattaagaaaaaaaaagcttacaatgatggggtgtgtcaaagtgacacaggagccaatagagcttccaatagccaaaattagaataatttgaacaataaaatagaaccatattcaaagataatccaaagtataaaataaatatccacgagtctatactgaaatagactattagtgtatttatgaaatagaatatttaacaaatgaattattaaataaacaaatgggagagaatagacaaatccatacagaagaatttcaaatgagttacataaatactccactctctaggaggtaaagcataactcctcactccttaagtatggcctgcatagtgacttctttccaaagagtgcagcagagaaaaagagtaagaaagagtgactttacagtggaaaaacctgacaaacactacctcagcaaggccatctagattaacatcaacagtgataaatcatgttgataacacatatccttggtatgatgtgatgaaaatggcactctgtggtcttcctccaaaaagtgcataactcgagcctaatcatgagaaagatatcagacaaatcccaattgaaggacattatacaaaaatttctgaccagtatttctcaaaactgctacggtcatcaaaaataaaaagtctgagaaattctcacagccaagaggagcctaaggagtcatgaagattaaatgtaatttggaatcttggaacagaaaagaacattgggtaaaaactaaagaaatctgaataaagtatggactttagttgatattaaggtatcaatattggttcatttattgtatcaaatgtaccacactaatgtaagatgttaataatcagggaactgggtagagagtacctggtaactttctgtactatcttcataacttttctgtaaattgaaaactattctataattaaaagcttattttaaaaaatatgttaacagtgtatagatatttaactgcagctgttgtaccggaaaccccttgtgaagcccatctttattaaagtaactgctttaatgacgacatgattttgcaaaagcatttgttacacatgatttcttgttcaaacagaattcattgtatccacatccagcaaagcaaagttaactcaggctgtgtgccaagacacggaaatggccttgttacattgaactcaatgtgaaaacatagtagtattcaaatctttccatccacaacacacaatattcccattggtctaaaaaaaaaaaaagaaaaaagaaaaagaagaagaagaagaaaaagaaaaagaaagtttctaagttgattttctagtatcttaaaaagtttccaaatacatgtcactggagagcagtcagcaactctagggggaggacaggaaggagtagcgactgctggttgcagcacttgaaaaaaaaaataacaaaaggaaggaaaaggcctaggcttctccagacggggttacccttatttgggaacattgccagacaacttaaagtagctctgagatgcagaaaagctagtgttaagcaaaatttactacactaaccaaccgttaagtgccccagaattgtattaatacttgccaagcaatcaagactccaaacagcataaatctctgtcttctacttctggaccttgctgggcctaagagtcagtggaaagttttgaagaacacatggcccttagactaatgccgatgaccttatcagcatggcccacacacccagcttttgaggacaataatatcccacaataccagaacagtctacagcaggaagctcctatgttgctgttaacgcctccgcctttgcagagatcagccaggggtgacaaatctttgaggtaatgccaaaatcaggcctcctgttctcctttacattaggcccttcatcctctgggggcagcaaagtctgaagaaataggaaaacagaaaaagataatagtaatagcaatttttatacttttgagatcattacttaacctaagatgattgtctcagctcatccttcagggtctggctcaaaccttgaatctttcaagtcttccagctaaccctctctcctccaaattctaagagactttcataagtgccaagcaacctgggaactgcttaatgcctcacactgctgatttttcatattttatgtttcttacaggcatactccacttgcttgtgcttggctttattgtgtttcacagacgttgcgatttttacaaattgaaggtttgtagcgaccctgcattgaacaagtctatcagtgccattattgcagtaccatgtgctcacttcatgtctctgtatcacatcttggtaatccttgcaatatttaaaatttttcattattattatacttcttatgatgatctgggatcagtgatgtttgatattaaaattgtaactgttttggggcaccatgaaccatgcccatataagatgatgaacttaattgataactgctgtttgtggtctgattgttccactcactgtctgtcccactatctcctcctctccttgggcttccctattccttgagacacaatatattgaaattaggccaattaataaccttacaatggcctgtaagtgttcaagtaaaaggaaaagtcacacatctctcactggaaatcaaaagttagaaatgattaagcttagcaaggaaggcatgtcgaaagctgagacaggctaaaagctaagctgcttgcagaaaacagccaagttatgaacgcaaagaaaatttctttaaaaaaagtaaacacagtgctccagtgaacacacaaatgataagaaagagaaacagccttattactaatatggaaaatgtctgaaaggtctggatagaagatcaaaccagccacaacattcctttgagccaaaacctaatccagagcaagaccttaactctcttcagttctatgaaggctgagaaaggtaagaaagctgcagaagaaaagtcagaagccagcagaggttggttcatgaggtttaagaaagtaagccacctccgtaatgtaaaagcgcaaggtgaagcagcaagtgctgatggagaagctgcagtgaggtatccagaagatcatgctaagatcattgatgaaagtggctacacgaaacaacagattttcaatgtagatgaaatagccttcttttggaagaagatgccatcttggatgccacattaggcccttcatcctctgggggccagtagagtttttcatagctagagaggagaagtcaatacctggcttcaaatcttcaaaggagaggatgactctcttgttagggcctaatgaagctggtgactttaagttaaagccattgttaattgaccattctgaaaatcctagggcctttaagaattacgttaaatgggccgggtgcagtggctcacgcctgtaatcccaggactttgggaagccaaggcaagcagatcacctgaggttaggagttcgagcccagcctggccaacatggtaaaaccccatctctaaaaatgcagaagaattaggagggcttggtggcacgtgtctgtagtcccagctattcgggaggccgaggcacgagaatcacttgaacccaaaaggtggaggtagcactgagccaagatcatgccactgcactctagcctgggtgacagagactccatctcaaaaacaaaaaggattatgttaaagctactctgcctgtgctctgtaactggaataaaaaagcctggatgactgtaaatctgtttacagcatggtttactgaatattttaagctaactgttgatggctgctgctcagaaaaaatattcctttcaaaatattactgttcattgacaatgcacttgatcacccaggagctctgatggaaatgtacaagaagatgaatgttatttttatgcatgctaacacaacatttattctgcagcccatggatcaagaagtaatttcaagtcttattacttaagaaatacatttcataagtctgtagccatcatagatagttcctctgttggatgtgggcaaagtaaatcaaaaattttctggaaaggattcaccat

SEQ ID NO: 97246 - DNA, 13409 bp, Homo sapiens
catattacctgttgccctttcctgctttatttttccctgagcatttatgttatccaacgtaccgtgtgtgtgtgtgtgtgtgtgtgtgtgtgtgtttattgtctgtctcctaccactagaatgtaagcttcctgaggacaggaatttttgtctgttttatttactgcatgattccctggcatctagaacagcacctggcacatagcagacatacaaaccaaaaggaatgattattttggtgagaattacaacaccgagggaggccaatgacaggtttctaaccatcctcttccatctgctctccctgctcatgtcagtcctatgtggagtagaatgaaactatctttgtcttttgacgttgctatttgttagtcctaacctcagcccctctgaagcctaagaggctcagaagccacatcaagctggcttggtgctagacatgggatgacgggaataaacaggggtatgacgcagtgtttagtgaatgaacacaccatttctgttttcctttgtcagctggtagcccacaagtaactttagaaatggaacagctgtgactgtggggaaggtagagagtttgcctccaaattcatgttgcactatttctctgtggttgatccaggattactgtggcatggcttggtcggtactaactcagagattcaagaatggcctcttttcatcacatgcagatgagcatcgactcaagtaagttacttccctttcctccttagatgtggacttaaaatctagatggcagattataatggagagtgagcaataatgcagattagatttcatgttgagggagcatttgattattccagacttgattttctcagggataggggccaaaatagtgagcctattatagcaaagccagaagaaatcagtggttaccaaacagagttctcaacaagtgatttgacaacaaaagtgatttttttttttttttgagacagagtctcactttgttgcccaggctggagtgcagtggcatgatcttagctcactgcaacctccgcctcctgggttccagcgattctcctgcctcagccccccaagtagctgggactataggcacgtgccaccatgcctggccaatttttgtatttttttgtagagacggggtttcgcaatgttgccaggctggtcttgaactcctgagctcaagtgatccgcctgcctcgccctcccagagtgctaggattacaggtatgagccaccgggcccggccaaaagtgattttttttttaactttgtattatagataatatcaaacatatagaaaagtagagagaatagcaacataaaccctcatgtaactatcacacagcttcaacaaataacattttgccagtatggttcattggtcctttcatttttaaatgttttagttaaaaattgtttaaaattgccgggcatggtggctcacacctgtaatcctagtgctttgggaggctgaggtgggtggatcacctgagttcaggagttcaagaccagcctggctaacatggcgaaaccctgtctccactaaaaatacaaaaattagcagggtttggtggcaggtgcctgtaatcccagctactcgggaggctgaggcagggagaattgcttgaacccaggaggtggaggttgtagtgagctgagatcgcgccactgcactccagcgtgggtgacagagtgagactctgtctcaaaaaaaaacaaaaattgttttaacataaacaaaactagaatagtgtaatcaactcctgtgtacctgtcaccctgctttcctactaacatttatcagctcctggcccatcttgtttttatctgttttcccatccacaatccccctcttacttcaactgggttgttttgaagctaatcccaaacatcatataattacatttgtagatattttaatatgctctctgaagatagggactcttaaaaaaaagaaaaagaaaaacacagccacagtatcattattgcctttgtggtaaacacaagataagtaggctgacttagaaataacccacttagaggtgaggaaggtgaagcgggaggaggtaggtcttttaataacttgtgggaatatggagtggcttattgcaaaggaaagtattagaattcttttctctttttttaaaatttaattatttttgtcacacagatatcagtgttttaaatcggcttggatgtaccaagtcttacatgaaggattccactttccctatgactacccaaacctgcggacagcccagctggtgtatgaccgagaggttcagtggacgctgggagccattctatataaaacacgattcttaccactcaggtaaagtaagactgaccaatctggtatcttgagctcagaggatatcagttgatgcctcagaatcggtttctttctttttttttttaaccagcttagaataggtcttaagtgaccttcctctctaccccctcacaaaaacaaactcctttacttccatgtgagccactgttactaccaggcatgctcgaacagaaagaaggttgagcattactggtctggagtctcagctttgctgtttcagaaatccagctttatttgtttactcacaacaaaccagtctttaggactgagctcttactaatcacttccaagatactgacaagctaaaatgtcattcttgggttaccctggaaaacacatctgactaaagaacaggggtaggatgtctagagcaatctttcataacatacagaggcactccagacattgtgtcattgacttagaaggctttttggtgggtcagaattagaataaaggacgtgagatgtttttagtggggctactttcatcaaactctggtagcctgataccttacttttatgtactgtcagatatttgggacaatttttaggtactctgtaccctggactatttcagataaactcagatgaattttgtatctttgatgtctgttcctctaaactcaataccgtcagcagccaggcaggcgacagaagtgagggaagtgggctaggtgggggttgcccacaactggagcatgtatcccagttaatgggctggttactgtcacgcacaagcactgtcccagcatttgccagttctcatctgtccagaaaagtcagaaatccatattttttatgaagtctttcagtttagagattcgcattctagaagaacactgcaggtcaaaccagacaaaactagatctggatctggactgctgaagagtggcttctgttctagccaggtggaccattacacttggttttcatatcgccttatttttatctgactgtaatacagttgatcaggtaacagctttatttagatatatcctagatcctaaggaaacatagtacctttattttttattatttttttgagacagggtcttgctctgttgcccaggctgagtgtggtggcagtgccgtgttcatagctcactgcaaccttgaactcctgggctcaagtgattctcctgcctcagccttctgagtagctgggaatacaggtgctcgccaccatgcccagctaattttttgatttttcttttgcagagatggggtcttgttatgttgaccaggctggttttgaactcctggcttcaagcaattctcctggcctggcctcccaaagtgctttgattacaagcatgtgccactgcacttggctgcatagcaactttaaaaaaaggatttagacacacacactctgatttctttattggattcaggggataccctattctcattagtactgtatttataagccatattttaagacttatgttacaggtgatcaatctagcctttctgttcattttttgggattcaatttcaaaggccttcccatcttggcttagattctggagggtgtaagcctggaggtcccttctgggggccgtgggaaggaagacacagaagggctcctggggcgggggatgttcttcagctttgcctgctctgtggagctggtgtcataaaatgtttatgtggatggaataaatgtgataacactactgggcctttcaaatcagtaaatgtctccctttgaaacttaacagttttttccacctacaaattcttaattcttccctagggatcttcggcaggaaggtgtccgacaagcccatggtagctggttccgtctctcctttgtatacaaccactatctcttctttgcctgtatcctggtggtgctactggccatcttcctataccttctgcggctacgccgaattcaccaccgacaaacacgagcctcagctccattggacttgctgtggcttgaagaggtggtgcccatgatgggagtacaggtggggccgtgaggctggaccaggactagagaagcttgagcacccccgagttgctgctcattgaattcctccactttcttatatagcctcagatgctgtgatgtctgaccttgtggatatttgcccttggaatttctactttactttctaccgtaattccttctccgtacccaggtcttctctgagagaagctataatttaatctgtgaggaactaaatgacaggagattggtgctaatacgggggaccaagctttgtccaagtgaagcaggcttcgactccttctgagaggtctggtgtgttcctagaatctcaccttttcttcccttgctaaagcatgaagtttggcatttggcacactggaagcctggttgaaatgaaatttgtagcatctgatacaaagccagagacattctagcaagtgcagcagccccttctttctctgtaacagagatatcatttatgtggagatccacaacctttaacagggatccaagatctttgcagttcaatcgaccacataggaatttccaggcaccaaaatgatataacttccttgcttccttgacaaagaagccatcatgggtgtgatccaagatccctgtcgtagtgttgatgatgttagtacatgattttaaaggttagaaccccttctaaatgaatggtctgtggaagattttagtatcttatctgatgcctggtatgatgaggatagaaaatttttccatttttatgtgcctcacaggctgtttgggcattaattttgctttttgagccttaagtgtgttagtaggatggagaaactgtgatggggactgggaacctggatttgtctgattttaggtcactgttccctgggcctgtttttgtgagcccttacacaggaagatataaagagagttctttcatttcactgctaaaatcagtatgtagtatggggaatgtatttgggttgtttttaaagaaaaggggaacagaatcaggagagtgggcaaaggcaataaaatcaaagttcttattaattatttctgagaaatagaagtttctcaatttatgactcttggaatgtctgaaagggagcaaatttggaatagatcaatctgttaataagccatctggcaactttcagaacctctattaagagactgctgagtcacaaacagcacttccattaatgaagcgagaggaaaagccataataattacatcttcacccactacccttccagagctttgcttctcctccacatttagccattaaattgcatgaggatttctcttcatcagggtccgcatggaatctttcttatattttaccctttcctacatgtagccttgaatgtcctttccacgaatatgctcccacggctgggagcattttcttttcttttcgtcacctttgatttttgggattagattaataggggaaaaagtccctggctttaaagaaaacaaaagtagaattcttcaaaaataaatttcatactgggaacagaaaggaactaaatgcttcataaaacagggaaaaagaaattaagatcatcctagaaataaactaagataaaaataagtatactgacccttggttggtagataaaaagatgaccagtcttgtattgttttaaaattagataaacatggattaagcatgcaaagactctgttcctttttttttttcttggagacagggcctcacgctgtcacccaggctggagtgcagttgtgcaacatcatggctcaccgcagcctcaacctcctgggctcaaacagtcctcccaactcagactccagagtagctgggactacaggtgtgcgccaccacactcagctaattttttattttatttttttagagatggagtctgtgttgtccaggcyggtctcaaactcttgggctcaagcaatcctcccacctcagcctcccaaagtgctgggattacaagcatgagctactgcacctgccctctgtttcctttggaaatctcttacctttcattagggtttctttcatagcaatttcctttggtttttaagacttctacattgctttttcttttattatctgtgctccgtgaaccttatgaatgctgcttaaaaataatgtcaaaatatgttttagctgcctactcaggtaacgttttcttttgctctcatcttggtttccatatactatttttgkttttttgtgagatytaatcaatgatctagtcagaagctacttcactggctaacagtgatcatgttcatgtgctaaaaatgaacttgaaacacggaagtagtggttggtccagtttgaaagctcttattagtattcttcatcctggctgtaataatagccattatttgttatgcctttgttatgtagcagacactcttaaggattttatgtgtattattcaaattgctattactgttctttttatagttgagaatctcaggatacctacatttatcactttttcaatatatatgtatttcttattcttattttgtcttggagtgtttaatgtgttatttcctgttcattactttaatattatggtatctaggcttgtctttattaccatgagcaaggtctccaggagttccacagtactgaaggaaaattttgtcatatccctcagaagaactgaatatttattattggtatgggctcctttgtttattctcttctcccaattaatagattttaaatgaaatcttattagctagaaacaaaagccacttactccttgctgagagccaattacttaaatatatttcttccttataataaaataatttgcttctaggagcagaaatctatcttgccataccctttggtttttaaagatttctcttctatttgcatttctgcactttggtggttctcccatgaagataattatggtgtcataaaattcacattccactggttcctttgaatcttaccaaccactcttgttaacagagacaatgaacctgaactgttttaggactcttgttattactgagacaggtcacaaacatcaaaataggagtccgtggcttgtagtgatgctttttagtcttgtgatagcacaatccatcactttccccaaaattcttgtcatagaacataatgaaaaatatgtaaaatacccatttatgtggcatttcattcacttaagttgcagttaactctaagccaaattataccattttttctctctgtactttagctccttgaatttccttaatctgggaaacttttgttcccacaccaaggaacaaattcagggggtacaagtgcaggtttgttacatgagtatattgagtgatgctgaggtttggggtacagatcccatcaccaggtggtgagcatagtacctaacagatagttctttaatccatgccctcctctctccctccctgctctagtagtccacagtgtctattctggtctgggaaattttcatcactttccaccaatcttctatttattctccaaatgtcttccaaagtatcctgccccaccccctcctcatcctaagagattcctttaacttcaagatcatatccagtgattgctgaaaaatgtctgccatgcacttgctaagctagtgtttttaggcattaacatttattatcacatccatatttatatttttgaaataatttatacttctcactgatatcatctaaacagatgcttctcacagttttatgttttgttttttgtcagggatgaaagacaagtgagtggtatcacttaagggaaagaacagtaggcttaacgaatagcagacctggattctagttctggctttgtcatttactagctctggtaccccaggccagtcacttaccatctctggttcggttctcatctatcaaacaaagaggctagacaagattagaaactaaaggcagaagacaaggtagaaaaatcatatgattttgggaagagcattttgtcctttggtttagaagaccaggctgcccaaaagagcctcctattttatccataacccctgatgataaggttggtgggaacagagtttctaatagtaatcataataaatttcagaagagttttaaagcttctggtcaacccccttgatttatatgggtgataaaactgaggcctagagcagttgtaatatgtgcaaagtcatagtgactggcctcctagcccaactactttgtcagctacaatgaaatgctcattaacagaatctttctgcaagtataaacagaatctattttttataaaacagctggccacaactaaccatgccccatctttacaactgcttctgacattcatttatgactgctttgctcacatttaggaataaactttgaaaaaaatactttgtcagaaatagtgccaagttttcactacatctattcttgttcctgtatttcttttcgtacttttaaattttatacatctttttaaaacaattttatacaatttcctttactacaacatccaagcaattcattagatgactacagcctagatgaaggtataaatgcctattacatctacctcattaaagaacttcgttgtaattcttgggcagtttccagactctgttacagaaacagagggctgtttctttttgttgtctttaaacttttcaaattaattcaaaactagtatctaattgtcctttttgctgtggtatgtggtgtaatgttgattgggaataagaattatggtagaaatagcagatgtttcaaattctcccatattagtctcttagggacgctagctccagattccagcccctggggcaataacttgtgaggattttcctggtgttacaaaaaatattgctgttaaaaaactaagactcaaaaccaaaagttgtgattaataataacaggattattagtcaataatattttgattaatactatagaatagcaacagtgaatatacctcaaattgaaaacttttaggttgtgttcttggctcattctctcataacctggatctaagttggaaagctgtggcaccctgtttgggtgtcccatctaccctgttttctgtttctgcagatggcttgttcaagcttcattttaagcctgctctgtctacttatcttccttatatcctaatagacttctcttgtgttattacacatttctcttttgctctaatatttcattattttccagtttgtcagtaccgttatcagagggacgaggaaggaataacacaccagttgaccattttgtttctctgaaaatctgagcaatacggagatccttttattagtaaaactgaatcattactcatactacaagggctttcacttttaaaatgtaatccatcattgcttgccatttttatgaaaaccaaagttgaaaagtcttctgaatcacaggctatgtatagccacacatgcatgacttcaggctagcataaagacatgtctgctcctgagcctcttcttttaaagggcaaccacttgtataccctctggtggccactcctccttctccactccaaggcagccctggtactttcctaagtggcccctcctacagagcacttgccggcatttggcctgctgctggtgaagacgccccttactagcttcataaatgtttttctgcaagcagggatcccagacacatactttggtttctagtgtttcagttactatgttgtatttgaaattctcattccacaattaccctttagttgaagtcctgaagtacatgccatgtactccccctttatttctaccttgatcaatggcctctgcggagtgtagtgaaagacatctttttattatgatctacactttaaaaaaccaaaggctgcctgtattacattgctttggggagttgttaagactctgttttttctactgcttcacattaaacaataattttgttgaattttgaattcttaaaattctcactgacaaacattttaggtcagtgttgaggaaaatgtgtgatgcatgttagagaggtgatgcattctcccttatgcagggacatgggtatatgtgttacatatgctgatatataacccaccattcatcccaggaccacaagggtagctgtagataaactggttatcctaaaatcatgattatcagtgttgatctctgcaaccaacattgctttagggagttgctagtcattacccctgctacaatagatagtatttgtcagtctaagttacagacaaaaaattctaggttgactgattaagaaagccatgtgttttaatttccttcatgttttaaaaacaatggacgtaagtgcagagagacctttgaaaatattaagggaaatctatttaatcctataggtatgtgatgacttgtttttttggaaaaaggtatttggaacatcaatctgtaattatccattttccattcatgcattcactaattcaatatttgatatgtgtctgggagtgctgggaataacataaatacaaaaaaaaccctaagataatcattcaccagaagctcatagatataatacagttatatagctaaatgcaaccagttgtttttccaaatgtactcatcatctgtaataaaagaaaaatgaagtaaaacatctgaaaccttaacttactcatgagttgctacttccttggaggcaactgtagaagcattaatatatggttctttgggttgggtcatactgccctctgctgactcagttactaactaaggacaacctgggtttgaggatcaggagaggatggtgtgggaacctgcctcaggaactacagttccctttctttgaaggattctatccagaagagaccatatcctactaacatactaataggagcaacatagcagatcaaatgataaggtggggtggaaattagaagggaatgggaataagctagtcagaactttctaaggtaactaggctattaggacctaagccagtggtccctagacttgtctgcacattggaatcacctggggaactttaaaaatatgccttttacttcctccagggattgtgacttaattggtcttagatgaggcttgggctttgggatttttctaagattcaaataagagagaagttgggaatctcttctaggcaatagcataagcccagccagggtccagcatttatgaaaaattgacaaactgttttgctaagaatcacctgtgttagtcggcttgcattgctataaggaaatactgacaatttttagaaagaaaagaggtttatttggctcactgttctgcatagaactgtataggaagcatggcgctggcatctgcttctggtgagggcctcacgaagcttacaatcatggcagaaggtgaaggggagccagtgtgtcacatggtgagagagagcaagcgagagaggaggaagttccaggctcttttaaacaaccagctcttgcataaacaaccagagtgagaactcactcattactatggggatggcacaaagtcatacataagggatccgcccccatgacccaaatacctcctactaggcccacctctaacactgaatgtcacactttgaacatgagatttggaggggacaaaacatccaaaccatatcaccacctgagaatggtacactacaggtcacagaaacttacagagtactggagttgaaagagaactgagatcacctagttcagagactaacgggaaacgttaggtcatttatggctctcagacacgttaagcctgcataacattttttaaaatcttgaaattagttcccaacacttaattgagagctttcacagaaaaatctagatatgtggcttatttttaaaaaacagaagatttgctgacttaaacactgcaaaattaaacatttatatctgaatccagcatctctttttgctttgtaaatgaggtcaaggatgaaatccagatgttcttcctttgtatttgtattgtcactgtatggaatctaggtatatccaaggaaaaataaacttaagataagcttattttccttatttcaaaaagcaaaacaaaaacccagaagatctaacaaccctggacctgtagagtggcagcaacagaccagaactcagcagtatagtccgagctggggcacctgctcgccagtgttactgtctccatcagcctgaccccagtgagcatttgatttggtctaccctactcttgccttctacagaactaaaactaacttcctgcaactttcatccattgctgccagctctgcagcataatggaagctcattccctcttctgcatgagacggcttcaacttctcaaggacaggaatcttgctctctctccagatgttctctgctccagttaaatatccctagttccttcacctattccctgtgtgacaggggttctggactcatcattctgatctcttcttctggatacacacttagtggccatcaatatcttgcttaaatttggtacccagagtgaaatgcagtatgttaggggtattttgactatggctgtgacacttctactgataaaacctgaagtaccactaatttttctgttatcatataataacaacatgaatactacttggttcatattgaacctgaggacaactaaaatcccgtcttttttatatgaaatgatataaggccaggtttcttcagcccaaacttatacaacttatttaatttaaatgagtatgttacatttctaatctgtttaatttcatctcgatggggtcattctgggactgttttcagttgccactgtcatctattatattagcaatattgggttgctccatcctcaaatcagatgtttctgatgccttcatccaaatcactgattttaaaagtaaagttgaataagacagggccctatgaaatatcaatagagaccaaaatcacattaattcagcagtcaacaatttgtttatctgggtagatgtccatgcactacaccatcaaggccatatttttcttattacaaagctgttaggaaaccctctcaggaaccaatttatactgtcgattccattcctctctctgaccttgtaatgttaacagccttatcaaaagaggaactagctgggcgtggtggcccatgcctgtaatctcagcactttgggaagccgagatgggcggattacctgaggt

SEQ ID NO: 97247 - DNA, 15414 bp, Homo sapiens
tcgtgtaagaccccttacaaagggggtctctctagagccagcctttgctgtttcatccttaggagcagccctccctgaactaactctctctctatctctctctctcccagggtgtactgtctactctgcacttaactttcaaaatactattttccttttgcaataaattactctatgctggatttcctttgacatgtgtttcttttattctttttcctttttttttttttttttttgttgttgttgttgttgagagggagtctcactcttgtcacccaggctgattctcgtgcctcagcctcccaagtagctgggactacaggcgtgtgataccatacccggctaatttgtgtgtatttttagtagagacaaggtttcaccatgttggtcaggcttgtctcgaactccttacctcaaatgatctgccgcctcaatctcccaaagtgctggggttacaggtgtgagccaccgcgcccggcctcctgtgtgtttcttgtttaaattttttttttcttttgagacgggggtcttactctgtcacccaggctggagtgcagtgttgtgatttcggctcactgcaacctccacctcacaaggtcaagtgatcctcccacctcagcctcccaagtagctggaaccccagatgcatgccaccacgcccggctacttttttgtagagacagagggttttcaccatgttgcccagactggtctcaaactcctgagctcaagggatccgcccacctcagcctcccaaagtgttgggattacaggtgtgagccactgcacccagccttaaatccttttaaactaagaagataagaaatgaggtatcacaatagccatcaatagaaggaaagcacctcatcatgttcatgctttcctctgccttcttcaacatatgaagtcttttttttttttttttttttagagacagggtctcactctgtcacccaggctggagtgcagtggcgcgatcctacctcactacagcctcaacctcctggactcaggcgatcctccctcctcagcttccagagtagctgggaccacaggcacgcaccatcacacctggcttcctttctgttttgtagactgggtgctgccagttcatgaatccctaataaagccaactcaatctttaaaattcaatttgttggccgggtgcagtgcttcacgcctgtaatcccagcactttgggaggccgaggcagatagatcacctgaggtcaggagtttgagaccagcctggccaacatggtgaaaccctgcctctactaaaaatacaaaaacaaaaattagccgggagtggtggcaggcacctgtaatcccagctacttgggagactgaggtggcagaatggcttgaacctgggaggtggaggttgcagtgagccgagatcgcaccactgcactccagcctgggagcgacagagggatactccatctctgtatatatatacgtatcctgaagtatgtttatggtctgtttcctacaactagggtataagctccatgaggtcaggacttcgttttgtttagtgatgtacctgctgcctggtaggcactcccaaatatttgttaaattaatgactgataggtgaatagataaccactgacccataccaaaaaggagcacttgctttttgttcgtttttgtttttggggtggggatatttttttggtttgtttgtttgtttgttttgagacaaacaaatatggcgaaactctatctctacaaaaaatacaaaatttagcctggcgtggtggcacgcatttgcagtcccagctacttgggaggctgagatgggacagtcacttgagttcaggaggttgaggctgcactgaattgtgattgtaacactgcactccagcctgggtgacagagcaagactctgtctcaaaaacaacaataacaaacacaaaacaaaacaaaaacaaaaaaaaagaaacgtttagcaaacttagttctaaaatgcgcacaatcaactgattcaatgtcaaagtcatccttaaattccacaataatctcttgttttatgagctgtataattatctgaacaatgtttcaaaagcacctgaaacaacaaggcaaaggagttctttaatgtgtgagagagcagtgcaaacgatcaactttactaaccctagaataattctcatcttgtttttattttagccttctatctagctgagaagcactatgctccttggaagctgcctagcattctttaaagagagacatttttctggccaggcacggtggctcacacctgtaatcctagcactttaggaggccgaggcaggtggatcggttgaggccaggagtctgagaactgactagccaacatgctgaaaacccatctctactaaaaatacaaaaatgagccaggtgtggtggcgcaagcctgatatctcagctacttgggaggctgaggcacaagaatcacttgaacccaggaggtggaggttgcagtgagccaacatctcaccaaagagatacatttttctgacctggtttttccaaatagaaacaaggcattaggtacttttctttgacaaccctctcagtttgtccagacctggttggtttatcactggggactagaataaaataaattcctttttaacttccctttggcgagaagacccctcttcctgcaggatttctcaagtccgttccattgagggttgctggccccttcaagtttccttcatccaggctcctaaacggagagattgcataattcccctgtaaattacaactatcaccatatggggctgttcagggtcataacacagttcttcacctgctttctaggagcttacactttgggtggggatacagacacctagagccagagtatgtctggctctttctaggtgtctgtacccctctttgtaggggtggcaggaggagcagtgtgtgcaacttgcttaggtttaggggtaaggagggggtggagcagcctaggctagccagatgtgaattttgggtttttttatgagacagagtcttgctttgtcaaccaggctggagtgtggtggtgtgatctcggctcgctgcaacctccgcctcccgggttcaagtgattctcctccctcagcctctcgagtagctgggattacaggcatgcaccaccacgcctggctaatttttgtatttttagtagagatggggtttcaccatctctactggtcgagaccaggctggtcttgaactcctgacttcaggtgattcacccacctcggcctcccaaagtgctgagattacaagcataagccactgtgcctggccaggaactcagtatttaagggaagaaagcatgcaagaggaaaataaggaagaaggagaggcagtgaggcaaatgttttttgttttgttttgttttgtttttcttaagacagtgtctcgctctgtcagcaggctggagtgcagtggcgcaatctcggctcactgcaaccgctgcctcccaggttcaagcgattcttgtgcctcagcctcccaagtagctggtactacaggtgcgtgtcaccatgcccagctaatattttgtatttttagtagagacggggtttcacagtgttagccaggatagtctcaatctcttgaccttgtgatctgcctgcctcggcctcccaaagtgctgggattacaggcgtgagccactgcacccagtccagcaaatggttattttattttattttttgaaatagagtctcaatctgttgcccaggctggagtccagtgggtccatctcggctcactgcaatctccacctcctaggctcaagtgattctcctgcctcagcctcccaagtagctgagattacaggtgggcaccaccacacccagctaatttttgtatttttagtaaagatggggttttgccatgttggccaggctggtcttgaactcctggcctcaagtgatccactcgcttcccaaagtgctgcgattacaggcatgagccactgcacaccctgctgcacattgttacttttttgtgagtttctcattagtgttcagtaaatctacattttatgtaagatacaataaacatttgaaaagagggagtggaggaaaaagtcagttatgcatctgtctcaggataggtggagggatgattcctggtctcttccttgttctataattgggaagataagcttgtaatcaacattgtcagtatgagatttcacagaactcggattagggctggtttatagggggaatgtttatgctgaaagattcagaggctaatgaggaatttcctggcaagcaatttgtgaggaagaccatctggggaggtatatgccttttgccattgtaggagcctggcttatgtatgaggctatgacacagggttgtggaattacagctatctgggaacaaaaaggaagggagttttgactcacttcccaagcataaatttcctcggcatgcctctaccatacccagcgaattttgtttccatgttttgttgaaacaaggtgtcaccatgttgccaaggctggtctcaaactcctgggttcaagtgatcctccaaccttggcctcccaaagtgctaggattacaggcgtgagtcaccatgcctggccttgtggagttatcttctttctttctttctttctttcttttttttttttttttgagatggagtctcactttgtcttgcccgggctggagtgcagtggcgcgatcgcagctcactgcagcttccacctcccgggttcaagcaattctcctgcctcaggctcctgagtagctgggattacaggcgcctgccaccacgcctggctaatttttgtatttttagtagagatggggtttcaccatgttggctaggctcgtctcaaactgctgacctcaagtgattgtctggcctcggtctcccaaaatgctggtattacaggtgtgagccaccatgcctggccttgtggggttattttcgaaagtccttgagataattcctatctcagacatgcaagcatgagaccttctccttggtgttctcatggctccaatttgtttggacctgacaatgtgattttgtcctggtatctgcaactttcacaagatggagcaactaactcaacaccagattccacccctaattattccttcattcactcaaaaagtatctaggctccaatgtgtcaggcaccgtgttggtcacaggggataccatgatgaacaagagaaggaaccacaggcttttgaatgggaaactaaagcatgtgaaaaacacacggagagctgggtgcggtggctcatgcctgtaatcccagtgctttgggaggctgaggatggaggatctcttctgcccgggagttggagaccagcctggacaacctagtgagacccccgtctctatcaaaataaaaacaaataataaaattagctgggtgcggtggggtgcgcctgtagtcccagctactcgggaggctgaactgggaggatcacttgagcccaggagtttgagggtgcagtgagctgacatcaggccactgcactccagcctgggcgacagagcgagaccctgtctcaaacaaaacaaaacaaaccaccaccaccaccagacatgagggccagtgcagctgaagcctgaagatcaagggctagaagaggccaggccggggccagatcaggcagggccttgcaggttgtggttagttgtttggattttattgtgagggaaataacacgacatgtcattccttctgcaacagccttaagaactaggcgttcttatcccaatttcacagacgaggacgatcaagtcgttaatttgtcaaaggtcacccgcaggcgacaggcggggacagggtctgggaaaacccgctaggcaccgaggcccagagggcgtcgggcgtccccgcaccgagtgccgcccgccgcgacccgggaactgcctgctccccggacgccaggcccgccgcacgccgcggggacaccgaacatgcgccgctcgccttacggaagccgggaaggaagggggcggggccgaggctggcgggcgcggggaaaatggcggcggcggcggcggcggctgcagctacgaacgggaccggaggaagcagcgggatggaggtggatgcagcaggtaacgggccgtgcgggggtggcttccggagacctccttcaggggttcgttgaggcctccctgtgctcccgggagaagggaggagggcggagcagcaacatctttccctgggataagttacgggaggaaagtgtggcccgggctccgccgtcccccactgccatctccagggaagaacgtgggkcccggactctcaccctctctcctttccctccacccttagtagtccccagcgtgatggcctgcggagtgactgggagtgtttccgtcgctctccatccccttgtcattctcaacatctcagaccactggatccgcatgcgctcccaggaggggcggcctgtgcagggtgagtgttgggcatagactccagtctcttctccttgctcacctcccccaggcagtggtcttttccccttcctctactggagccaattccccctcccccaaatcatcgtttccccaatacatggttcccactgatctcagaccctcaggtcatagaagtttctttaccctcaccttttccatgtcattctctttcccagtgattggggctctgattggcaagcaggagggccgaaatatcgaggtgatgaactcctttgagctgctgtcccacaccgtggaagagaagattatcattgacaaggaatattattacaccaaggaggagcagtgtgagagtggaatagatgtggggaagaggagtgggagttaaaaaaaaaatgtacagggtggggaagatggagagggttggaaagaaacaggagaggagaccaagaacaggggagaaaaagtgaagagtagctggagagatctcagaaaaagaaaacgttcagagttctttctcaaaagaaagcaaaggatgagaggagacaggatagaagggagtagttattctaaactgagccaggatttgaggagggaggagagaagctggtgaaaatacaccaggagcttcacattgaggaaggatggtttaaagaattactatgtcaggccgggctcagtgactcatgcctctaatcccagcactttgggaggccgaggtgggtggatcatgaggtcaggagttcaagaccagcctggcaaacatagtgaaaccccacctctactaaaaatacaaaaattagtctggcatggtggtgcgtgcctgtagtcccagctacgcgggatgctgaggcaggagaattgcttgaacctgggaggcggaggttgtggtgagctgagatcatgccactgcactccagcctgggcaacagagcgagattccgtctcagaaaaaaaaaaaaaaagaattactatatgttctggccccttcccctctagttaaacaggtgttcaaggagctggagtttctgggttggtataccacaggggggccacctgacccctcggacatccacgtccataagcaggtatgcatgctcacacctgtgcatgctggggcagagaatggagaatgaggggaaggagaaaggtagggggcactgacttcctgtgcattgtccctctcttccaggtgtgygagatcatcgagagccccctctttctgaagttgaaccctatgaccaagcacacagatgtgagtaatactccatgcctactctgtcatgattgtcgctataccttttactgtgtgacactcctctattggggaatgccagatgccacttaccagctgtgactctggcttagtcatttaatctccaaactgtgaaaggaggtaatccctacttcattggtttcttgggaagatgagaggaaatgtgtaaaagcagctagcccaaatgttggcatatagtgttcaggtttctccgtctccttcacagcttcctgtcagcgtttttgagtctgtcattgatataatcaatggagaggtaataccctacccttcaaccctcagatcctgctcttggcctctttcctgcttttgattctccctttgtgggttaccttgccctgtaggccacaatgctgtttgctgagctgacctacactctggccacagaggaagcggaacgcattggtgtagaccacgtagcccgaatgacagcaacaggcagtggagagaactccactggtaatggaggggattccttggaagtggggttggaaggtgtggccacmtcccgtctcaacctcctcctgtcctcatccccttgcagtggctgaacacctgatagcacagcacagcgccatcaagatgctgcacagccgcgtcaagctcatcttggagtacgtcaaggcctctgaagcgggtaggacaggggcttccctggcattcttcctctccctcctggggaagtgacagcatccaaactaatgtagtctctttttgtgcctttaggagaggtcccctttaatcatgagatcctgcgggaggcctatgctctgtgtcactgtctcccggtgctcagcacagacaagttcaagacagatttttatgatgtgagtgtaaaacccggatggggaggcggggcttatgctgtcactttcacgtgcaggactggggactgttgttccccgggcatgccacgagggatcccgaggaactggtcctttctgttccctcccagcaatgcaacgacgtggggctcatggcctacctcggcaccatcaccaaaacgtgcaacaccatgarccagtttgtgaacaagttcaatgtcctctacgaccgacaaggcatcggcaggagaatgcgcgggctctttttctgatgagggtacttgaagggctgatggacaggggtcaggcaactatcccaaaggggagggcactacacttccttgagagaaaccgctgtcattaataaaaggggagcagcccctgagcacccctgctggtggctctgtcctctgttaggcaccacactggttggtcaacttggatgttcatcgaggctcattctggccttgctcagaagcccttctgatgctcttcagtgagggaggcactaccatttgaagtgaccccatgtcagtcacatggactggtctttagcaaagtccaaggctgcctgcttccacctaagtggtctctgttctacactttaatgtcaccctctacatcatcttacctagcccacccaaccttataaacatgataattgactactttcctgagctaaattaacttgtttttcacatacgcaaaaaagaagggatagtaagcagatttttattagaaagaagtccaagccttgatcctgtgggcactgtgaattaccaggagggagagtttctcaatgaccgtttactacatattttggagaggcagctaggaagtggtctaaaggttgggattgctgtatgtgatcacttgtgctgattttcatcacccgctaaccagagctttagagtgggagttgggaactaagtaatgacctgtctgctagaaaaggggaaaaaccaagagaccctgcatttcatactggcgccatatccccagagcctgacttgcacacaggcagtataagaccaaataagggagtcggggggctcaaaaagtggagccccatcttaagtatctccaaacagcagggaccgcttagtccttgccgcatccccagtgtctatactgggggcctggcagggagatgcactttactcaggtaatttactgagtggatgaaatagcataaaaacgaacaggaatctaaaaaacgcacaaaaccctgttttaatggaagtcaggcccaggctagaagatgacaatctacaaacacttttattagcaaaaggagtaagtgcagcatgggagaaagaggggctcctccttcccctcaaaggcatcactgccccttcccaaggggcaggccagcagggaacaagaggaccccagggttgcaagcaggctggaatcagacaaaagtgatccgtgtccgggaagcattgacctgccagacattgagctcctcatattcatccagagccgcctggaactgggcgggtgtgaagccacgagatacacagcgctgctctgcctcagagaaccggacacttcggccccctgagaccagttcacggacggtggcaaatatcacatctgctggtctctgagtcctgaaggaaatgagtgggtgtgtaaggtcaggatacaaacaggaatgctcgacatcaacagagaacaatggtggccagtgttagaattgaggccaacctcagacacatggccacagaagacaaagtgacacagctttgtccttcactaaaccactcacctagctgtctgccccttgtctcctagaagagagtcctttgacatctccattagcctgatggcttcattcacatcttctttctccaccacatccaccattctcagacgtgcctaaggggaaggtaggggggaaagatgggaacgggaggagggcagtggaacgaggtcaggggacacccttgttctggctttaaggctgggcagcccatgggtcgcctactcacaaaacaggagtggaatcccccctccccccagcatccgcagtgttgggccggcactgtcagaccgagacaagtgcaatgcccagggcagcgtccagcaattgcccaagtctccgcctctcaacactggccagtcccggagttcagctgtcctgtgagggagaccagacccttttgaacgccactgggctccccagcatgacagatggagcttggggagctcagccaagaagacaattggcagagagaacgtgtcccgggggctcgggaagtgctagctcagcagtaggttgggtaatcacactacctgcacgaacagcactttggagcccccaggactgaggtccaagacgggaggacagaaaggaaggtctgtagcacaggatctaggacacatggagtgaaacagaccccaaccaccctctcagtgaaggttaagaagtggggaaaaggcctttccctccacggacgctgtgcgtgccctgctggagcagcaagtacccacagtgcggtagcacggagaggaccactatctgcactgtcagcactttagccccggcagggctggagcgggaggtggggaggcggcaatgagagcacggtaaggagctacccctttaagggtcaaaacagatggccctccagcaatttgggcacttaccagagcagtggaaaggcgcaggatagccagcagggtccgggcagaagtataggtggcatccttactagcccaagcctctcgcctcatctccacgtatgctgctgtgatgtagtcagccagagactctggcaccatgggctgcttctcgcggcacatggctatgtaacgcctgtgggggaaggttcatggggaagcagaagagggagatggggaagggagtgaatatgagcccatgttgttttctgtaccagggctccccatttaacatggtcccctccaagaattttaagtggaaaacacaaattagtgggtgattatttgcttggcttgaatatcactgatggatttcaccaaacgtatagcccccaccagtatcctccaagttatttcctatttttttcgggaaaatggcctttgtaagacaaatccgtctgtcattaagagaggatccagacccctcctctgagcgcatgacatggcaaaacatatattttatttaaagagaactgtttacagaatatttaaaagggagtaaaaaccggaaagaacactggaggctcatgggaaaatagcgatagagattatcatccagaatgcctgggagcaggtgttttaaactttaaattttggagtatttgcatatgcatgagatagcttggggatgggactccagtctaaacatgaaattcacctgtatttcatatacaactgatacacataacctgaaggtaattttattaaaaatatttttgtgggccaggagcagtggttcatgcctgtaatcccagcactttgggaggcagaggtgggcatcctggccaacatggtgaaactgctctctactaaaatacaaaaaattaaccaggcgtggtggcgtgcgcctgtaatcccagctactcaggaggctgaggcaggagaatcgcttgaatctgggaggcagaggttgcagagagctgagatcactacactccagcctgggtgacagagcaagacttcgtctcaaaaaaaataaatagtgtaggaaacaaaatttcctgtgtccctatgatatgaagtgtggaattttccacttaaaagctgatctgaggctctggacatgtctgtagcgggaagtggtggtgtgaaaaacacacaccctaagactaataagcactttttcaggaggctcgcacggcccacgccaacgtttgcccacccgcacccagctctcctacctcatgagcttcatgtccagaggttcaaactgggaggggggctgccggctgtgctggtgcacataggtgatgtgctgggccaacctggacagagggaaggttagaaggaacaccctttttagggctacgcacccatgtcctcttaggtgtccctcctttggctctgccacttcctcacagtgtaggagggacaagctttcccgggaaatcctcatcagcatttcagccccaacccaccatttccctgagaaccatggaccagcccctgctgcaaaggggaggctctggggtttccaggagcgtggaatttgttttctgattcacctcccctcctccctacacagatcattacaggggacctctctttgggtgttgagcttcattcaccgtaggtcattgtctcggtcgggccggtcctgaatcagccagaggaggtcaaaccgggagagcagtgcagcaggtagctgtatgttctgctccaggctgcggcgagggttgtagcgcccgtaggcagggttggcggcagccaggatggagcagcgggcattgagtgtggtgagaatgccggccttggcaatggagatggtctgctgctccatgacctcgtggatggctgtgcggtcggcctcagccatcttgtcgaactcatcaatgcagcacacaccctggtcagccagcaccagggccccaccctctaaggtcagttctccactcacggagtctctcagcacagctgccgtaagccccactcctgaggagccccggcctgttgtgtactggcctggaagagaagaaataaggaaccatgagagagaaagaacaagaaagagaacaagcaaaagacaacaaacgggccagggaggcgaggcctgcgctgggatcattccactccctccaccaggccttcttgagatgcccgaggatctgtggggcactggcaatgtcccccttcccctcccactggttctcttcagaacacaactgtggctcactgaaaccttggctcctgggctcaagccatcctccggcctcagcctcccaagtaactgagactataggcactcactaccacacccaaccaatttttaaaactttttagtagaggccgggcgcagtggctaactcctctaatcccagcactttcggaggccgataacaaggcgggcagatcacgaggtcaggagttcgagaccagcctgcccaacacagtaaaccctgtctctactaaaaatacaaaaagtggccaagtgtggtggcacgcgcctgtagtcccagctactcgggaggccgaagcaggagaattgcttgaacctgggaggcagaggttgcagtgagccaagaccatgccattgcactccagtctgggtgactgagactccgtctcaaaaaaaacaaaaaacaaaacaatacccaaacaacaaaaaaaactttttaggccgggtgcggtggctcacgcctgtaatcccagcactttgggaggccgaggcgggcggatcacgaggtcaggatatcgagaccatctggctaacacggtgaaaccccgtctctattaaaaatacaaagaattagccaggcgtggtggcgggcgcctgtagtcccagctactcgggaggctgaggcaggagaatggcgtgaccccaggaggtggagcttgcagtgaaccgagatagcgccactgcactccggcctgggcgaaagagcaagcctctatctcaaaaaaaacaaaaacaaaaacaaaactttttagtagacatggaagcggtctcaaaatcctcgcctcaaatgattctcctgcctcagcctctcagagcattgggattacaggcgtgagcaaacatgcacccctactttttgaataaacactgtggtcctgtctgtcactatattcacctcccgcaaagcccaactacttactgcgaggcgccagtcgatcaatgtatgacaggagctgagacttggccacaccaggatcccccatcagacagatgttgatgttgcctggaggaagggaaggcagccctggaatgactcttctcccagtgcttggccaacaacagagcaattttgagttctgcctacccctaacacccagcactatttctaagccctccctgtgtccacgaaggcaagatgtccactcatactgtgacctacagggacacttgtcatccttttttcctcctaaatgacttcatccaccctgagcctctcccttgtttcttcttaccccggattttcatgcctcgaggagactggtccacacccccgactagcaggagcagcagtgccttcttcacatcttcatgcccgtatatttctggggcgattgaagctgccagcttttcgtagaaatcctcctctgtagagaagttaaggttgttttattttctgggggaaaagggagctaggatgtaaacggaatttcctctctctcccctgcccctcacctgcaatttgcctcagctcctccctggtgagctctccagccccagactcatcatcctcactcttgttcatcttcacaatccgatgggcttccaggtaggtttctgagagtaaacccttgggcaggaaaatgccaggatacagatgtaatcccttcaacttgcccatcactggattccctaacaatttcttgacaaatccctgggttctgttttgtttggggttttgctgctcttttctctgtgtgggtagaatgagtaggtgagggaaaaggggatgatccattcctcatgtcaaactcttccttacctgtaccacctgtcggaacccagtgcgcaggattggcaagaaaataccagtgacgctgacgtggtctccaggctgggcaatccttgtgttctctccttctaccagcaccgtgatactacgagggatatttcccacaggcacctgatcactctaggggagggaaaggcacataagactaggagaaatggacaaggacccaaccttccctccctaggcatcccactcaaaggctcccaggc

SEQ ID NO: 97248 - DNA, 12704 bp, Homo sapiens
aaagtacttgcaaagattcctaggagggaagagggagaagaagcagaaggtgagctgacccagtctcagaaccctcgtgtgcttgaacccacagccttcatgtgcttcagccctacgttgtttatgtccagaatcagatattggagctgactctgcctgtccagggcctgcaggtctgtttgtatctaccttgtgctaagcttggtcctgggtcttggacaggctatttgctgtgttaccttcttttctacccgaagacctctatccatcagaaaagactccctgggccctcagggaatgaccagtataatttttgccctgaggactgggacagaaacccccctccattacccaggcttgttgttagttgttttgcagccaaattggcaaataaatggcagaggctttggaggcagggttgtcgggtctgtcagactgtaagggcaagaaacgcgctttgttgaaagaataaatgataaaggattcaaagtatggagagaggctgggcgcggtggctcttgcctgtaatctcagcactttgggaggccgaggcaggcagatcacctgtgctcaggagttcgagaccagcttgggcaacatggcgaaaccctgtctctactaaaaatacaaaaaattagccaggcatggtggcacacgccggtaatcccagctactcgggaggctgaggcatgagaatcgcttgaactcgggagatggaggttgcagtgagccaagacgatgccactgtactccagcctgggcgacagagtgagactgtctccaaacaaaaacaaaacaaaagaaaacaaaacaaacaaacaaaaaacaaagtaagaagggaggaggcattcattaaacaaatatttacaggttacttacaatgtgccagacacttctagattgcaccaaggaacaggacgtatgaaaatccttgtcccttacattcaagtgctggcctgtgagaaaatttgctatatgtagaaggaaagctgtctggatggaagggaaatgcttattttcagggtaggggactgtgaacacgtcattcagatcatgttagaagttatgtcgtggccagggggtggcagataaaaattaaaaagttacaacagtagtcatctggatgttccttccacagagtggctgagctcccttcgggcccatgttgtgcgcactggcattggacgagcccgggcagaactctttgagaagcagattgttcagcatggcggccagctatgccctgcccagggcccaggtgtcactcacattgtggtggatgaaggcatggactatgagcgagccctccgccttctcagactaccccagctgcccccgggtgctcagctggtgaagtcagcctggctgagcttgtgccttcaggagaggaggctggtggatgtagctggattcagcatcttcatccccagtaggtgggctgatcccagtctttttttcaaatgttttctagtagcatcttgagctcttttcttgaattattaaaaataactatcattaattaaaaaattagccaggcatggtggggtgtgcctgtagtcccagctataagaggtttaggtgggaggattgattgagccagggaggttaaggctgcagtgagccttgatcgtaccactgtactccagcctgggtgacagagcaagaccctgtctcaagagaaactccaaaaacctcaaaaaactcgttttcttaattggacacactgggaaaccaagtatttcagagtacagaaggactggggacagatacagggtgagacctttggtgtcttaacctcccatcaccatccccacaggtacttggaccatccacagcccagcaaggcagagcaggatgcttctattcctcctggcacccatgaggccctgcttcagacagccctttctcctcctcctcctcccaccaggcctgtgtctcctccccaaaaggcaaaagaggcaccaaacacccaagcccaggtcaggagcctcccatccctcagaactcccttcccctaggaagcagatcacagaaatggggtgggcctggtggctgttcagaaagtcccaggcccctgagagaggagggctctattgtgaagccatttagctcttcccaacactcatcactgctgcatttatctaggccatatctaacacataccactggggatcctagggctaggcactgcgtggagccaaagggaacgtggcctcacacccaaggagatccaagtctgatgcagaaggccccgcctcattcttaggtctgactagaagaccctccccccgcacaaagaagatgacccccacctttaaggatcccttctcttggagaacaagaatttattgttttcttttcttctctatcccaagcccatctctgatgatgaagccagtgatggggaagaaacccaggttagtgcagctgatctggaagccctcatcagtggccactaccccacctcccttgagggagattgtgagcctagcccagcccctgctgtcctggataagtgggtctgtgcacagccctcaagccagaaggcgaccaatcacaacctccatatcacagagaagctggaagttctggccaaagcctacagtgttcagggagacaagtggagggccctgggctatgccaaggccatcaatgccctcaagagcttccataagcctgtcacctcgtaccaggtacccaggggctagagtgggaggaggggtctttactggccagtggttagtaaccccagtggggttcaggtacagtggtgaagattttatggggtctaggacttgcacaaaagaaaaaaaaggaaaattgatgaaagcagattggcaaaatcttgatagttgttgaagctgggagatgtacgatacttgggggttatatggatctctctacttttgaattttttaacataattaaaagttttttatttttaattttgtttatttatttatttattcatttatttagcagagatggtgttttgccgtgttacccaggctggtcttgaactcctgggctcaagcaatctaccctcggctcagccctgcaaagtgctgggattacagccatgagcccttgtgtcccgcctaaaaagttgtttaaaagaagtttggactctgaagcctaacagaccagggtttgaactctggttcctgtcattcactaactgtgtgactccagacaagttacttaaactctcaaagcatcagttttctcattagtaaaaaggggctactattaaatgaaatggtccctgtagcacaggacctgacatagagtaagccctcagtaaatgttagctcttgctgttggaatgatgatgatggtggtggtggtggtggtgactaatatcatcattattttctacttcttactgctggtctccatccttctgggaaccaaaagacaaattacccagccctcattctatccaaaattctcatcttcaactacacccaagctttacacagccacacagttgccaagcagccaggctggcttttatgtcagcatctgctagaggagtcagcttcctttccactggctctacctcttccatctcctcactcttctttcttgcctctgcctcctcctcctctaggaggcctgcagtatccctgggattgggaagcggatggctgagaaaatcatagagatcctggagagcgggcatttgcggaagctggaccatatcagtgagagcgtgcctgtcttggagctcttctccaacatctggggagctgggaccaagactgcccagatgtggtaccaacaggtcacaccctggctcagcccctacttcagttttgctgtgtctcagagttcctgccccagatgtgtgctgtgctctgccccagatccctatgctgtgctctgatgggaatgcacccacagtatagggagaccatttttcaagcggaccaggactcatatagacccctcagctcccagaacagccttgttgcttggtatccttaagaaggagtagacagggacaagaagtatgtttctcagtctccccagaccagcaagggccttcctgaggaggccaggccttgacactgcgtgtctagagcagtggttcccaatcctggctctgcccacaatcaccagggcagcttggtaaggatgaagatgacaaggtccatcctcagactgatggaatcatgaacgagcatcttaggatagtggcagggctggatgatggcatgtttcccatgctccctgcctttcccaagtcctgctgagtacagacccaactgcccctaggttggtcctgcctctagccttccctagagtctggggcgatggaagccttgtgtgtgtgctcactcatgcctcttcattggtcctggatccttacagcttcccatctggctgcttttttccagggcttccgaagtctggaagacatccgcagccaggcctccctgacaacccagcaggccatcggcctgaagcattacagtgacttcctggaacgtatgcccagggaggaggctacagagattgagcagacagtaagcaggtgtcccagagcagtgaggacagccaggtcctgctgtaaggtcttgggtcaaagccaagaacccccaactcctcagctggggaggacagcaggcagaggaaactgtggatcaccagaggttgagcacagagcaagttaagactgaagctccaggcccagaggtgggggtggggagctttgggaggaaagagctgtaacaccagccctctagattctggttctcagtagtcaggcctattaggattggattcaattctagactgattggtgttaggattgggttaatgttagggttagattacaggtgaattatatctgtactgaggttagggtgggtcagggcagagggttttaatattttattttatcttttttttttatttcaccaacttctttgagaacctgatgaaaactgtggactgttttctccccaaaatgcacaaatgtgcaaaggtttatgtctttttccagatgtatggaccttctaaagcccacgcaaggctggctcaggatttggggtagagttggtgtaaaagcacagtgtcagtaggatttggtttggggctggaagaaagctccatcaagatggagttaagaccaggcacagtggcttatgcctttaatcccagcacattgggagaacagggtggacagatcatctgagctcaggagctcgagaccagcctggccaacgtggtgaaaccctgtctctataaaacatacaaaaatttccagcctggcaaacatggcgaaaccccgtctctactaaaaatacaaaaaagttaggcgggtgccgtggctcatgcctataatcccagtttcttgggaggctgaggtgggagatttgcttgaacctgggaggcggaggttgcagcgagccaagattgtgccactgcactctagcctgggcaacagagcaagactctgtctgaaaaaaaaaaaaagattgagttaaagttaggctttaattaggcgtaggattttcttaatgttggttgcttttaagttaagatttgtagttgtccaagaaataagatttgggtttggtttagagttgggttagcgattaggttcatgtaaaagctagattagagagacactggactgcatttagggctagatgtatcatttgttcaatgggcattaggattaggagctgcttgtaataggcaagttttgctcactttggtcagggattctgatagagtgggatcccatggagactggcctagtttgattgaaatcagcccccagctccattccaggccacaaggctatgaggccggtatgagatggatggacaggcctctttgtctgcccatcaccaggccttggtgctagtgatgacaccgtcactcagccatggtgtccgggcatggagaatgcctcagtcagtacccagcccattggaacaaaagaggcttcccacctggcctcctgtgcccccatttaagggctccagccataggagttttgatgggattactcacgtggacctcctccttccattctcttgggaggctcaagaagggagtaaggggattagcggagccctcctgtcaggatacttgaggtgtccggggccccagaattytcagtgtcctggggtggaggcaggaggccatctgcatatgaaagaacctcagtgtctcaggggtggaggctaatgggtttatttttcctcagagggacaatccttcagctggcagttgctgtctcagctccctccccaccaagaaaggatgtgggtgttggctcagaactgccccctctttgctttctttcctctcctttcccacaggtgcagctgtatttctgtgctccactttctcctgggcctgggcctggcgcatgctgccagccacctgctcagtcctcaaaccccagctcacatattccaaacctttagctccaaatcagtagatatctggggctgcctagacctggctgagggctttcagcacctggccccttgtcctaagtggagtttcacagacctgggcacgtgggctggggcaggggcagagagagtctgtgtctccctactcttaaagagctccacrgggcaagctcagtgcccactctcagaagcagagccggcaccttctcccgtctctcctcaggcttgcctcctgcacagtgagctttttcttctctcctgtcctagcgaagggaaagaacagcagctcctcagggtggattcccctgggcttgcagcaggcatctggaatgggcataagctgagggtgtgggcccgagtctgggaaggcccttgtactgctgtgggagaggagctccccacgcacagcccctcacctgtcaccgctctctttcccaggtccagaaagcagcccaggcctttaactctgggctgctgtgtgtggcatgtggttcataccgacggggaaaggcgacctgtggtgatgtcgacgtgctcatcactcacccagatggccggtcccaccggggtatcttcagccgcctccttgacagtcttcggcaggaaggtataagctccatctctgggtgagcaggttgacagagggcagcacaggtctgggggccccctcagagggagaacctcagaagttccagtcctgaggcaggaagcaggggaacagtgctttgccagcatcccatctctctatcggggccggaatcctctccagggagagatggaacagccccgccacacctatgtggaggtgctcagtgaaccctgcaggccaagtatctcatctgatctttctgtgacactatgggggagatgggaattactatccatgttttacagaaaaggagaagggcccagagagggtagtgtcacccagctaatacctgggcaagccccagcttagacatcaggagagacctgggaggatgggacagcccaggcctggttccctgccctcccagcagtcccctctgttgggccagggttcctcacagatgacttggtgagccaagaggagaatggtcagcaacagaagtacttgggggtgtgccggctcccagggccagggcggcggcaccggcgcctggacatcatcgtggtgccctatagcgagtttgcctgtgccctgctctacttcaccggctctgcacacttcaaccgctccatgcgagccctggccaaaaccaagggcatgagtctgtcagaacatgccctcagcactgctgtggtccggaacacccatggctgcaaggtggggcctggccgagtgctgcccactcccactgagaaggatgtcttcaggctcttaggcctcccctaccgagaacctgctgagcgggactggtgacccatggctgggggtgctgaggagagccgagttggactggctacccctcctggccacccagtactccctccagcctcagctggctgaacctcgccgctccaaccaccagcttcctcagcgagcagggcccagggctctgggcctgaagcaagagccagcccggctcccagtgtctgcccggctcccagtgtctgcccagccctctcccagacaggagcaggctgccaccccttctacctcaccactgcccctcgaagaattttgcaaatggccccttgccccattttaagcaggagcaggtggctggtttgaagccccaggtatcccccttccctgctatgggaaaggccaagctgctgggtggggacagaagctgcaggggagagggaagcagccgtgctgtcaacatcatccggcaccctctggggtaggagaacagccattccacatgtgttccctctatccgtcctgcttcctgggcagctggtggtgctgggaatggggtgccccagccttggtgaggacagtgttgggaggcccaggggcccagtaaagtgcatttgacattgaacctgcctggtgtctgagctgctgcagcctctggctaccttgttccacccaggcagggacgacagagatgggaactgaaaagaggagcccagaaaggctgtgttaactgccctccagacaggactggcctgagtcagctcctaaactcacagcaaggacagcagtggctgtgaccagggagaatgttggagccaggcacccagagctcctatctagtcatcagcatcttctgcaggccctaccttagaccaggctatcaggggacatgagcaaaagtgacaagactcaggaaaccattaggaacaactaaatggtgaccgtgtacacagggatgggcggccagggaaggcttcccggaggaggagagaggcagactggcagggaaattgcctctgagaggagtcagcaggctctgtttggggacaattaaggaacagctttagagaggacactgtgtgctgggagtcaggagcaggctgggctggcagaggactggaagcagagcttggtttgatagagcagacaggagcaggtcccgctggggagtgcgggatgtcttcctgaggctgtttcacagggcagggagacttggtgggggagtggggtcatggaaggagcttcaggcagcccaggtatgaggaggagtgggcacagagtcagaaggagactgtattggaggaggagcctggagaggccccatgctgggagttgggtggtgacgcgtgagggcagctttggctccacagggggatcccaccttgagtgtgctgggtgggctacatttctgttggtaacttgcagagtcccggagccagcctttgtctgcctggtctcgatcatgggatcctagcagcctgggagtaggccccccaactcaagctcatacccctgaagtgtaagtcagggggtcttcccagcactgatcatgttgggaaaggaatcagaagcccacaggacctggagggccctttcgcagctcagcaccaacccaagagatggccaatcaaaagcccagaagccttctagaggggcgagcctctcccctgagagtgtctactgccagggacacatggctgccaagagccacagtgggggcctgggtagataggagaggggctggggaaagcctgggcccccgggtgtgaaggcttgcttttggtcccactctggactggtccctcagtgcctgctgctgtccccagcaagagttggagtcagcagaagtccaaagatgcgtgtctgggtccaaatgtggaagttgcttctctccttttgccgcagcctgctccaggcccaaggaacaggacctccagggctgggggtggagggaaccagtgtgcagcaggccatagagtagctcgcccaagttttcctacacacagggaggtcccagaactgcagggagggatgccgcttacttctttgtctgaaatcagggtctgacctccattcttgacatccctccccatctgccttaactccttcccccaggagactcagaattcagagactgccttgaaaccatgcagactcttggtcccacctcctggccagggcaacacaaagtcgtgggataaagagggagcatgccccacctccagtgacccatctgggtgtcccttcagctgcccagtctgacacagaagcccaggagaagagccactgaggcagaggagctaatggagggatttctgagtcttgagaaaggctgcccagtttggaggtaaaatgaggtgaaatgaggttctctgagtccaagtaagcaaggaatatgaatattgggggttcccaggcactttagcgctgaaccaggttctcgaacaggctttcagcccagtctcccattcatcctgaatggagagagactccatttcagggccctggtggtaactggggtcctgtccagcagctgagcaccccgcacacctaccacccagtcaccacctggcctggagtgggcagagagaccccacaagcctgctccctgctccagcccagttcttcatcactctgtccctgagccagggttgtccttggacaggccacgtgtggcaggcagaataatggtccactgaagatgtccatgtcttaatccctggaacctgtgaatatgtcaccttagttggctagagggactttgcagttgtgatgaagcttaagcattttgagatgaggtgattatgctgagtaatcctgtgggcccagtgtaaacatgagttcttaagagctacagtcagggccgggtgtggtggctgacgcctgtaatcccaacactttgcgaggccaaggcgggttgattgcttgagcctgggagtttgagaccagcctggtcaacatggcaaaaccccatctctaccaaaaaaaaaaaaaaaaaattcaaaagttagctaggcatggccagacctagtggtgcctataatcccagctacttgggaggctgaagtgggaggatcacctgagcctgggaggcagaggtgcagaggttccaatgagctgagattacaccactgcactccagcctgagttgtaacagagtgagaccctgtctcaaaaaaaaaaaaaaaaaaaaaaaaaagctacaatctacaatcaaagagagacttgacgaggaaaggtcagagagatgcgaagtttctggctttgaagatggggaaaggtctccagccaagtgtgagcagcctctaagagtcagagaagccaaggaacagcttctactctagagcctccagaaggatggcagctctgctgatgtctggccttatctcagggagccctgttggattttgagctggtggaactgtgagataatgactgtggtgtttaagccagtaagttggtgtaatttgttaatgtgactgcagaaacccaatagaccgagtgcgtgttgggctctccctgtacaaaggcagagggacagcaagtgtgagcaggccctgctgtgaggtagagggcatcctctgaagtgtgtggggaagggggagcctcacatgagcccagggctgccacatgttcagtctgagcctccctaatttcagtttcttcttgacactgtgcaagatgcaagtccccgctgggctgctctgccccacccctactgagcttggagcttcatcttttcccagggcctggggtggggacctcagtcttgaccttagacctacactaaaaggggagcaagacaggccccggcctttcctcctgggttccagctgctcacaaggcagacgtgggcaccgggaaaggggagcgagacaggccctggcctttcctcctgggttccagctgctcacagggcaggtgtgggcatgggacaggggcttcccaggcatcacctggagtgggcatgacaaggtaggcaagtctagctgtgtcccatcctacagttccaatggctgggaaaggcaaacccaggcccattgtcttgcttctccaggagaatcatggaattactctccctttaaatggaatgggatgcctcttgccaggatggaggactgtggcttggagaagacttgggctccccaaacaggggcgcccctttccaggccctcccctgttatctgagggagtggcctcccatgcaagttactgctgttggggcacctgctgctaccaggcttgcaggccttgatgggctcagccgcaggtgcctttggccctatgtctgctctgcccttagttttccagaactcttgagccactggggagtactgcttctgagctctggaactggggagtcctcagggatgaagtcccaaactggcctgaggctctgttcggcaagacctggtccccacactgcagggaacatccctgaagaaggccccaggcctggagatgaagcaaggccccaggggctgaggggccatgggtaggggcccgaggttgcccctggagggcagtacggaccccagggaaggcaggctactggccgttgcttgagtggagcctcttagcaatggtggcacctttgccctgctggactcagcctggccctgacggagcaggcccagagccccagacacagcgcacctcccccatcctttgctccggttccctcagctgggtggttgttgttgtgtgtgtagtgcccctgcatatgtgtgttcatgttccactgcaggggcatgtgtgtgcctaatgcacattcccggcccctgcgtctgtgctgtatgttcatgattttgtatctgagtgtgtgtgtgctcaaccctgggcatgtgaccgtgtggccctgtctgtttaggtcttggtggaggccctgcgttgttaagggctcaggcaaggccttg

SEQ ID NO: 97249 - DNA, 14133 bp, Homo sapiens
tcataccaggaccagaggaaacctcagaaaaagtagaaaatggaagtctatgtgatcaagaaatcgatagcatttgcagtatagagcgtgcagataatgacaaggaatatctagtacttactttaacaaaaaatgatcttgacaaagcaaataaagacaaagccaaccgatacttttctccaaattttaaggtcagttaaattaaacattttgtgggggttgttgacttgtatgtatgtgatgtgtgtttaattctaggagtacagctgatgaagaacttgcttgacaagtttttaacttatgtattatttcgaagcagtgtttacgtagcagtaacatgaaagtttctaataaaatacccaatgtacacagcgtcaaaaaagctgcatttttccttttcctaattctttgttgtttgctgaaatctggggcaaaggtgcgggagggggctaaatgactgggatatgaagtaggaatgggagaggaaagaaatagatgggaactcagtcatttgggaatgattcatatggaatgtttttactgcttccactcctgtctgccttccaatttattctcaatccctcagagtgatcttaaaaatagacttgattgtgtcacttctgtttacactttataaggaccttgtgtttttttttttaccatgacctacaaggcccagcataatttagcacagggctacctcctacatcagcactagtcaccttctctccttgtttcttgagattcagtcatactggtctttcttcagttcttcaaaatgctaagcttctgcctcttctagtctttccagttattttccttctccctgtaccttttcatctcagccttttcccctgaccttccatagctatcttcatatttccagccttagcttcaatctcatattctctgaagtcctttgattgtcctcccgttattctttttttaaaaatcctatttccttatattgtatcttagaattatttggtttgtttcatttttgcctatgtgtgatatatgtatttctacataggtatatatatctacttatagacaagaattcttcagattaaaaaaatctgatttgtaaacattcccaagtggttgtttaccatttttttcttcccccttcctatttcttattctacctgattttcccctgttcattcaccacactcgtttctttctcttttttactctctcttaatttttcattcaatttttataacatgtaataaatctaactgtagcgtctgagtattaagaatattgctagtaatacttcacctgtaatcccagcactttgggaggctaaggcaggcggatcacttgaggcccaggagtttaagaccagccggccaatatggcgaaaccctatctgcactacaaatacaaaaattagctgggcatggtgtcgcacacctgtaatcccagctacttgggaggctgaggcacaagaattgcttgagcctgtgagatggaggttgcagtgagccgagatcacaccagtgcacgtgcacttcagcctgggcaacagagcaagactctgtcttaaaaaaaaaaaaaaaaaaaaaatatatacacacacacacacacacacacacacacacacacacactattactaccaatatacatacatatatgtatgtatgtatgtatgtatattggtagtaatagtaatacttgggcccctgcacgttttaagtgaaaatagatctaatattaaatgtctttagcccttaaattttttttaagtgttcagaagtttccctttaaaaaaatttttaatatataataattgtacatatttatgggatacagagtgatattttcatgtatgcagtgtgtgatgatcaaatcaggataattagcatatggatcacctcaaacatttgtcatttctttgtgttaggaacattcaaaattctgtcttctagctatttgaaaatatacagtaaattattgttgactagttacagttctatagaacactataatttattcctcctgtgtgtaattttttatcttttaaccaacatctccctatcctcccctcccactccctttcccggcctctaataaccacactcttatgagctcaacttttttagcttccatatatgagtgagaacatacggtatttatctttctgtacctgacttattttacttaacatcatgtcctccgggctagacattctctttagaatccacaggtttcctttcttttctctaaatctgcattttgctcagccattaacttttaaaatgtctttttccctttagttttattgttttctattttaatattgcaagatgttttatatttgtgattacaaataaaaactccattattagtaaacaaatacaatgtcatatagtagtaagtgctataaaaaatagacaggatagaaagtaatcttggtttgtatgttttttgttttttagcaaagatgattagagaaggcccaaccaagcagataacatttaagcagaggcctaaatcatataagtgagttatacaaatatctgggaaaagagttaagagtacagatgcaaaagcccttagacaagagaatgagcttggtatatctgaagagtggataagtcattttgactgaaacagagtggacaagaaaaccagtccaagtgtaaagacactagtgtgtgttcagcataggaaggatgtaatctgaattttgtgtttaatattccctgtgttcatgctttcaaaatacagatgagtgaggaaagtagggagaaggggtaataaaggaagctgagagatcagttaagaggtacttgaatagtttagtaaagatgagagaagatgtttgcttcttgttgcccctcactgcttagaatagtggcagtgaagggtaacaagaagctgtcagattaacttaaagagtttactgatgcagtggatgttggttgtaagagaagaattgataatgactcttggataataggggagggaggggctgtcaatataatataatgaagaagggatttgaagtcatttctgatttaaatctcacatccactacctacttttaatagatatgtagcctttaacaagttccctaacctttctgggccttagctacctccccttggaaatggaaatacctaacatgtaaggttgttttgacagttattttcactaggcatgtaaaggcacttgactctctgttatagaccactgtattatgttaatgtccctctccttcctccctttaggtaaagtttttagggctaataaatcccaaatatcaatgttgatcagtagtttgtgtttgtgtagtgttgtttatatcaaaaactacattgaagccgggcacagtggttcacgcctaaaatcgcaacactttgggaggccaaggtgggcctcccaccttgaactaaggagtttgagaccagcctgggcaacatggtgaaatcccatctctacaaaaaatataaaagctagctgggtgtggtggcatgcacctgtagtcctagctacttgggaggctgaggttgatcctgggagtttgagcctgcagtgagctgtgaagatgccactgcactctagtctgggtgacagagcaagaccctgtctcaaaaacacacacacacacacacacacacacaaagaaatacattgatttttcacataggtagtaagagaaacattctttttgaactcagctgtttgtgaattgaattttgtaattcaaatgctatattatgtaaactattgatgactttcaatctgcatttattttgtataattatttagttaatatttgccacttatattccttaaaaaataaaattgaggttgggcgtggtggctcacacttgtaatcccagcactttgggaggctgaggcaggcagattgcctgagctcaggagtttgagatcagcctgggcaacatcatgaaccccatttctactaaaatacaaaaaattatctgggcatggtggtgtacacctgtagccctagctgtttgggaggctaaggcacgagaattgcttgaacccgggaggcagaggttgcagtgagccaagatcatgccactgcactccagcttggcaacagagcaagactcttgtctccagaaataaaaataaataaattgtattaacatcctgatagtttatctgtttagtacctagcaagaaagaaaatgttgaacatcttaagaagagggtcatttaaaaggcctcttaaagatcatgtttgttacagtgcttaaaaattaatatgttcatctgcaaaatggaataaaaaatctgttaaaaatatatttcactaaatagtttaagatgagtcatatttgtgggttttcattttaaattttctttctctaggtgaagctgtacttcacaaaaacagtagaggagccgtcaaatccagaggctagcagttcaacttctgtaacaccagatgttagtgacaatgaacctgatcattatagatattctgacaccactgactctgatccagagaatgaaccttttgatgaagatcagcatacacaaattacaaaagtctgaatttttttttatcaagagggataaaacaccatgaaaataaacttgaataaactgaaaatggacctttttttttttaatggcaataggacattgtgtcagattaccagttataggaacaattctcttttcctgaccaatcttgttttaccctatacatccacagggttttgacacttgttgtccagttgaaaaaaggttgtgtagctgtgtcatgtatatacctttttgtgtcaaaaggacatttaaaattcaattaggattaataaagatggcactttcccgttttattccagttttataaaaagtggagacagactgatgtgtatacgtaggaattttttccttttgtgttctgtcaccaactgaagtggctaaagagctttgtgatatactggttcacatcctacccctttgcacttgtggcaacagataagtttgcagttggctaagagaggtttccgaagggttttgctacattctaatgcatgtattcgggttaggggaatggagggaatgctcagaaaggaaataattttatgctggactctggaccatataccatctccagctatttacacacacctttctttagcatgctacagttattaatctggacattcgaggaattggccgctgtcactgcttgttgtttgcgcatttttttttaaagcatattggtgctagaaaaggcagctaaaggaagtgaatctgtattggggtacaggaatgaaccttctgcaacatcttaagatccacaaatgaagggatataaaaataatgtcataggtaagaaacacagcaacaatgacttaaccatataaatgtggaggctatcaacaaagaatgggcttgaaacattataaaaattgacaatgatttattaaatatgttttctcaattgtaacgacttctccatctcctgtgtaatcaaggccagtgctaaaattcagatgctgttagtacctacatcagtcaacaacttacacttattttactagttttcaatcataatacctgctgtggatgcttcatgtgctgcctgcaagcttcttttttctcattaaatataaaatattttgtaatgctgcacagaaattttcaatttgagattctacagtaagcgttttttttctttgaagatttatgatgcacttattcaatagctgtcagccgttccacccttttgaccttacacattctattacaatgaattttgcagttttgcacattttttaaatgtcattaactgttagggaattttacttgaatactgaatacatataatgtttatattaaaaaggacatttgtgttaaaaaggaaattagagttgcagtaaactttcaatgctgcacacaaaaaaaagacatttgatttttcagtagaaattgtcctacatgtgctttattgatttgctattgaaagaatagggtttttttttttttttttttttttttttaaatgtgcagtgttgaatcatttcttcatagtgctcccccgagttgggactagggcytcaatttcacttcttaaaaaaaatcatcatatatttgatatgcccagactgcatacgattttaagcggagtacaactactattgtaaagctaatgtgaagatattattaaaaaggtttttttttccaraaatttggtgtcttcaaattataccttcaccttgacatttgaatatccagccattttgtttcttaatggtataaaattccattttcaataacttattggtgctgaaattgttcactagctgtggtctgacctagttaatttacaaatacagattgaataggacctactagagcagcatttatagagtttgatggcaaatagattaggcagaacttcatctaaaatattcttagtaaataatgttgacacgttttccataccttgtcagtttcattcaacaatttttaaatttttaacaaagctcttaggatttacacatttatatttaaacattgatatatagagtattgattgattgctcataagttaaattggtaaagttagagacaactattctaacacctcaccattgaaatttatatgccaccttgtctttcataaaagctgaaaattgttacctaaaatgaaaatcaacttcatgttttgaagatagttataaatattgttctttgttacaatttcgggcaccgcatattaaaacgtaactttattgttccaatatgtaacatggagggccaggtcataaataatgacattataatgggcttttgcactgttattatttttcctttggaatgtgaaggtctgaatgagggttttgattttgaatgtttcaatgtttttgagaagccttgcttacattttatggtgtagtcattggaaatggaaaaatggcattatatatattatatatataaatatatattatacatactctccttactttatttcagttaccatccccatagaatttgacaagaattgctatgactgaaaggttttcgagtcctaattaaaactttatttatggcagtattcataattagcctgaaatgcattctgtaggtaatctctgagtttctggaatattttcttagactttttggatgtgcagcagcttacatgtctgaagttacttgaaggcatcacttttaagaaagcttacagttgggccctgtaccatcccaagtcctttgtagctcctcttgaacatgtttgccatacttttaaaagggtagttgaataaatagcatcaccattctttgctgtggcacaggttataaacttaagtggagtttaccggcagcatcaaatgtttcagctttaaaaaataaawgtagggtacaagtttaatgtttagttctagaaattttgtgcaatatgttcataacgatggctgtggttgccacaaagtgcctcgtttacctttaaatactgttaatgtgtcatgcatgcagatggaaggggtggaactgtgcactaaagtgggggctttaactgtagtatttggcagagttgccttctacctgccagttcaaaagttcaacctgttttcatatagaatatatatactaaaaaatttcagtctgttaaacagccttactctgattcagcctcttcagatactcttgtgctgtgcagcagtggctctgtgtgtaaatgctatgcactgaggatacacaaaaataccaatatgatgtgtacaggataatgcctcatcccaatcagatgtccatttgttattgtgtttgttaacaaccctttatctcttagtgttataaactccacttaaaactgattaaagtctcattcttgtcattgtgtgggtgttttattaaatgagagtttataattcaaattgcttaagtccattgaagttttaattaatgggcagccaaatgtgaatacaaagttttcagtttttttttttcctgctgtccttcaaagcctactgtttaaaaaaaaaaaaaaaaaaaaacatggcctgagagtagagtatctgtctactcatgtttaattaaggaaaaacacttatttttagggctttagtcatcacttcataaattgtataagcacattaaatagcgttctagtcctgaaaaagtccaagattcttagaaaattgtgcatatttttattatgacagatgtttgaagataattccccagaatggatttgatactttagatttcaattttgtggcttttgtctattattctgtactctgccatcagcatatggaaagcttcatttactcatcatgacttgtgccatataaaaattgatatttcggaatagtctaaaggactttttgtacttgaatttaatcatgttgtttctaatattcttaaaagcttgaagactaaagcatatcctttcaacaaagcatagtaaggtaataagaaagtgtagtttgtacaagtgttaaaaaaataaagtagacaatgttacagtgggacttattatttcaagtttacattttctccatgtaattttttaaaaagtaaatgaaaaaatgtgcaataatgtaaaatatgaagtgtatgtgtacacacattttatttttcggtatcttgggtatacgtatggttgaaaactatactggagtctaaaagtattctaatttataagaagacattttggtgatgtttgaaaaatagaaatgtgctagttttgtttttatatcatgtcctttgtacgttgtaatatgagctggcttggttcagtaaatgccatcaccatttccattgagaatttaaaactcaccagtgtttaatatgcaggcttccaaaggcttatgaaaaaaatcaagacccttaaatctagttaatttgctgctaacatgaaactctttggttcttttatttttgccagataattagacacacatctaaagcttagtcttaaatggcttaagtgtagctattgattagtgctgttgctagttcagaaagaaatgtttgtgaatggaaacaagaatattcagtccaaactgttgtaaggacagtacctgaaaaccaggaaacaggataatggaaaaagtcttttaaagatgaaatgttggagccaactttcttatagaattaattgtatgtggctatagaaagcctaatgattgttgcttatttttgagagcatattattcttttatgaccataatcttgctgtttttccatcttccaaaagatcttccttctaatatgtatatcagaatgtgggtagccagtcagacaaattcatattggttggtagctttaaaaagtttgtaatgtgaagacaggaaaggacaaaatagtttgctttggtggtagtactctggttgttaagctaggtattttgagactacttccccatcacaacaacaataaaataatcactcataatcctatcacctggagacatagccatcgttaatatgttagtgactatacaatcatgttttcttctgtatatccatgtatattctttaaaaatgaaatttatactgtacctgatctcaaagctttttagcttagtatatctgtcatgaatttgtaggatgttccattgcatcagaaaacggacagtgatttgattactttctaatgccacagatgcagattacatgtagttattgagaatcctttcgaattcagtggcttaatcatgaatgtctaaatattgttgacattaggatgatacatgtaaattaaagttacatttgtttagcatagacaagcttaacattgtagatgtttctcttcaaaaatcatcttaaacatttgcatttggaattgtgttaaatagaatgtgtgaaacactgtattagtaaacttcatcacctttctacttccttatagtttgaacttttcagtttttgtagttcccaaacagttgctcaatttagagcaaattaatttaacacctgccaaaaaaaggctgctgttggcttatcagttgtctttaaattcaaatgctcatgtgacttttatcacatcaaaaaatatttcattaatgattcacctttagctctgaaaattaccgcgtttagtaattatagtgggcttataaaaacatgcaactctttttgatagttatttgagaattttggtgaaaaatatttagctgagggcagtatagaacttataaaccaatatattgatatttttaaaacatttttacatataagtaaactgccatctttgagcataactacatttaaaaataaagctgcatatttttaaatcaagtgtttaacaagaatttatattttttattttttaaaattaaaaataatttatatttcctctgttgcatgaggattctcatctgtgcttataatggttagagattttatttgtgtggaatgaagtgaggcttgtagtcatggttctagtgtttcagtttgccaagtctgtttactgcagtgaaattcatcaaatgtttcagtgtggttttctgtagcctatcatttactggctatttttttatgtacacctttaggattttctgcctactctatccagttgtccaaatgatatcctacattttacaaatgccctttcagtttctattttctttttccattaaattgccctcatgtcctaatgtgcagtttgtaagtgtgtgtgtgtgtgtctgtgtgtgtgtgaatttgattttcaagagtgctagacttccaatttgagagattaaataatttaattcaggcaaacatttttcattggaatttcacagttcattgtaatgaaaatgttaatcctggatgacctttgacatacagtaatgaatcttggatattaatgaatttgttagtagcatcttgatgtgtgttttaatgagttattttcaaagttgtgcattaaaccaaagttggcatactggaagtgtttatatcaagttccatttggctactgatggacaaaaaatagaaatgccttcctatggagagtatttttcctttaaaaaattaaaaaggttaattattttgactattcggttttaaactttttattcaacaaataccaagtccctgctgtatatatgggtttggaatacattagtgatcaaaacacaccctctatccctgcccttgaagagtttacactccagtagaggaaacagaatttacattaacaattataaattgtgatacatgctgtggaaagtgaggtgcatgtgataatggttatcaaacattatgctccccaaaatttccatcaccttgcagttgaatgaggcctatgtaactagtttattctaatgtaatacagaaagtagtgtgacactccactttctgtaaaggcaatgaaaaaaatttaccatccagtttctctcttcccctactgctgtgattaaggattttgcatgttctagatggtgcagctttgtcagcctgggtcttgagtgatactggagcagaactccctcaaattgttccttctgccacgctaaacttgttagatattagcataaataagaaataaaccatttagactgatactttgggacaattttttatcacagtgtaagttatatcctgactaaaacagtgctttggaaagatcagggaagggtttcttgagctacaaaagggagttaagaatgaagcaaaatgaaatatggcatctttaaatgacatgatgcaataaactctaaattgcaagttattcaatagttactgagcaccagatatgtgtcagacactgttctagatgcttgggatacaagtgggtgaacagcaggaccttgccttcatggagcttacattctagcaagggaaaatagtcaacatactatatgtaaggtaatgcgtgctatagcagaaatgaaaggtaagggagctcaggattgctgggtggagagatttcagtgttgaatggtgtagtccagaacaggcctcactgggaaggtaagatttgaagactgctgactaacagtggcattgggattttccttcattctttcaaccagcgagatgcactcagaaccctctatacaattttattctcactttatacaactctgtacattagttctgagtttttaagatgattgttggcatatctagggagaatttttaggaataccacccaaaatagtcgcaatgttctaaaaccattttgttttctaaattggtttggcaaactctatacaaacagtctgttccttttcattctccaagttgagtttttaaatttaaattatactctttgtgcattttgacaatacttacctcttttcagaagacattaaagttctgttatggccttaaaacatttctgtaaagctgaaaggaaatatcatttatgatttattgatgggaaacagttacaaattttgagttacttgacaaacagaagggatgaaatttatggcctagtgttgtgttttcattcttaacccataagcaaaaatctctggaaaagtaccaatatctagtaaaagaaatattttttcacaaaaagtattttctattttcccctcacctcttacctcgtctcacctcaaagttcaagaagcttaactttgtgatcaaaggaaaatagtataattgaatatttgatactatagaaatttgcaactgtataagggcattattaaccttttgctagtgatcagtttcctatcagggcagccacataaaattaggcatgacactttaaaagaaaatgttgactcttaacttttcctcctctaatgcttaattttaaaatagatttaagcaactttaaagacattttcctgagcaactgcattttgttttcattctgaatttaatgagactctttttttctttaacattttactttgctttagaaaggatttaaggcaggtgaatgtgtttcccagtgtgagaaaaattgtcatgtaaatttagaaaaaagtattgtatatgtcccttgattttggcttaagagttagaatttacttagaatgtttcctgacccaacctcattggaatttgaaagtacattccaatagtattgtgagctgctcctttaaacattggtaagtaggcttcaaacttaattttcaaggaaataagccatgcttttactgtagggtttattaatctgaaatacctgagaatgaaaatagttatatgctcctatctaataatataaacagttaaatgtgacctgtaaatattgtgaaatttagcaaaaatataacctgtaaaaataatctctagtaagctaatattctctcagtaataaaacctagagagctaaagtagcccaattaactgacattagaacagatcgtgatatgtggaagaactattagtgaattatagtcatgtttatacttctcttttcaattataatcatgtccttgagatctcattttccagtccttattacctataaggaagagaaatatatgtaaatttcacaaatgcatacgaaaattaccaaacttcttaagtgttattcggtatttctgcagagatatcattaacaggaaagcccaatattttacatggttatctttaacaatggaagtacagtggttgtttaattaattagctaatacttcatttactgtgtatagtcataattcataagaataatacatatgtcttttaggattattagtactgtatattaaataaatgcttgaaagggaaaataccttttagtgtttggtaaaagagtaggcataaggtaaattttcccttctgttagactcagcagaactattcaatgtgtttagctgtccttggagaagactgagccattgttgctgtaaaaatccaatagggttaaaacaaaaatatcactttgaacatgatttacttggctaggagacacttgaagctttaagcaactcaaatctttctctagaaaattaaacacaattctacctcagaaaacttgaagacattgacaattcataggaattctgtgataagtcagctcacctacctaaagaccaaagtgaaggcgcacagcaagagaggaagctgaagtaaggagagaaaagaaaacagaaggaaaagcatggtaagagcccaaattaactctgactactgggggctgctacaggggatgggaagagaatagcattgttctgagcccacagtgtgtgtcatgctgcagtagtcagttcacaggcttg

SEQ ID NO: 97250 - DNA, 366803 bp, Homo sapiens
  misc_feature (1)...(366803): n = A,T,C or G
gctaaaggttggaaagacatgactggaatacttagctggactcctaactcaggttgcatacaggaaagcagactacagtggcccagggatgagcagcaattttctaggactaagtaatttctggagcttgtacatttagaacacatttacaacaatttgtcatgggactcaatctaaaggggctaaattgctacttttatttatcctctgggagggaatgtgagaaataatggatcaagtcacatgataccaattcaacagatatgccaaatccttaatgttctagaatgggtttctgaaatcctatgatttcattggttttagaaagctttgattcgaagaatcttttggtgtacaagttaattcagctgtaagttagttttgaacatgtaaatttcttccaacataatatattgtttgcttagtgggcaattcattctgcaagaaaatgaacgcagaaaactgcacctcttgaaccaagctgcagggaaacacataaagcacatacacacacctccaatagataccagctaacttctttcagtgacattgaactacacccatccatactccctttccctctgattctagatagcccaccttccagataacccaccttcttttccctctattccagatagcccttcatttcacaggaagtcaaatcacaaaccacaacccttctgaggcccatttcaagtcgtcttcaaggtaaagtgccatatttgtttgtagtgcttatatatttcttaaatgtttaacatgtgtaaacccactgtttttaaatgtgtcactggtgaagttttaaagtgctatgccctaataccatttttcatataagccctgtggtttgtatttgtgggacttttcatagtgtagtgatttttagaaactaaaatggaattcagtttcctaaaaggttgtataggctggcctttttcctttctgtatgaaatgtttgcttaataaaatattttgttgttcaacataatttgtttctgcaaaacaggagtaaattctagttattcaaaaattttggggacgagtccccacatacggattacccactcccaaataaattaggggataaaataaatatattaggttggctataaaatgtttttttgtttgttttgggaggcggggtctggctgtgtcacccatgctagagtacagtggtgtgatcttgggctcactgcaacctctgtctcttgggttcgagctattctcctgcctcagactccagagtagctgggattacaggcatgcaccaatacacccagctaatttttgtatttttagtagagacggggtttcaccatgttgcccagcctggtctcgaactcctgacctcaagtaatctgccggcctcagcctctcaaagtgctaggattacaggcatgaaccatcatgcccggcctcagttcactgattaagaaaaacgcctcaggctaccacagtatcttctagatgtttaatgtgaaaataatgtgattgtattttatctatagaatgggagagatgagactacattgacttgcctatgacatcctggtagttgtttactggacatctatgataggaatttgtctatttgacattcacctcttataaaggccattccaagaagcagctccttccctgctgcccttctagaacaagaaatgaagagtgaatgactttgtaaatctctcttgaaaagtgtatagaagtctcagtgaatgtgtttataaaaaagggccaaacggagatctaaatatgtacacatttgctgtcctttttgttacttgaagggttgtgcaaatactacctttctgaagccttccctaaccccaggcaaaatttattacagcttttccaaatactttgtatatacctgttatataatatttagcatagatgggccaatcctcagcatctttttttaaattttttaaccatcacatcaccaatgcctgcctaacacttttgaataagttgtaaatacaagtttattttttgttttgagacagagtcttgctctgtctcccaggctggagtgcagtggcacaatctcgactcactgcaacctccgcctcccgggttcaagcaattctcctgcctaagccccctgagtagctgggattacacgcctgcaccaccacacccagctaattttttgtatttttagtagagatggggtttcaccatgttggtaaggctggtctcgaacttctgacctcaggtgatccatccgcctcagcctcccaaagtgctgggattacaggcgtgggccaccgcacgtggcccaagatagttctaccttacacttacgtagggcatggcatgtgtggctggaaacagtgatccctgagtctttatcttgaacttcttccacttactaaagcaaacctgtatcacctaccttgaaccgttgtttccatattccacagtagccccacctgtcagttaccatccttactatgctgccagaggaccacactcgctctccttgggaaagcagtcagttcgcatctcatcttatacttccttctcattttttttttctatttttttgagaaagtcttgctctgtcgcccaggctggagtgcagtggcacggtcttggctcactgcaacctctgcctcccagattcaagcaattctggtgcctcagtctacagagtagctgggactacaggcctgtgccaccaggcccagctgatttttatatttttagtagagaaggggtttcaccatgttggccaggctggtctcaaacttctggcctcgtgatctgcccaccttggcctcccaaagtgtatttgtttactcatccagctctccacatcttttatcatctgcaaaatttgggtcaaagactaaggggtggtgaggtggtgttggcttctgtacccataatgcccttcctctcaaagtggagtccatttgacccacccatacaacacaggtccttggtataccctccgctggccccagggctgaggtctttttcacagacaagacacagaaggacaatcctgttttagctatagccagttgtgaaaacctccccagccaagaaagggaactaacttacaaggcatgcagccagtgacctggagcctgccaacatttcattgtcacttaaaagtcaattaattgtcattaaaagaaccaggctgattactgtgggagccaaagtacttcacatactactcacatttgctatatttttatacggtttcaaagcatatctatctaggtttacatagtaattgcataaccaggccatgtcataacttttgcagttggaaaggtctgagtctgcatcctggtgacaggcctggcagcatacataaccttgtgtcttggccaacttgttatcccaattcatactgaatactgtattgaatacagaatgataactagctgggcgtggtgtcccacgcttgtaatcccagcactctggatggccaaggtgggcggatcacctgaggtcaggagttcaagaccagccttggccaacatggtgaaaccctatccccactaaaaatacaaaaattagctgggcatggtggtgtgggcctgtaacttcacctacttgggaggctgaggcaggagaatcacttgaatctgggaggcagaggttgcagggagccgagatggtgccactgcactccagcctggatgacaacagcaaattagcaaactccgtatcaaaaacaaaaacaaaaacaaaaaacaaaaaaaccattatatagaataactaaatcactttttcctctcccatggctgactgctgatctcatttgtgagagcatctttaataggctggcatctagaaacagaacatgttgtatcaatctatctatggtatacatgcacagagcaaagtaaaggtatgacagcacttttctgaagcttattaattttacccagatgttattaaatccataacccatctaccaagaagggaagtgacagaaaaccagacactgatttgtctgggtattacagtccccagatgcatggcagaaatgaatttgaatgcacgtattgattattcatgaaaaatccatattccagtaaaaacattatcaattagggccaggtgtggtggcttacacttgtaatcccagcactttgggaggctgaggtgggaagatcacttgagctcaggagagaccagccttggtaacgtagtgagagagacctcatctcttctaaataaataaataaataaataaataaaataaataaataaataacattttaaaaatcacgcctctaatcccagcactttgagaggctgagactggcagatcatcaggtaaggagttcgagaccagcctcgccaacgtagtgaaaccccatctctatgaaaaatagaaaaattagccaagtgtggtggcatgcacctgtagtcccagctactccggagtctgaggcaggagaatcacttgaacctgggaggcggaagttgcagtgagccaagatcacgccattgcactccagcctgggtgacagagtgaaactcagtctccaaaagaaaaaaaaattagctgagcacagtgatgcgtgcctatagtcccagctactcgggaggttgaggcaggaggatcacctgagcccaggagttcaaggctacagtgagctatgattgcaccactgcactgcagcctgggcaacagagcgagagtgtctcaaaaaacattatacactagaatgggaaagaactaaagtaaagtattcaccacgactttccctttataaaggctctttgttgtttctcaaattattgtacacatttaagataacaccataccaccgtctggagggagctgacatactcagacatactcctgaggcgcatcagacccaaccaaaaggatggagagaaaaaggccagaggaactgctccagtgattagggagtaatcagcaatcaatcaactccccagccttccaaaaagcttacaaatgtcattaaggatgtaagcattatggtcctctctcttcaccccagatttacaaggaattaattaggtcagcagcatggaattcagactatggatacaatattcttcagactacggatagaatactgtcattaaggtgggtttgcactgaaacaagccacattacctggctttatcttcgttagcttcagctattcagaataagttgtaaatatggttaaaaggtggctcatgcaagagcaagagaagcaaaaggttttgaggaaaaacaatcaccacagactttgggatcctggcaggctttaggggaccagcaggtggtactctactccagaattaacaccttggctttcacttaattttacatcaaaattaaatcagatggaacatatgaaagcattagacaaaagccactttatcagctgaggcacatttggaaaaatggtatttaaaaaagtcaaaagctcaccaaagaaggttcacaaaatcatctgaaatattcctcaggccaatttttctttctagccaagtagtcattatccatcccatgataagtataggtaattaatgtgaaatgccacatgtaggtaattcacatgaaatgtaattgctcacattcctggctgaaccttgcctgaagtggagggtgttgtaacagattacatggagctaaacgatggtgacataaggaaaaacagtataaactaagcaacttgcaaggtgtcacaacttggactcccacttttttcttttaagctgaatgctttcagttgagaagaaaggctatcctctcaatatcctgcaggtgtcagtggagagctacatctttccagtaacttaaagggttgggaatatgtcagccttaaccaaccgacaatagcagccagctattaaaaccaagacttcaaattaattaaaataactttctaaggtcatacagtaagtggcagaactcatatttatacccaggatgactgacttcgggctcttctctgcccccagtgtcatgcttgtcaacagagggagtactctggaaaaagtcaatttttgataaagtccttttaatggaaaatgtaaaacccctttcaactttaatgtacaaagccatatgtaacacttgcactttaacaaaagcaagccaatgttttaaaaaaatacatcattaaatgtatatatgtatatatttacatagcatattaagtttaatatttagctttaaaagttcacataaattttaccaaaatgagacaattttaaataaattacaccttttgaaaatgtttaattgtacagtcaatagcttcaacaaaatattgaagtgtctgtatttagtatctactttatatactttatactttacaaattttacaattatttggcagtaattttctgattatgacatgactgctgtgcgattcagcaatttcccagatgcaggcaatagctggtgtttgtgtcctattctcacagtaacygtctcaatgtagtgaaaaatatcagtaattttagtaaactgtacaaggtcacatttacacttgatcaacaatatagcatagaattttttattttttaccaaaaataaatacatcattttaaatctggcattttcacaaacatcatatacactataatacaaaacagctatatagtgctgcttttaaaattctgcttgttttataacattgaatcacaggagctgtgacatatgctatactgctgtggtgtcagtaacaagtaattactacaaagagaatttcttggcactgatggttttatgaagcttaaagtcagtgtgcatacatatcatcattcaaggttaagtaatcccagttcaacaacctaaaaatatcaaactggatcacacttaattttcttccatatcstctacttcatcctcgtgtatcttcaaggctctcaccatttctttgactgcatgatacaaaatatttttaacctgaaagagatgttgatatttctaatcacttcagttcgacagaaattaattaaaaaatgacaacttccagatttaaaaaaataatagggaactaggaaagccaaatataagaaaaatgtttgaaagtgttaagccaaaagggacactataaatcatacaattaaatacatgttggtgttaatctttggttgtcaccctaatgtgaccaactaggcaatgactgcctaagctgttatacatgtatcatatttctgaatataaaaagcctgaaraacaggacctagaacacccaactcttacctgtagtttatcatcataattgatttcttccttcaaaagtctcagttcctgtgttaaatgaaatgactctacaagatgttctggagacacaaaatcttcagttacctgaatacagctgtgaaaattctgaacctatccccaaaagaaaaaccgtgaaatacaagttttaggaggtggagcaaagaaaagccaagttatttaaaaccaataaacacaagagacaattctgctggagaatttactttctccaaaacatcaaatggattttaaagcagaagaccacattttatgagaaagttatgtcactgaaaagcttcatgtaaagtgactttgtaaatggaatatttttaaatgataaaaagaaaataacttttccaggaatcctttggagaggctgataaccagatattaaattatcaattttgccaaagtggacttttaaaaaatgtgttacttttaaaaactaacttgaaagaatttatgaggcaatctatctgagtatgtttattgttgctccattggctttcaggattttggtcatttcactgttaactcttacatcagagaataaagaaaagaaaatgaaactttgttaggaactgggatggaaaatgtagtcccagacagatctactgacctcgactgagtttcagaaatatcccaggattttggttattcatgcctttcttttgtgactttctttcaaattagccaattaaagataccccttcaatcaccggtgacatcagtacaacagtttttcaacagttttctctctcctgaccaaacagttttcccaagaagccagtcaatagtcttatctgttatttgttcagcatttacaaactgactttgcacttgactattagagctgctttctattaatgccagtaaaacaacagaggaaggcccaagctgatccaatctgggatttgtggtgtttctagattgtcttctagtgatattaaaaaacatcataaaaattcctgggaaaggagaaataattgaaaaactaagcatttaaagttactctaagtatgcaaaataaatttaattgggaggagtgagatgaaagagatagtaagtgggaaatggagactgtggggaaaaaaaatctaattgatgatagggtgatggaattccagaggggctagaattcctcctctgggcataatgaccacctgaacagctgctgaagtctgcagagttctttaactcaagcactgtgcctctattgataacttggtagcatagtaaagtaaacattctctttctttaatcattaggctgttggttcctctggaggatgaacatagtggatgcctcacattttcagcatttctgtacagtctcactggctcttcataatgtgtctgtagaacagatgctctatttcacagagcaggaaactatggatgagatgttcagcgcctgtcccaagacaaatcagccaataaatggcaagtcaacaggagcccaactcctgcggtgtcttgtctaacagatgctttacagtcctgcttattaactctcataccagcatacagagtctccaaatgccctctctccttatgtctttcatttatctgaacttaaggagagtaagtctttccaaagttttagcatgaaagaacttttggtatatctagctctagcatgtcctaaaatcatttgtagctccaaaatgtatacttggttctttttttatataatttattgatattctcactttgttcatccatcgttttcctgatttctgctggctctttgagcatatttaagacagttgtctagtagtaagtccaatgtctgggcttcccggggaaggtttttgccaatttattttctccctttgaatgggccatactttcctctttctgtgtatgccttatacctttctgttgaaaactgggcatctgaacattacaatgggtaatcatattctctccctgcctcagggtttgctgttgttgattcctgagggctccagtcatccatttgtttagtgacttttccaaactgtttttgcaaaggcagtattccttgttgggtgtggtcactgaagtctctgttccactatctcactggtcagccagttacctaacagagatttccttaaatgccaaaaatcagctgcccttttcttcattaagcagtctcttggttgctgttgtaagttttcaattagattccagagttctgaaaaagttcattctgtcagtctttgccagcttatggttgttttaaaatgacttttagaacagtaacctttattagtgcttacaagatgctattaggtttcctaatgacccctacctgatatattttggataaaggcttgagggttactttgaagagccaaggttcagttttaaagcagaacacaactcagcttctcattctgattatcccttttctttgccacatttgactcatttatatttcacttccttgacattgtcttattcatacttgcctaaaagcatcagttataattataaataggtaatgttaagaaaatataatttgtattcatagtaggaaggttattatattgacactgtgattgctatttactcagttatttgtgagaacttagtgtggaaagattttgccaagaagtccttttggtcatatgaatacagagaattacaactttacaattttctaaactcatgataaatgaccaaacacaatcaaagttagtatttttcgacaaattttactaaagattatgtgttaacttaaaaaaaaaacaactgttgctgtttttaagtaaaggccactctaaacctcagaatactacagctgagacaaaaatcctggaggtcagggtcattgctctgtggagggtgtacaggagtttcacagactgagtcccagttaccaaggtaagatttgtaagtctccaattctagaatagttcttagcatataaagagggctgtggctatgctgctttccctcagcttgctaagattatatatctcagcttccttgaacagacagcccactcttctcagtttggctctggcaatggtcattgctgacgggccaaagaacagaatgttgtttcttccctagcactgctggcccttgtcatgcagaatcacttggttgaaaattttttgataggtgccttgggtttgcatgagattcctatttgtgtggtttccaaagtgtggtccctgaacagtaaaatcagcatttcctggaaacttgtcagaaatctatagtttcaggtccctccccagacccattgaaatcagaaactctggtggtggggtacagcaatctgctttatcaagccctccatgaaattctaacatatgctgaagtgtcagaatactgatttagagtctgattattctgagggccacctatagcctactggaagtgttgaagtcattaacagttttcagaacttctaagacctaaacaggttgtaagtaataatgcatctcaaatccaggttaatattgtaaacacttattacttcccttgaattttctcttaaaactgcattgccaccaattgtgaattacggacaacatcctttcaacagagtataaagagctgtgttgttgtcattacaccccacaggagaggaaaggtagcaattcccttttgtacagctggcaatttctgtgccaaaatatgtagcaaagaagttagatcttgttttggatcactcagcaatttagtggcagagctcagaatataatttgtcagtctaggtcatatatgctgccttggtgtatttagatataacattttttatagatgtaatcttgtttctataatctatgtgaattttctaactatctcaaagaaaatgtgtatagacataaagtggattccaacctaagtaaacttttggaagtagccagagaaagcacatataggaagaagtaaacatttacatgttttacaaaaagcccaatacatataaattatagaaagccataaatttgttttcctctacccttgtgcaaaaacatgttgttactgagaacgtattttctggccttcagaatagagacttattaataatacaaacattaagtgcattattctaggcatgggaagagagcaatggaaaagataaatctcttacttcatcatgcttacgttccagtgggggttaaaagacaagcaaagtgagtaaattataaagcatattttaaggtgacaactgaaatggaggaaaataaagcaggaaagacgacagaaagttgggggacacaatttacagctttaaactagacctcaccaagaaggtgaaatttgaatgaagcctaaaaaagtgtaaagaagcaagtcttacagatacctgacagaaaaacgattccaagcaaaaaagattaagaagcacaaaaaccctgggggaggggggaaacatacttggtgtgtgtgaaagaagcaaagagggcaggatggctagagaggaactaggagagccatacgagatgaaggcagtgagacagagggggaagtgtggatatgtaaaccaacctaactttttaacaaggtcactttgagcctactaaaagaccactgttcccaaaaaagtagcagcagggasacaagtgtaagcatggaatctctttggggtaacaatgattgcatctggaaaaaaggaactgggggaaaaatgtgagatactgaattttcaccgtgaactttttatacttttgaatttttctgtttatgtattacattttcaaaagaaaaacattaaaaagtagtattttcaacaaatagtactggaacagccaaatgcccatatgcaaaaaattgaacctcgctccatactatgcactacatacaaagatgaactacattgcatacccaaatgtaggacctcaaactataatggttctagaagaaaatgaggagaaaatctgagtgatcttgggctaggcaacaattttgtagatactatgaaaataccatccataaaagagaaactgatcaactggacctcatcaaaatggaaaaaaccagccaggtgggttggctcatgcctacaatcccaacaytttgggaggccaaggcaggaagattgcctgascttaggagttcgagaccagcctgagcaacacagcaagaccccatctccacaaaaaattaaaaaatcagctgggcatggtggtgtccatctacagtactagctactcaggagggtgtggtggggggatcacttgaacccaggagtttgagattacagtgagctatgactgtgccactgcactctaacctgggcaacagagcaagatactgtcttttaaaaaatggaaaaatgaaaaaaaaatgctctttgaaaagagaagctacaggaaaggaaaatgtatttgtaaaacacattatcagataaaagacattatcagaaattggcaaaaaaacactcaaaactcagtaagaaaaaaagcagctaaatagacagaatatttgaacacatatttaaccaaagtagatatacagatggcaaatgaagatataaaaagatgcccaatgtttagtcattaagaaagtacaaagtaaaaccaccatgagacaccactgtacacttactagaatggtctaaaaacaaaactgacagtaacaagcactagtgaggaagcagaggaaatgaaactcacataaccctgcactgggaaatgaaaatggaacaaccaatttagagaatagtctggcagtttcttaaatttaatcatacattatagtatcaccargcaatcccaccattcagtatttacttaacagaaataaaaatctttgttcacataaaaccatgtatatgaatgtttatgatagctttatctattattgccccaaagtggaaaaaaccaaaatgtacttcagctggtgaatgtacggatttaaaaaatgaaaaaaatattcatacaactacccagcaataaaaaaagaatcaactgataaatacaacaataggaatgaatctcaaatacattaagaaaagccagacttaaagggtacatactgtgtgagtccaaatttacagcatactcataaaagaggaactatagggacaaaaaagcagattagttgcaggaactttgggtgggaagaggctgactataaaagtgcaagaggatgccgagcatggtggctcacgcctgtaatcccagcactttgggaggccaaggcagacagattacctgaagtcaggagttcgagaccagcctgaccaacgtggaaaaaccccatctctactaaaaatacaaaattagacaggcgtggtggtgcatgcctgtaatccgcagctactcgggaggctgaggcaggagaatcgcttgaacccggaaggcagaggttgcagtgagccaagatygcgccactgagctctagcctgggcaacaagagcaagactctgtctcaaaaaaacaaaaaacaaaaaacaaaaaaaaaaactgcaagagggaattttttcggagtgatggaattgttctacattttgattatgttgttacctaactatgcatttgttgaaactcacagaattatacattaaataaggtaaatttcactatatgcaaattatatctcaatttacaaaaatgactacactacctaggttaactttataaaaactgacattggataaattcaatatgtgaataaagatcttcaagggaatctactttgtattatcaaaggattattcctatgtacaaaaagatttataatactagtctcttaaataggctcttcttttgagagcatttacatttgaatacagattagctattttctgctaagagtctagaagtcaaagaaatggtgtatagggtgaatcccagattaaacatgaaacataaataatatgacatctctgaaataatcataagtccatgggaaaatataaccacttaatgtaaatacattttttccaggaaattatcatagagaaaaaggtatttattattatgacatttgtattttactactgtatcataaatgccatttgagatctaataatgataaatctgaccctgaatctgacacatcctaaaagctaagcaattattatcacctaagtagtatttgtatggaagagtgccataaatgctaaaacagtcaatgactatacttatataaaatgtgagaaagtttccttggtaaactaatatacatcagctacatctcaattacttagcagtggaaaaggtggagaaccaactgttgaggcaaagcagcttttgagttttttctggtttccctggtacaccttgttaattttaagggttaacctgggctgtagtagccccattccacctataggaatccactgtgtacttttaawcccaccctccataaccactgcatctattctatgccatttttcccggtgctggaaaaattaggtattttaaactaggtatttattttagtttttatgttttgtggatcaacagttatataaattacataccatctttctttagacaggcccctgctatgctagcatgctgaagaaaggtaggaggtatgcttaaagcctgataaaaagtctgtatactgtgtccccccatgcttttaagcctcactattcagaggtatacatgtcaccaggagggcttaaaaatcagatttcgatctattaaatcggagacagtatacaaatagaaatctggctcatgttaaaacaatttaaaatcttaaggaaattatgtgagatttctgcaagcactgagatgtcattctaataaaggcagactggtgcaggtaattctcttatttgcatcttcttccatttatatctatactaagagcaatttttttttcaaaactagttctttcagtcagtaaaaaatatgttagaaatargtttgtatatacctgatgaagtgctcccgctggcaaaacaatagcatcaccaaggaactgaataagagtacaggttctgactccatattcttcaagcagcctttgacggagctttttgttcacataccaactttggtcacgtattggatcatgttctggtagaacttcaaggccttgttcttttgaaatctgaaatatgaattaaaatagacactccaatttaagtaaggaaatggtaaatcctgttcagttaaatttcaattttatttgtaataacaaatcttttcttctcagaatcaatggaacaactgaatgagcttcttcagttaaaaaataacattctgcaataatttggaaagccaaagaatattaaaacaatacagcaatgctgaaatgctcttaacagtttactacttccttctcaccacctccttccactatgaagtttccatctatctggtttccttccttataactgtttcaaaagtatagcacatggatgaggaacagggtatttttttttttttttttttaccaaaagccaaaccattcatatgtatggatttcataaacatttattgatccttttttgaggtaagtataaatacctttacatggctaaccttctaacrcttgaaaaatcaatttcaagggactctttaatcagttaaataatctgctttagaaggcacaaatgatcatacttcagattaaaatacaggtaagtattcagggataaaatggtacaaaaaaggctgtaactcttttacttcacattgatcacagacagaacttacatcctttcagaaagatgatgtatcagcactgaacatttcttaaaacaaatttccataattacgaagtttaaaaagtacctgagcaaagggtttcaaccaattatttcaggttgatatataaatttctttcagagtatatgacaactacagtcaaggtatgattactcaaaatctgagtctactcagtaagtatcatagtatcagatgtgatagagtagaatcattccctaggtcagcagccaaaaatatctatcagattcaaagaaaataaagatcctaccttctttagacgtttccatgaaatatttgtttttacatcccgcgactccagatagctacttttcgccacccaactaatatctggctcaagaacagatcagtcttttattaacagggaatggaggcacactaccaactgggaacaaatcaccattcaaaaccctcaaaatgttaacagactttcaaagagragcaagagaaacagggttttgactttcaacaaaaactcccatctactttgaagtaaaaattatgtaatggtcttatattgttgaatgccaagtgaaggtayggcaacaatgaataagtccttgcttgaggggaagagatattatttgcaaactaacttataccttttgaagaaattcccttatcttstcaacatctttcccagcataaatatgccacagagcaccaggtatttcacttgagtccttcaatcttttccttaaaatgtcatccaaatcttcttcctcaaatttcttgagaattcctgaaacaaaggaacataatttcaaattgtcggcaaagaataccagaaagccaagtctcctaaagttgatctatcagagcagcagagtgcctgactaggatcagtactttttcttttttggtcacccaggctggagtgcagtggcatgatcttggctcactgcagcttccgcctcccaggttcaagcaattctcttgcctcagcctctcaagtagctgggactacaggtgcaagctgtcacacccgactaattgtttgtattttagtagccgtggggtttcaccatgttgcccaggctggtcttgaactcctgagctcaggcaatccacctgcttgggcctcccaaagtgctaggattacaggcatgagacactgtccctggccagatcagtactcttaaaaaagagtcaaacacagttatatgttcataacttttaggactacaagaatagataagtggatacaaagcaatagtgattttcccagtttgttttatgcaaaccaagaagcaggagatagaaaacctaagagcaactatgtaaaatttaaccaccttccttccctgttccaagggggtggtcctaacaatgacttgtactcatagcatttcctaacttacaaaggtcttttatgctcactatttattagttggcccctatacttacttaagaataagggataacctctattttatacctgagtaaaaaggttccatgaggtgaaaggttttactcattaccatgactaatgaatggcaggacaaaatgtattctgattaatttcgaggggctctcatatttgataatggttaatctgtaatcaaatgcaaatgtttcacgaacaaagttgtggttttgaggaaaatcaagccatccttctaaaatgttgacaaactaaaattcctacacgtatgtatgtacagaaaaaaactttagaagtgtacaaacaaaaatagtaactagttgtctctaagtgtaggaccacaggaaggtccttttttaaaaggaccagtgaacatttaaataaatattctttttaaaaattttgtataaatttaaggggtacaactgcaatttttgttacatggatatattscctagcggtgatgtcttggcttttagttatcatcacctgaataatgtacattgtatctactaaataatttctcattacccacccctgttaaccaccatcctctgaatctccaatgtctatcaggataaggaatcaacttaagtgtccatccacggatgactggataaagaaaatgtgtggccgggcgtgggattacacctgtaatcccagcactttgggaggccgaggcaggcggatcacctgaggtcaggagttcgagactagcctgaccaacatgaagaaaccccatctctactaaaaatacaaaattagctgggtgtggtggcacatgcctgtaatcccagctactagggaggctgaggaaggagaatcgcttgaacccaggaggtggaggttacggtgagccaagatcacgccattgcactccagcctgggcaacaagagcaaaactccatctcaaaaaaaaaaagaaaaaagaaaaaaagaaaatgtgatatacatacacaatggaatactatttagccataaaaatgaaatcactgctgggtaggtggctcacatctgtaactccagcactttgggaggttgaggtgagtggatcacttgagcccaggagtttgagaccagcctgagtaacatggtaaaacccgtctttacaaaaaaataaaaaagttagccaggcatggtggcgcctgtctgtagtcccagctactctggtggctgaggtgggaggatcttttgagtccaggaggttgaagctgcagtgagctgagtctgtaccactgcactccagcctgggcaacagagcaaggagaccctatctttaaaaaagaaaaaaaaaaaaaatcatgtcttttgcagcaacatggatggaactagaagccattatcttgagcaaaaaaactcagaaagtcaaatatgttatcacttgtataaactttttaaagaaagctgttacctgctacaaagtatatatcagatgtttcctaatttgtgacagtaatgtctattttatattcaaacttagctgcaaacatatttttttctttttttcttttatttttcgagacacagtctcactctgtcgcccaggctgaagtgctggggcacagtggcacaatctcggctcactgcaacctctgcctcccaggttcaagcgattctcctgtctcagcttcccaagtagctgggactacaggcacccgccaccatgcccagctaatttttctattttttaactacagatggggtttcactatatgttggccaggctggtctcgaactcctgacatcaggtgatccaccaccttggcctcccaaagtgctgggattacaggcgtgagccactgctaattgaaacatttggtaagtgtttactatgtgcgaggcactgtcctaggaagttgggaattagaattaagaaagatccattcaagagctcatggagttaaagagggtcctaataaatctagacaaataaacatcacattgtggtaagtgcaatcacatcagtacaaagggtacagagacaggttaagtcctccaatgttatctgtgacaaagtcttttcccagtcatggtaaaacaaaaaaattaagggcaatgtaaaaagttgaacataaaaaaatcatcctttactctggtatctttttgtttgtttgtttgtttgagatggagttttgctgtgtcacccaggatggagtagagtggcaccatcttggcttactgcaacttctgcctcccaggttcaagcaattctcctgcctcagcctcccaagtagctaggattacaggcatacaccaccatgcacagctaattttttttttttttttgagacggagtctcgctctgtcgcccaggctggagtgcagtggcgggatctcggctcactgcaagctccgcctcccgggttcacgccattctcctgcctcagcctcccaagtagctgggactacaggcgcccgccactacgcccggctaattttttgtatttttagtagagacggggtttcaccgttttagctgggatggtctcgatctcctgacctcgtgatccgcccgcctcggcctcccaaataatttttgtatttttaatagagactgggtttcactacgttggctagctggtctcaaactcctgacttcaagtgatccacccacctcagcctcccaaagtgttgggattacaggcatgagccaccgtgcctggcttatctttcttatagagagtttgaaatgttctctttaaaaaatgacagttgatgtttctaaaatctgttttcttaacaaaattaaaagctggaaactttaaattggttttctgacatttttcctttaaattttactgctctgcaaattaaaataacaagtacatgaggcgggggaggcatcataataaagagaatgactggctagagcatagtaagtttactttctttaatgaagacttctagggtgaatgataatctgagttacaattgaaagaatgaatacagaagtttgccaggaagacatggagctaaaagacacatggcagatggagaaaaaaatcatgttcttttaagtatttttcaatgtgtttgaaacattattataaccctaaaatgttgctttgtgaccacctataaaaagtgacaaaaactttttagataaagaaagagagcaaaaggattatttaaaatgttgaaattctcctgaaattttctcgaaagaaatatgctaggaacagaagctgggggatatgcataaacaaagatgaggaagaaagttctagcttttaaggacatgaatgaatagtaatggaggaaagcaggttaacttctaagtgctacagggaaagatctgaacaaactacaatgagatacaaaggatgtaactccatggcatcacaggattagaaaggataaataatctgaactacaggtcacatttctgtggcagcgctcagacwataactcaagtgtgcccactgactctcaaatctctgggggataggggtggttacctattatagtcaatagtgtcagttaaaaagctgagtagcataatgtaaaaatgagtttctacagttttgagggattttaggttgtgtattataaaattgtcaaatgtacacaaaagtagagtgaatactataatgaatcccatgtccccagcacctagccattaagctccaatctgggatccagatatacaactggtgatctatttcatggctggatgtcatccacagaatttcacagaaagtgcatgtgaagtagaaaaggtagcgaacatctgaaactccgaagaagcctccaactccataaggtgtcagaatcagaagtggtatcacagaagcagagaactatattcaaagaggttgtgattaacggtgccattcattatagacaggggygagtaataaacgaaccagaaagatacactgaattatccaaatacgtgtgagtgacagcagtagcaatagtaaatttcagaccagtatggaataagactgcaatgagctgaaatgtaaaaggaaagtgacaaagatggtaaaatatttcttatgagggtagaaccaataggatggaaaggtttaaaggaggctttctttcgagaaagaaaaaatcatcttagactctgcttctattgtacagagaaaaagccaatggagaagaaaacgttaaaggcctatgactgtatctatgtctttgtaaagaagggaataactgacaccatggtttcagaaagaaattgagggcacagaaatgaaaacctatatactggatagaaagagaaaagacccccttcttcctctttttactggaggggaaaaaagaatgtttgagtcacaaaccatattttaaccatctttagaaccctaagaattagttcctattcttcaataaattttttttgtttgttcattttttggttttttttgagatggagttttgctcttgttgcccaggctggagtgcaatggcactatcttggctcaccgcaacctccgcctcctgggttcaagcgattctcctgcctcagcctcctgagcagctgagattacaggcatgcaccaccacacccagctaattttgtatttttagtagagacggggttatagcatgttggtcaggctggtcttgaactcctgacctccagtgattcacctgccttggcctcccaaagtactgagattacaggtgtgagccactgcgcccagcctcaataaatgtttacaagtgcgcttaatggtgtattttcatcaacacaatacttaatgatagaaaagaagttaaaatattcaattttaaaattaaaatttcacttacataaaaagaaataggaaaattattcaatcttcaagtaataagggctaaaatgcccctacatccattgcaattctttttgaaatcttcgctgttaactcagaagctgatattctggacaatactagtgaatgtgattattcaactcttatttcaaagactacttattcttttaagtttacctgcttttgagagaatgccatttccttttgctatgccaacataaactagtatatttacaacatcagaaacttcaatatggagatttgttgttcctatatcatgatctttagcagcaactacacctgtatataaaacaaaattttacttgacaaaatatttatatatatgtaatagcataatcagatattcccccaaattagctcgatctgcataatttaattgtaatttgagttttagtttccttattacaaaaacctgttccaaaagccacaatctataaaagaccctattatttgaataattacatttctataataaaatgtactatgattaaaaatcaaataaataaaaaatcaataagcaggtacttaactatatattgggctggtaattcctaacatgttgcttcatataaaaaagggtttcgatggattaaaaggaacagatttagtagaaactaaaaatcattagacaatttgtaggaacagtaattctttttttgagaaggagtctcgctctgttgccaggctggagtgcagtggcatgatctcgactcactgcaacctccacctcccgggttcaagcaattctcctgcctcagcctcctgagtagctgggactacaggtacacgctaccacacccagctaatttttctatttttagtagagatggggtttcaccatgtcagccagggtggtctcaatctcttaacctcatgatccacccacccaccttgacctcccaaagtgctgggattacaggcatgggccaccacgcccatccttgaacagaaattttttttttttttttttgagacggagtcttgctctgttgcccaggctggagtgcagtagtgcaatctcagctcactgcaacctccacgcctcctgggttcaagtaattctcctgcctcagcctcctgagtagctgggactataggcgcacgccaccacacctggctaatttttgtattttttagtagagacagggtttcaccatgttgaccaggatggtctcaatctcctgacctcgtgattcacccgccttagcctcccaaagagtgctgggattgcaggcgtgagccactatgcccggcctgagcaaaaatttaaaaaaatccaatataattcctacatgggagaaatgtgaatatatacctaccataggcactgcacaacctgggtcctagatcaggacgtacaaaaaatcctggcaaatgagaggccaaattgaattttccttctggattacaatattctggcaatggcagactttttaaaagatcttcgtatctgaagaaaaacaacattgccttcttataaataaagatttgcattgctaagtattttcacatatataattttcaagttgttcaaaacagcagactacctttccataagacaggtaacaattttccttgactcaagtgatactgactaaaatagcaattctgcttctctaaccattaaaccattaaaaagctccaatagaagggaggtcctaaacagggtcctgtgttctctttttttgagacaaagtttcactcttgttgcccgcctcagcctcccaaagtgctggtatcacaggcgtgagccaccgtgcccagcctctttaacatgaacattctttccttcactgtcctaacataaagattttcccactgctgaggctaccaactcagttttgctatcaatcaatccatcagacaaggtctcactctgtcacccaggctggagttcagtggcacgatctcagctcactgcagcctccacttcctccactccagtgatcctctcacctcagccacgcaagtagctgggactacagatgcctgccaccatgcttggctaatttttgtatttttttgtagagataaggttttgtcatgttggccagactgatctccaagtcttggactccagcgatcccctcgccttggcctcccaaagtgctgggattataggcgtgagccactatgacgctcagcctcaagttatttatttttaattgagaaagaaaaagcctacaggtcacatttacggttacttatcctatctctggggacagtcttagctcgatctcaaaaagtcaagagtcaaaatgaaaagtttcaaaccttgctggcatcatagtcttgaagtcttctcctgaaggccaatctttcaattttaaaacaactgtttctccactcttgtttttctgccgttctataaggaatgcagttaattactaaaagggtaatttctgcctttttatctttattaacatttggaaagaaacgtaaatgaatgaatgatttgattgttgcacattacatgcttaatgattgcttgcttattgacttattacttatgtacttatgtagtattaaaacctttgttccttttgtacatgaatagaattcattaaattacccacttgtaatatctcaaaagttgtttttaaaaatcttggtaacatcacaatcttacatctacacttttaattttcaaagagttttacataaataattccattttcaaaagcttatggaactgccaaacatttctccataagcaaaacagtataaacggcatctttaaggtcaaaggaaattagtgctagaaayagggattaggacccagtattttgtttccaattacttgtttctttttattagacaacataaaacagatgtttcaaagactaaaaatctgttaagttacatttggaatttatcattttgaaggagtatgatggagaaaatagtaaaataaaaaccaacatacttgaaacttcttcaaaaccatcccagaattccttaacattggcatttgaaatgatgctatctttgcagttcaggagatcagcttggtggtctccaaaatcaagactaattgattccgccttccataggctaatgttcattttcttatgcacaccagaaaccactgcaggcttataaatagataaataaataacagttaaaagatayatagactttcttttttgtttgtttgtttgtttgtttgagacagagtcttgctctcttacccaggctgkagagcagtggcctcatcatacctgactgtcaccctttgggctcaatcaatccttctacctcagcctcttcagtagctgaaactattaaatttcgagcctaatgagttattctctgaaagtgaatgtctcctttgaaattacataaattcaaattccctcacagctttcttacacttggtggcggagggtagatgtcctctccacccaaattccctaatagctttctaataacgcagaaaccagtaatggaagatttacagcttctaaaactacaataaatgatataaaaacatatctaagaacatctgatgtattattctcaggttttaaacaaattcctgtactctaatgaagcagaattctggaatatagagaacacagtaagctatgacttaaaagtttctgaaaaatgatatttactaggctgggtgtagcaatgcattcttgtagtcccagctcccaaggctgagctgggaggattgcttgagcccgagtttgtatcttgcctaggagacacagcaaaaccctgtctccagaaacaaacaaacaaaaaatttaagtgattattagtattcttaaacttgtaacataattaaaatataggaaccacaaaagaataatctctagctagattttttttttaattacaaaagacatctttaaaaagaaaaaacaccctaaattctggtttactacatggttgaatgttccattaaacattttttcaatgagccaataatatatacgactttaaaaataggtccaggtattagttaactcttgctggcaattcacagattaattcctagtgcctagtatctatccaataatattgctgctattagggtaatcagcagcttgttaaaagtaaattttttaaaaaagataagggttaagctaattagtgtatcagaataattcaaagcagaaatcttaggctatcaccatgatctttttactttttttggagacagggtttcactttgttgcccaggctgaagtgcagtggcatgatcatggctcaccacagcctggacttactgggctaaagcaatcttcctgcctcagcctcccaagtagctgggactactggtgtgaaccaccacgtctggctaattaaaattttttggtagaaacagggtctcactatgttgcccaggctggtctccaactcctgggctgaagcgatcaatcgtcccaccttggcctcccaaaatgttgggattataggcaagagccacagcaccaggcctgtaaagctttctgattagactccttgccaatggtattattctcttctaactcaacttctaatctgccttgctgtcagttattataaaatgtcaatttgattatacagattccacaattaaaactatcacctagagtataatgttaaaactccttagcatgatatataagggcatttcatgatcattcctctagccatctccttacaccactctcccccatgaaccatcatgtatattgcagataatcacacctactcagagagttcccaaaacacctaatgttcttgtatatgtccagcctcttgtccacctagcaaaaaacttcacttaacctctaaggaatcaatttagactagcctttttgaactagtatcctagctttgacatttccttttctgggttctcatagcaccttgaacaaagttcttaaaacacttcacataattatgaaaacaattatttgtgtgacgcttttctacctcaaaagctcacacaaattaaataaaatttcagtccagtaatgtcatcagggcttgaaggagaccaaggcaaaaaagacatgctaaatcttgtgtatatgcaatgcacaagtgtgcatttctttttttggggtgaaagattcagctttcatcagattttgaaagggattagtaacctaaaaagatcaagcagcattgcactaaaatggttcttactcatttttacatagcttactcatttttatatattcttactgcctatgacagagactgcgtctcttattagatgctcaataactgttgaataaacaaagtaaacattttccagaaaacaataaatttaacagaatactgtcatacaaacacttaatttgttcataatttttgcattaatgtagtaaattgccatctgaaatgtatatcaaacattatcaaaacttttgtccaacaaaatcatttatattagaggagaatgaaacaatatagtttgtcattcaagatttgatgaactaatttgtaagtaaatgttctgtgtataaatattacagataagaacatctacataggttcatgaaaaatgctgccaatattaatattttaatagtagacatggatctactaactggactaaaataccaatctaaaaagaggagaaaggaactgcattttgtaaattcaaggcgttattacatgtctgttctgayagatcaaaaagtaacataaaataatcaacgtttccctattaattcatattaaatctggccaaaaaacaggaattgagaaacaagcattctgacaatcttttcggtacttttatatcttattgtcccccaaatgtgttaaccactatttttcccccctccatttctattcctaaggagggaaccattctatttaataagcttcagttccaccaagagtgttctttatcagcctaaaatacacacctgtccttgtttccaacattctttgaaaagcttccaattactgctattcttataatccttaagccataaaatatgcttctcacagatccaagaatgtggtatatcactgtataatttattattttcatccactgcagatattatgctttcttcaggctcttctttaagctctggttttacatttatcttggaggttttacttggtggaattttgttttcaacaactgaagcaattatgtcatcaagaatgttaggcatagtccgtccacttttgctactctattaaggaaaaaacaaaacaaaaaaaacctgtttttgagagaaatcaaatacattttcctcccacagacttatttttttttaaacaatatccctacactccacaatatgcacktctcttagatttgagttcctatattcctgacaaaatgcaaaccagaagtctggttgtgtgagaactgccaggtctgaaaaacttagaagtacagccttccygtcttttacattgttataggcctgggacagagaatacaagtaggtggcatccctcatatacattttttaaaatttttaaatattttataagaaatagagatgagggtcttgctatgttgctcaggctggtttcaaactcctgggctcaagcaatcctcccacctcagcctcccaaagtgctaggattacaggcatgattgaccccccaatactccatatatatatacacatttttttttttttttgagatgggagtctcactctgtcgcccaggctagagtgcagtggtgtgatctcagctcactacaagctccgcctcccagattcaagtgattttcctgtctcagactcccaaatagttgagattacaagcatgcatcaccatgcaccatgcctggctaatttttgtattttcagtagagacagggtttcaccatgttgttggccaggctggtcccgaacccctgacctcaggtggtctgcccacgtcagcctcccaaagtgctaggattacaggcgtaagccaccacacccagcccccatatacttttattttttttgagatggagtctcgctctgtcgcccaggctggagtgtagtggcgtgatctcggctcattgcaacctccgcctcctgggtttaagcaattctctgcctcagcctcccaagtagctgggattacagacacgtgccaccacacctggctaacttttgtatttttagtagagacaaggtttcaccatcttggccaggctggtcttgaactcctgacctcgtgatccagccgcctcagtctccgaaagtgctgggattacaggtgtgagccgccgcacccggccccccatatagttttaaaagaaattatactgctcttttttcctggtaaataattaaagcaaaatttgacttctaattattttaagtaacatacaacattcacttccatgtgggtttttcccttcactagacaaatagtttccaaattctaaaggggtatcttagggaccttctggaatcgaagagcaccccccctccacctttcaccttggaaaaaaagacagaaaatgccagctttcaaggtaaagagagttataatgcaaatagaaacatgcctagcaatttggtacacttgatttcatcagcatastgggtagttcagagccaaaaactaagtctccaaatcatctctatttaaggcccacattaaaaccaaaaatctggcatcactcactggggctcccattgaatatactggggcaaaggcaatgccagcatctgtagaccccacacgtagctttccagctgttgtagtcagcaaatcccgtaaggttgagccttgttcattattctgggacacaagaggtgatgttctgccatttggagattcagagttgtcttgttctctttcttctttaatttggttttcaagggtaagttctttgttttctgaaatagaaaatttcacagattttgttttgttttgttttgagacggagtctcattctgtcgcccaggctggagtgcagtggcgtgacctcggctcactgcaacctctgcctcccaggttcaagtggttctcctgtctcagcttcccaagtagctgggactacaggcatgtgccaccaggcccagctaatttttctgtatttttagtagagacggggtttcatcatgttggtcaggctggtcttgaactcctgacctcaaatgatctgcccaccttggcctcccaaactgctgggattacaggcgtgagccattgtnnnnnnnnnnnnnnnnnnnnnnnnnnnnnnnnnnnnnnnnnnnnnnnnnnnnnnnnnnnnnnnnnnnnnnnnnnnnnnnnnnnnnnnnnnnnnnnnnnnnnnnnnnnnnnnnnnnnnnnnnnnnnnnnnnnnnnnnnnnnnnnnnnnnnnnnnnnnnnnnnnnnnnnnnnnnnnnnnnnnnnnnnnnnnnnnnnnnnnnnnnnnnnnnnnnnnnnnnnnnnnnnnnnnnnnnnnnnnnnnnnnnnnnnnnnnnnnnnnnnnnnnnnnnnnnnnnnnnnnnnnnnnnnnnnnnnnnnnnnnnnnnnnnnnnnnnnnnnnnnnnnnnnnnnnnnnnnnnnnnnnnnnnnnnnnnnnnnnnnnnnnnnnnnnnnnnnnnnnnnnnnnnnnnnnnnnnnnnnnnnnnnnnnnnnnnnnnnnnnnnnnnnnnnnnnnnnnnnnnnnnnnnnnnnnnnnnnnnnnnnnnnnnnnnnnnnnnnnnnnnnnnnnnnnnnnnnnnnnnnnnnnnnnnnnnnnnnnnnnnnnnnnnnnnnnnnnnnnnnnnnnnnnnnnnnnnnnnnnnnnnnnnnnnnnnnnnnnnnnnnnnnnnnnnnnnnnnnnnnnnnnnnnnnnnnnnnnnnnnnnnnnnnnnnnnnnnnnnnnnnnnnnnnnnnnnnnnnnnnnnnnnnnnnnnnnnnnnnnnnnnnnnnnnnnnnnnnnnnnnnnnnnnnnnnnnnnnnnnnnnnnnnnnnnnnnnnnnnnnnnnnnnnnnnnnnnnnnnnnnnnnnnnnnnnnnnnnnnnnnnnnnnnnnnnnnnnnnnnnnnnnnnnnnnnnnnnnnnnnnnnnnnnnnnnnnnnnnnnnnnnnnnnnnnnnnnnnnnnnnnnnnnnnnnnnnnnnnnnnnnnnnnnnnnnnnnnnnnnnnnnnnnnnnnnnnnnnnnnnnnnnnnnnnnnnnnnnnnnnnnnnnnnnnnnnnnnnnnnnnnnnnnnnnnnnnnnnnnnnnnnnnnnnnnnnnnnnnnnnnnnnnnnnnnnnnnnnnnnnnnnnnnnnnnnnnnnnnnnnnnnnnnnnnnnnnnnnnnnnnnnnnnnnnnnnnnnnnnnnnnnnnnnnnnnnnnnnnnnnnnnnnnnnnnnnnnnnnnnnnnnnnnnnnnnnnnnnnnnnnnnnnnnnnnnnnnnnnnnnnnnnnnnnnnnnnnnnnnnnnnnnnnnnnnnnnnnnnnnnnnnnnnnnnnnnnnnnnnnnnnnnnnnnnnnnnnnnnnnnnnnnnnnnnnnnnnnnnnnnnnnnnnnnnnnnnnnnnnnnnnnnnnnnnnnnnnnnnnnnnnnnnnnnnnnnnnnnnnnnnnnnnnnnnnnnnnnnnnnnnnnnnnnnnnnnnnnnnctggtcaacatggtgacgccctgtctctactaaaaatatacactagctgggcatggtgatgcatgcctttagtcccatctacttgggaggctgaggcaggacaatcacttaaacctgggaggcagagattgcagtgagccaagatcgtgccattgcactctagactgggcaacaagagcaaaactccgtgctccccgacccctaaaaagaaaattaggcatggtggtacatgtctgtagtatcagctatttgggaggctgaactgggaggatcgcctgggcctgagaggtcaaggctgcagtgagcaacgattgtgccactgcactccagcctgggtgatagtctcaaaaaaacaaaaacaaaaacaacaaaaaaacaacaggctagttcctaataagtgaagacaaaatgttttacattgaacctaacccataattcaagaaaaagaccaaagtaaattgtttacctcaatattaacagtactttattgtacaatagtacattgttggttagttatactatactcctctcacacatgcctagataatcaattatgtttaccttttttttcctctctggctttttgctctgcaagatctgctaaccagtgcagtggtgactgggattctggaggagttaacttgttatctgtgcctacatcactctctgggctgctgccaccatttttctcagacttyggaggagtattttgctgctgagactcaggcatgcacagagaaattttattactgtgattaagaacattctgtaaaacctacaaaggtagaacaattacatttttaaacactttcttcaataattcaattagtagtatagatacaaaaaatttacacagaaacacagcaaacctarttcatacataagtcytaaaccaaatttcaaataaatatcaaagttgactaatttaaccacagattttatttgaataaccagagatttttactcacttgagatacaccattcattgtaggaaaatttccaacttgtaaattctgtttgttagtacaatgacaatgggatttaataccatatttttccctaagagtgtgcatggcatctagaagatctgtcaaaactacaaaataaaatggtagttaataaaaagattaccactagttgttaatgctgtaaamtttttttcttacaatattttatattataattgggaataayggaggttttcttgtgccctttaaatttcttccatttttctccattctcttccatctattacagttttgattattcaaccaaatttatgttttttttgtttttttgtttttttttgagacggagtcttgctctgtcacccaggctggagtgcagtggcgccatctgggctcactgcaagctccgccccccaggttcatgccattctcctgcctcagcctcccaagtagctgggactacaggcacctgccaccacgcccggctaattttttgtatttttagtagaaacggggtttcactgtgttagccaggatggtctcgatctcctgacctcgtgatccgccggccttggcctcccaaaatgctgggattacaggcgtgagccactgcgcccagccaaatttatgttctctattcttttctctctttattaaaaattagatatgctcaaaaattataagaagctttcattaaaaatccaataggccttttcattacactccagctttccacttctaatggtgaactttcttcatcactgaggcttggacttatcttctgagctttattacatagaggatttccaataactgagcaagacaattcaaaactagttaaatctctctccaccstgttatatttctagatactcctttaagtgtttcnnnnnnnnnnnnnnnnnnnnatttgggttggcattaaatgtttgtgatcatgaggctgtcccttcacacacttcatccaagcatatagttctttatctgtaagataataaaacttgtatatcacactcatggtttcataattataaattgatagtgtaaagaacttaacgattatataaaatgtttcatagttggctagagtcacagccaaagagaaaaagaaaaaaataaaaataatgaaataaaatgtcaatgatatgctttagatgtttggttctgaaacaagtcaggaaaaacagttccaccatttcctgattttataaaaacactgacacaaaatggatataatgatagcctttctaaaaattaccagtcattattattagtgacctctatctttgtagctaatcttctatctcttagctgttttctgtgccaaacagaatttatgcctgatcctagtacatcagactgacacagtttgagatgactgttaattcattttcctcttatgcttcaaagacatgtagagaaacatgagacatgtgaaaaagctggtaccatacagttactattaactgctattgctgacttcaaataaggtttcatccctgaagttgtaaagaattaaggcatagcatagggcataacataaagaataaaagcatttgataccttgatctcaagaaccttctctacaaatttagtgacacagacagctacttacgacgtggctacaagagtttcagtgtcacaaagttcaataaattcagcataaaaaaatctagaactagaccaggcacagtggctcacacctgtaatcccagcattttgggaggccaaggcagcggatcacttgaggtcaggacttcaagaccagcctggccaacatggtgaaaccccatttttactaaaaataaaaatttagccaggtgtggtgacacatgcctgtagtcccagctacttgggaggctgaggcaggagaatcacttgaactccaggaggtgsaggttgcagcaagccgagatcgcgccattgcactccagcctgggtgatagagcaagacaccatctcaaaaaaaaaaaaaaaaaatctagaactattgtttcataaaaatatacattaaataaaattcaaacccagtctaaaactagttacctttaaaagctttgactttcctctgcaaaacctacacggtaacttgcaaatatttcatatattgcttatattttagacacttatgtggattaccactccatgaagctatatattaaacctactcaatctgagttttattataatatttaacagtaaaatagatatatagatagtatggacaataacccaaggcataagttacacttaaaagaatgatacagtggccaggcatggtggctcacgcttgtaatcccagcactttgggaggctgaggtgggccgatcacgaggtcaggagatcgagaccacggtgaaaacccgtccctactaaaaatacaaaaaaattagctgggcttggtggcaggcgcctgtagtcccagctactcggagagactaggcaggagaatggtgtgaacccaggagatggaggttgcagtgagccgagattgcgccactgcactccagcctgggcaacagagtgagactctgtctcaaaaaaagaaaaaagaatgatacggtaacaagactatactttcaaaattaatactactatgaaaatcagcaggctgggcgtggtggctcatgcctgtaatcccagcattttgggaggctgaggtcaggagtttgagaccagcctggccaacttggtaaaaccgtgtctctgctaaaaatacaaaattaggcatggtggcacatgcctgtaatcccagctactcgggaggctgaggcaggagaattacttgaatccaggaggccaagattgcgccactgcactccagcctgggcaacaagagtgaaactccgtctcaacaacaacatccaaaaaaaaaagaaaaagaaaaagagaaagaaaatcatcaacaatacaacaatttacttttaatataaatattctttatcttattcaaaaaaagcatttatggtagcttacatcaaattttataacaattgaaaatatcaaaatacatgtattgtggtttcacattttactcatattaacatatttattgcatatcccagaaacacttagctgtagatgttcagctatgcttccacatttgctcaggtttctttggtaagaaagggtaagagactttggttaatcctatcagtagaagatactgatggttaaatcatggttcatctacctgatacactactctgaaaaaagagcggcctgaaatgaaaatgacactcattactttgagacagacaatctatactaagtacttctaatgtttccacartattaatcctcttatttcatcagaactctactcctaacaaaaaattcaataccagctttaggtagtcacttccaaaattgccttggataatctttctaaaacacttttgattcatttaattacttcctttctgagacagggtatcactgtgtcacccaggctggagtgcaatrgggcaatcacagttcactgcagcctccatctcctgggttcaggtgatcctcccacctcagcctcccaggtaattgggactacaggaacacaccaccatgcgcagctcattttttgtattttttttttgtagagatgggggttttgccatgttgcccaggctggtcttgaacacctgggttcaagcaatctttggaagccagccttggcctcccaaagtgctgagattacaggcatgagccacagtgcccggcccacacactggaatcttaaagcaacaaggcctaacctaaatttgggctacattaaggaactatctgactgaaatgagaagatggatatactcatgaggctgatgggtgtagatgcaatttaattctagaaaatatagccgttaataaactgtggttacttctcctcttaaaaacaaactgaaaaaaaatacttaatacattaataaggaaagtaggaataaaaaaacacatctcatgttctagaagagtgatcctaaagaaaaattataaaaaacttcaatttatataaacttatacaccaacctctagaactcttcctttcctttgccttgtaacaatctaagcagaccacaaatccacatttttggcagacccagtgaatgttaaacaatgttgcttcacatgcatcacacatctcccggactcctctcactgctcttttccaggcaattttggctgaaatacagaaaaaacaaaaattttaaaggcaaacatgctcttttccaaggcaattttggctgaaatacagaagaaataaaaatgtaaaggcaaaccaagaactttcaaggctatattaactgaagaccaatagctttcttgaagtaatttgtaattctctttagaagacccataaatgatcattaagtgaaaaataaaaatgccgtacatctaagcagggtttctcaactctggtacttttgacattttaggttgaataattctytgttgggagggattactctgtgcattgcagactgttcagaggcatctgtagcctctacctatcagatgttggcaacatatccttaactccctcagttatgcaaccaaagatgtctccagtcattgctaagtgtcccctgaggggcaaaccagtgatttcaaggaagggaaggaaaagaagctaatatttagagcatctactatgttaggaactattaagtacttaagtaaacataattaacataactactttctaaacaaattaatgagatagttatctttcctattttccagacctgcctgatatccagagaggttatttgccaaaggtaacagttagggagtaaagctgagattccaatacaaataattggggtagattatgtctttataagccaaatgctgaaatttcacaatttctaaagtggrtttaacacattaacttaatgttgtaatggcagaaacagcaaaatgctattgtgatttcacaaatggttaattgactcaattcaccctctataggaaagtatctgtaaccttaaatacatactgtaaaaaggtatcattatcataattaaaaatcaaggttagataagattagggacttctttcacaaacataattcaaagagaaattcttaaaatgaaatttgtgcagttcatgttatatttaacttccttaccatcctttttcacccaggacaaagctgttttttcagatgttactaattgacagaacttatcacctattatatccaagatatatttagaagtctctatatctagttcatcatcttcaaaattttcatgtgtccacaaactcatagcttcatcatcatattggtcaggagaagagaaaccatctattctaactactccgtttttactaaatgacaacctgaaatattaaaacataaaagtattaggtacccacatattaaaacataagtccagtctttaaaattgtaaatttataattatgtttacattgcattataaaatatgaattacattaaaaacaggaaaacaggttaattcttcacacactaattattgaattaatttaaataactcaggtgttatgcaaatggcaataagtagtagtaattttaggttatttcaagaaataagatcacttatacttacttaactccaataaaatgaaaactgtttaagtgtttgatgaatgacaagagtaaaaatgtgggcccaatgttgcccagagcaatgctgttattttatacataatctaaatcggaatcaccaaagctgaaatggccttaagactttcaccaggaggactttaaaaatgccaactatacatatattttcattaattagactgacacattgctgaagtgatttaagagaacaaggatgaaaattcttaatagttttatargaaccccattaatgtgcttacttgctcttagcttctgatatccaaataacwactctattcagagaagtttatggtaaacggaaggcaaaattgccattctcttactggctggtggttattcctcaattatattgtacttcactctctttactctcaaatagctgatgtctaagatacaagtcatactgtatttttcatatgaacagcaacatttcttttatccctacttttcatacctttattattctttccaaagcttccttctttttaaaccaaatttctcctttttgtcataacccagcatcttattttggttttatgttataatctttgcctgaacatttctttccttcagacttttcctagattttcttatgcctcaaacctactttccttttgattccttttttcatctcttctgcacttccatgggtactacctcttataattattccctgaaattgtcttgtcttttagggattgttggctacaaagtgaggaagaaagagaacctggtccattcttatcaacacgtatttttggaggtctatactgggctaccagcatagagtattcagcagagtaaagtgtctcaatttcttaggaagataattacagctaacaatagagcatttcatatgcgcatgggactacacttaaggacttggcatacttatctcatttaaccttcattaaacctctcttaggtaggtactaacatttacattttgcagctgagacaggcttagttgtcctaccacagttaataaactcacacaggaactaagggacagagatggaattcacaactagaaatgactgattctggagtgtgacatgttaattagtctttactgtctgggttatccagctattctttagttgaactcttgcaagtctacctttaagtttttaattttaaaatattatttggtaatattcatattaagttagtatataggttaacaactgttaagaaaaaaatcattttctcattaagaataaatctctcagaacagaaaggtcatatggaacatgagtaataatgtatgtatttagtcttatagttagaaattgttaaaatttagcacgaaaacatttaataactcttttataatgtttccaaaacatggagactcaaagacttactcccccatccaaaagggacactcagaataacactatataatttccaatatcaaatcaataaattacttttttcccaatctmatattttcacttaccgtctaaagtagtaaaatctacaaaatactggtgagtgagctggttcttctccttttttactgcgaataagtctacattctcgacacttttgtaaattaggccctatctcacagcaggagtcatcctgtaaaaaggattccccagtttgcttcagcttcttgactttacgccaatctttcaatactgaacgaggaatgccagctgtaaaatcagtaggaaagttttagcaagattatgctttgtaaaaagttaaactccttgagatgaaattcaagtcagttatacaattgtgatgatacrgtaagactttagtaaagaagcaaagacattaagagctctaggtactgattaatgactaaaaagtgcagcagcgtttctatttacttactaaccaattctattaaccaaatgaaccactcttatgtcagtgtactgaaaatgcagaactaaattttccagctgactgaactctttaaatattattcatgtatgtataatagcaaacataagaatcattcatattctgtgtatatcaataactgaaaatacagtccttctataccaaaagttggtttacataggagaaagctctttcaagatccacagcaagaacgtaaagattaaaggtttatatagttagaaactacaggttagtttcaacrtatttctattgaaatacataatctgattttccaaggtaagtgtggctcattaagacaagtggtaattttataaaacctgtatttgggagaagaggtgcttagctatttctcctaacatctttcctttattataataccctgcatttgatatcaacatactgatggtggcagtatcttttagaaaaataaaagggtttgaagaaagtaaaaggaaaaaaaaattaacttggctatctttattgatgaattaaaatagccatcaaaaaagtaaaaaggacaaaactctaatgcattatacagtctaatatgtgaaaaaaaaatcaacttatttacatactctacatcattgctccatcacatttactgactyatgtttaataagtacaagaacattggctcaagaaatccgtcatctagagagtaagaagaatttctggaccgagaggaactccaaaaattaaatgttgtctattaaaatttttaaaaacatatttatttaaaagtaagctggccrggcacggtggctcatgcctgtaatcccagtactttgggaggctgaggcgggcggatcacctgaggtcgggagttcgagaccagcctgaccaacatggtgaaatcccgtctctactaaaatacaaaaaattagcctggcatggtggcgcatacctgtagtcccagctactcgggaggctgaggcaggagaatcacttgaacctgggaagcagatgttgcagtgagccaacattgcgccactgcactctagcctggtgacagagcaagactccgtccaaaaaaaaaacaaaagaggaaagaaaaaaaaaagcaagctatgttggggtccaggtgcagtggctcatgcctatcccagaactttaggaggctgaggtgggtggatcacttgaggccaggagttcaagaccagtctggccaataggtgaaaccctgtctctaccaaaaatacaaaaattagccaggcgcggtagcacgcacctgtaattccagctactcgggaggctgaggcacaagaactgcttgatcccagggggcggaagttgcagtggggtgagatcgtgccactggattccagcctgggtgacggagtaagactctgtctaaaaatatatataaataaaagcaagctatgttaggatcagcaattagttgttggctctaacttgtaagtgtcttattgcacccatattaatgtatctatatgtcagatattagatttacatagtttgctatttctgtcatgctgaaagaataaaactgtatttcctacccttgtgttttctaatcatgcccaatgtgtggatcagaggtacagctattctcctgagactacgtacttcttgcagaaacttacaaagcactgtgtttaaataaaccatatagagtgacccatttgaaatcaggtccaattattaagcacttctgaattgctgcctcgttctttacaattacatgctttcccctctctgtctctaacttagggtaaggagccatttggcttaatccactagagaaacacccatgtgtataaccacacaccacatctcccggttatggtataaacccatttccagaagacttatgtaaaatgtttatttcctccattgtgcaaaagagatttttcctatgaactgtgtaaaatattcagagcttttacaagttggaatgaatgatagaattgttatactgctgataaatttttatttggaacacttgcttctaatcatctatttacttttcaatttattacactagaataaactaaatacagtctatttctttttattatatgcctttaattccagataatggaacagttcagagtatggatcaccataccactgtgaacaactcagatagtactatagtaaagaatcagacatttcaaagcaaatctcaattatgtgacacaaaataggcatttagagctttttttcaataaaagaataaatgagtacaaagacattaaggcccaattcatacgtagagcttttgatattataatttttgcttctagacaaggccacacatgactgcaactaactccttttatgaatttaactgtcatagtatttgtacaataaataaaacttcatccttcaattccatatatatataatttactggcaatatataaaacctagaagtttgagattaagacacttagtcaacaaaaaaatacctaactcaatggatacttcttcatttatagtaagaaccttagttctctagtagcaaatccacaaatagctgctctaacagaaaactggggaggaagaaagtaagagacaaatacttgccaaacattaatctctgatatgccacccccttaaaaaatatttttttggagatagagaaattaactgtgatcataaaccactggttttgtattgtagaatttatatatttgaatatagtggcaatttcagatcataaaattaaatgtaaaaattagataaaatgtaagatagaagtaaataaaacataaaaattagtggagaaaaagcggctgacttttaattaagagaaacaaaaaggyagcagagaggaagacattccaaaagagtagataagacaaaatctattatatctagctttaatgtactaagaaacacactattatgtgtatgtgtatataaaatatataattatacatgtataacggtgtatgtaatcatattacatagtttaggtgtaagcctaactcattctttttgattgaccatgactgatgacaattctactaaacaatagaaagaaaatagacattatttaatccatgaagtagataatccattaatatttagaagttccctgacttatgaaaactcccaacttaaagaacttttctgtgctcaggagactgaggcaggaggattgcctgagcccaggagttggaggctgctgtgcactatggttacacctgtgaatatccactgcactccagtctgggcaatgtagggagactgtctctaaaaaatatttaagaaaaaaaaaacttttctaggtagcctagaacaaaagcaagtcaactctgtccacaattaatagatgacatctaatattgacttaatattactttggacttggtgaacaaatgggtcataaaacagcctctctaaagctacatgctagttaccaagcaggggagatttgactaaacattacaacctgggggaaaaaaaggcactcattctggcccttttcttagaactcttacatgtgaatatgtatattygtctcaagatgaaaagagaatacgtatttcactaacacttaatttcataaatttaacttcacaagagttttctaggcattaaaacctggaaggtacctatcttttgtttttgttttttaagttttactcaagtatctgaacacccaacaccaaaggaaatgtcatataagacagaagagaaacaattaaattgctcacactaagcctattatgaattcatgggggtagtgagggagagtaaggggaacacataagaaaaagcaacactgtatataatccaatattcaagtaaatggcaggtatccttcgatgttaatccccctctctgtcttctgactatgcttgcatttcagtctgtcagtctctggctctagttgagtttgtcctttgttctttcactttctgactgtccttttctatgattccatcctcctgttttcctctccttcactttgcctctggtttccacacaggcatgtgggaaaacctcattcagttaaaaggcacaaatgggagccttcaagcatccaagtgcttgtgaaagtactttgagtgtccacattgtcacagatatttcatatattgtatgtggatgaacacacggacatagtgaaactaagtgctttctgcattgtgcaacatacctaaaaagaaataagcaaactgagaaaaactactactagagtaaaatgatatagaaacactttatagtgaatattactgttaagtatctcttattttgtccagctgttgccacaaaggatatataatcagttgtgaagctattaatatggcaattctttaacatcgaaatgaatacacaaaaccacaagcctccccttatgttaatttttacctattgttaaggactgtttgaatgagcagcattaaatagatagtaatttccataagcttccaattttgtcaccagatgatataagagtgaaatacagtccacattcatattactctgaagtaaaattggccctccataaccgtgggttccaaacccatgggttcaacctaccatggatcaaaaatacttgggggaaaaaatattctacaaagttccaaaaaaacaaaactttaatttgccatgtgcagagtactatgttcaatcctgcataaatgaagtgatgtgtaagcgttgtgttgggcattataaggaatctagaaatgatttaaagtatatgggaggatgtgtgtaggttacatgcaaatatagtcatacactattaggcaatttcctcactgtaggaacttcatagcatgtacttacacaaacctagcttacaaacccgtacagtatttactgtactttatactgtagataattgtaacacaaagtatttacgtatctgaacaaagaaagaggtatagtaaaaacacagtcttacgatcttatatgagaccactgtcatatatacattccatcattttttgtttattttttgagacatggtcttgctctgttgcccaggctggagtgcggtggtgcaatcatggctcactgcagcttcaaccacgccagctcaagtgatcctcctgcctcagcttcccaaagtgctgggattacaggagtgagccactgtgcccagctgtgcattctgtcactgactgaaaagttgttatgcagcacatgactgtactatgctattttatataagggatgtgcacatctgtgaattttggtatccgtgggggcgtcctggaaccaatcccccacaggtatacccagggacaactgtaactatcttctagaaatttgcctcaaaatatgtgtatgtgagcagaatttctttcctgactacatcttgttagaggtaaatatcttagctgatattacaaatccacttttggtgtgacagccataactgcattttgacaattcttagaaatggccaaaattacgagtaactactaaattccacgttaaattacgcaaattacctacaatgactgtcaggtaagatatatatttctacaagtcttttaaaaatagaggaataagtgttctctcatttcctcttaaagggtacttacttgtgaaatgtagaaatgagatcaatgagcatatacataaagctaaggcacgcaaatgaagacaaaggatgcctttaagctcactgatctttaaagcagcacactagtatagctaaaacattcagcccattttacctgagataaaacaaagtaactgacttactattactgttgctttgcaacttcagtttacttctttctttggcactcctgctgagaactccattgggtttcaaatcttcttctatttcaccttttctcttttgcaaatcattttgcttctttttgtaagttggcttaggttgtcttttagtcctttgctctgacttgctttcactttcatctgagtctccactttcagagccagattcataagttcttttggcttttctcctgttgactttatcatcttttacatatttatcaactatgatcttactatctacactattttgtatatcactagatgtagaggctattaagttgacagaacatggcttaataatttctgatacagaattccctgaattttccattttattagtatttttatcttcttctgagtgtctggtgagccaggcctttttcagtttagtatggtagtttggttgacttgtctgggaagcttgcccatttcctacagagtttgctttgttaattgtactacagattacagtgctatccagaggaagggaggctgaaagtgtctgattttttatagcattaggttcagtctcactggcattactacttttatactgagctgcagccaatgctgccttgtgcttttttaaatggataaaatcagttgtgcctgagaacccagaactgggttgaacaacacttcctgtcttactactggctaatgtaactggtgctgtggtgctgaccttgcattcttgtttttgagccactggctgactgacactttttgaagatacacattctgatgatgtagaggccaaaatggtatttgataaagaggaaattacttctgaaccaccccagctggaaacactggtagtatcggcagcagatgtgattacatccgttttggtattacacatcgtatttacagcagacatgactgaactgggaacactgccctgtgagacagcctgaaagtttttttcagattttgtgtgaacactgtctgaattcacatttggcaaaatgattcttccagtttctccggcttctgctagtttgaggcaatctgttttatgtgccccagctgaagatctttcactaacwcgatctttagaagctaactgcattgctggcatactatcagtttttgtactagaagatggacgcacaatgacagatgccatagcagcctgtaactttccgctgcttttctccacatgccattcagttttctctttgctgaggttattattaggtctccacatctccgtcaaactctgttctgaagaactcttaaaatttgcctgggagtcttttggttcgggtattagagttggaggcttctgtgattcttgaactttaccaccagcatttactggcatcaccggagttaaagttggaggggaaagactactatagctgccttcctttctttccaggctgtgatggattggtgggtgaaatactggtgctctatgtaatgcaggcatactgcggagtgtatttgtagaagaaactgtcaaatgggtaggactcctacaatcatttctgaaggttgttactgagtgagatgcaatctgatgtggaagatgttctggtatcttgcctactaaaccttcactttctggttggtgtttaatcaaaggtggaggctttgaaagagatgttataaatgaagtcagagtttgaggattagctgctgccgctgcaagggcattactctgtttatcaccgtaaatatttgaaacttctttggatgggtatgatcttggtggttcattgaccacactattagacaatgtagtgaaatagttactttggggtaaactctgaggcactgagtgcttcattttataaagatctgatactgagcgttctacatccatatcttgtttgatgatatggcttttaggactggaagatgatgatgccactctggaataattctctctctcaccctcaagtcccttgattttagttgtaaagggagcaacatcaatactttcttgaagaattcgacggtgttcctctttgtatttgtttaacctctctccagtctcctggggtggcctctgtaactgatttaatactggatccacaaaatgcctatgtaagtgacaatcttttccagtctgtgacctatttagatccaggtcatttttggctgatgtggatgcaacagaccgtaatggttccataaaagcttttctttctaattctctgtaaagaaaatacacaaatatttctgtaaccactttttcctgcaaaatacaaagacagcttctatgcaatatcattctattatgaaagtaaaagacatctttgcatgtactctaatactataataaatttgaagaaatatcaaaacagaacaaagcctaatcttaagatatgtgttaacttaaaattaactatttaaaaggcaaattaagaaaaattatgaacaaggtatttataatttttaagcactggtgaacttactccttatgatgatctactaaagtttttgtcaatggtggactggaatgggctgtaattttaagaggccgatgaggctctgcactggaaggtctgacaggaatgtgactaagtaatccaataccatctgctgaggtcacaggggtgggctgatgtagccaaggactgggagaattctattaacaaaacaaaacaaaaaaaacacctagatttcagttactagaaaaagctaaacaccgtgtcacagtagaactgggtatgatcttggtggtttattagttcattcaaatagcagtttctttgggaaacttgtaactttttctaaatacatcttatgagaaatattcagacaaataataacataattaaacagatttttccatatcataatcagtattaaataatttattgtcatcttactaaaaacagatcttgaaatcagtgccttaaatttactataaatgccatatacagaacctagtttatatgatttcctgattctaacagcaaaagtatattgctaacagtaaaaacagaatattattcctaaaacacatttcatcagaaatagaaattataaccaaattcatttgtcaatttttgtcatcaaaaaatttaacttttccaatgtaacaatttactgacaattggcagataattacatttcaaaacccaaatgcactccccatttcactctaagctataaacaaggttgcaccattaagcttggaggtgtagaagtctaataaagttaattttatacatcaatatgctgcctgtctcatgactgaatataaggtgacagcaacctcttcatcgagacatacagctatctgactacatgcttaaggatttttctatattctgactcactgacatccttccagaacatgttttatgaatttgttaataggatgatagtcaaatagcaggaaaatacaacctcctttgtattttctctaacaaagggaatacgttttacttctcaaaataatgcaaaagcagtatgtcacaccaaaaatatactgctatgaaattaaaaacatacactatagccataaaccccacataagagaaaaatacataaatatacacataaggatcaaatatgtgtctcaaacggcctcagttctataagatccagaaatcttaaacagcaatcaattatggcaatgacaacaaagttttgctctataaaatgccattcaaaattatttctcaataatagtgtcttatgcttgtattgtttcttcacttttggtcaatagtagggggtaagatatttttatttttcctcaaaatgttattcaaatttactcctttatgttgtaattttatataacaaataaaaatctgatacacttgtttttagtttaacacatttatgaccagttaataaaatattttatgtacttataaacacagaggctagacagtcatggtctaagtccatatacatgtgacacatactgagtattgctcccttccaagccatttttaagttacttaaatctgttttcaagagtttggatgttaaggaaaaagacacaaatctgttagccagctcttggctctcctgtgttcctctagctagcttatctttgtgcagctgcagctacattaatgacrtgagagtgaagggtcagaataaacatgtgagtgcaacaataaaaatagaaaccttgaattaataatctgagtacagtagggcacttgggtcaccaggcctgctttctattctggtaaagaggataatatagtgattagtgattcttcactgagtttgactatgtaacacacaggttccagtatgactcccatctacgacaaaagcaacggcaccctccaaaatggtaatggaaagcttgtgatcaatggcagcataattctggaactgagatcttgtcaacctcaaatgtggtgatgctggtgcagaatcaactgtggggatcactggtgagacttcattaaaggccaaaggtcatatgaaagtagagccaaaaggagtccatgtttgcaacaggaataaaccacaggaaacatctttcaaaactggtagaccttatgcaagatgcatcatcaaccacttggtgcctcttatcatcaaagttcacccatcacatggttgggcatggtggctcatgcctgtaatcccagcactttgagaggccgagacaggcggatcacttgaggtcaggagttcgagaccagcctggccagcatagtgaaacctcgtttctactaaaaatacaaaaaattagccaggnnnnnnnnnnnnnnnnnnnnnnnnnnnnnnnnnnnnnnnnnnnnnnnnnnnnnnnnnnnnnnnnnnnnnnnnnnnnnnnnnnnnnnnnnnnnnnnnnnnnnnnnnnnnnatgcttttatctactggcatcactaatgttatatgtaaaaaatattatccctgagtaaaacagaaagtcactaaaattgtcttctaaatcaccacccccaactgtgatctcacttaacttcagaaagctgtcaaaaaagatgacattaagatgttaaaaacacccatgtgaggcagaggttgcagtgagccgagatcacgccactgtactctagcttgggtgacagagcaagactctgtctcaaaaaaaaaaaaaaaaaaccccacaaaaaaacaaaaaaaccacccatgttcactgtagcattattcaccacagccaagaggtgaaagcaacccaaatgtccactgacagatgaatggagaaagaaaatagggcacatacatacagtggaatattatacagccttaaataagaagaagatcatgtcacatgttgcaacatggatgaacctcaagaatattgtagtaagctaaataagccagtaacaaaaggataaatattctatcattctactcatagaaagtatctaaagtcatgaaaaccatagaaacagaagaaaggtggttgccaagggctggcagggaaggggagttagtgtttaatggctatagtttcagttttacaagatgaaaaagttctagagacctgctgcacaacaatgtgaacacacttaacactactgaactgtacacttaaaaatatttaagatggcacatttaatattatgtatgtatgtgttttttaaccacaaaaacaaggtgttaaaaagagattctaggggatacttgatgagcatcctaggatgtacgaaggacaaggttgtctcctgggagtttaaaagtgatatcaatttttccattttttataccggggctagtattgctctcaataaccattttttagtgtaaaaatgaatttgctatagaaactacatggctcatgaatgaacaagagccttataccgctacctttagcaatactgtgttaggcagacaaaatctcagctgcagctttaccctcaaatactgggaatctgtaaccttgagcacccttaagggaacaagggggttaaatagtcaaacactgtactataccattaatatacaaacatacatctggagaatataacaatttgtttttaagaacaatttgataatatatatcaaaagccttacaattttataaaaattttagaaatttcacttctgggaatttggctgagcaaaataattatgtataatttgtattatatatattataattattgcataattataattatgtataattttgtgtaataatttttataccaaaaattagccgggcgcggtggctcacacctgtaatcccagcactttgggaggccgagacagacggatcacaaggtcaggagttcaagaccagcctgaccaacatggtaaaactccgtctctactaaaaatacaaaaatttgccaggcatggtggcaggcacctgtaatcccagctactcaggaggctgaggcagaagaattgcttgaacctgggaggcagaggttgcagtgacccaagatcatgtcactgcatctagcctaagcaacagaatgagactccatctcaaaaaaaaaaaaaaagaaaaagaaaatataccaaaaatttaaatctataataaataaatattacaatctaaaaagttttacttctttaaattaattctttttataagtaggcttttctgacgtttcagctcccactcttgaggttactaagtgtatggaaaaacaaccgaaaaattctaacatattttataataggaaatgacctaaaaaatagatggaatattgaaaaagcacctgtacatgttcattaatatatactgctatgtggcaaactacagtgtaacttaccctccttaatgaagcttcagcattaactgcattttctgggtgaacccacttagaagaaggcaaaccragtcctgagtatgcatgtgttccatttggatactgccaaataattggataaagtccaagctgattatatgaagcagaaggatgggcttgtccaagaagatgaggtgactggtgctgtaacaactgttgttgttgctggtgtgctagcgctaagtggctcaagctgctggcatgagcactctctagtcgtgggtggccaccaagtaaggaggcagtaggcactccaggtaacacagtgggaagtaaatgagggtgatgaacagcatggtgtggaccactagtcagaggatgagtgttaatggtaggtaatggagtttgactagatgatccggctagtaaatggggtgcaggagttaaggcaggatgatgggtacctggatttaaacaggttctatgagatgaggagtgaagaggaaaaggatgctggcttaggaaaggtgaaatatgattagctcctgtttctgacccaataagtgcaggatctctgtaaactgtaaaatgctcatttttatcaatgataagaggactctttgtagtttctaatgtactgcttcgagtaggaattggatgaaaactgcatcttgatagctcatgttctatcttatttgccaatcttctttcaccagtagcttggctgttcacataagtggccttagactttacagaatcaggagaatgagttattttgggtttaacaacttcaggtgatgggctggattttatcttgtgagtatctactgaagtattaagtttagattttatagtctctggaggtggacttcgcttatgcagcttatcttccatgacagaaactgcacttaaaggagaaatgtaagagacatacttctctttttccatgttcaagtgatcatttcctgaagaagcatttgtaacacttgattgggttagatccactttaactacatcactgacccagctctggtcagaatctttttttgctgtttccaagaattttgcatttgcaatagagtgttttgaatcactaacattaggatccattttctgaagtgtctgaaggccaaaggtacttgagttttcctgagccaccttttctaaattagtgtcatttgtaatatcaataacacattttggtgtgggtggtctggatacaaacttctcctttggtagcaattccatggtatgtgttttatccatattgcattcctgaggaagtaaatcattagaattatgatcagaaactgtggactgttctgacgwatgaataatcatatcttcttgaagctgagtgtcaacagacttccgcttctctgcttcttcatgttttttatcttcctgtatttgatcccagggaggctggctattttttagggtctcttctcctgccttctcattattatggggttttccttcttctccatttatttttgaagtatttttatttttcaattcattctctggcttctgktctgaggaattatctattattctcttatttgaattttctgagtcactgctctcagaaaagtctgaaacattgtcagttcgaagtcttttcatatttagtttcttttcatcctcctcaggtttccttcttttattcatcaagtgtttgtttttacctttaggattttctgtaggattaaagaaagaagagtcttatttttcatactaaataagcatattttaaaatgtatttttgttttatttgktttcattcccttaaaaaaaaaagtgggtcctacctcctcgtgatatataatcatatttttcctccttcatcttctcttcatctggtatactgctatctgagcccttcctcttattkggacggatacttctttgttgctgttgctggtgtrtattctgttttggtacagcagcttgggagttcattgctggtctgggactatttgcttgggcacgtgtataatggctctaaaaataaccaattaacagtaattgtttactacytggtttctactagcctaaggaaaaatattttacagaaattcatccctaataacatacatacgtgaacagygttgacgttttgattggcacgagacctgcgtcgtgatgtaatgccaatattttcrccttttaacaaagagtgaacaacatcatctagaaaggtcatttgaaccatagaaggatcgacattctgtggttctagtacctaatccatgatacaaaacaaaaacaaaaattaaatagaatgagctaatcaaatatttggtataatttctttactcagtagaaatgtttagaaatcagcttgggatccctaatttataagatgctgttataataatttgttttattcacttaagacaaaattacctttttaaccttctgaaactcaccatttcaactgctaaccaagaattaaaaagcaaatatatttactgcaagtacatcttgaaaaacaagggtattaatcaagaatacagatgccaacaattcttaaattactttttatttttaaatagaaagtaattttcaaaaagcagttgtaaaataaaactcagaggtagactttagggagtagaaaaagacaaaaattgtgcaaatgaataattttaaaaatgtggttaaaactattttaacaattcaaggcagttttgtgcttttctgagaggtaaaagtttgtcactgttttagggaaaaaatcaaatgcaatgaaacagtaacacttacttagcattttaactacattttaaccaaagtatttgaattgtgtataaaggcgctctatcagataatctccacaatacaatcaggcaggaaggtataaatatctattttttctacataaacaacagctttaaaaatgagtattttttgtattaagttaaaaaaaaaatttgaaatctcaagactttcagactrgtacttaaaactccataggagccgggcgcggtggctcacgtctgtaatcccagcactttgggaggctgaggtgggcagatcacgaggtcaggaaatcgagaccatcctggctaacatggcgaaacccygtatctactaaaaatacaaaaaaatagccgggcgtggtggcgggcgcctgtagtcacagctactcgggaggctgaggcaggagaatggtgtgaacccaggtggtggagcttacagtgagccgagatcatgccactgcactccagcctgggcgacagagcgagactccagctcaaaaaacaaaaaacaaaaaacaaacaaaaactccataggaaacttgtaatccttaagattcaccataaaacttaattgagcataccaacactgacatttgatgtgagaagaaatgtactgtgtgtttaagttttcactgatgaaaagaaatgatttcggaaatatttttattactggagggacagaaaaactgaaactctgagaaagaaaattttagctcatctaaggatttaaaaaagactaatcaattaaaagagtttaatgcctctattttaggaactgattttatcagtgttgaaataaattgagcattgctgtctccctatgacctgaaatgacctctatgtaatatcagatacatttaaacttactagaattacacgactaaaaaccctagagataaaaattatttagtakcaaattgttgatgtattttggggggcatggatgatttgaacttttaaaatctctataaaaatattagtggaactatttacctgatcattcataacgatcatggtgcgggtgaagagatcatgatgagtaattatgccagtaaaccactgggtggcagagtcttgtctatatactctcactctgtatccatttaaggaataaggaccttaaaaaaaacacaagaaacagaaacatcttaaatggagacatcttcatttaataactgccttttagaagaaacatgagctagtgtataatagtaatatatccaactatcagttttcaaaaaaatgttttagaagtaaatatcctttcaaatgaatcattctgaagttactatatacactgcactagacccacatacttcctgattcaatagaaataaaatactttaagagagaaggaaggtttctaggatcacgagttaataagagaacagttcaaaatgcaaagttatagtagtgtagaatgcagtaaggttatgaagctacttagtaagattgcagtagatgactacatggttgaaacagaaagattaacttgcaacttgatgtttgtttgagtcttctagttgccaaaactttaccataaacaactataaattttgatttgctatcacagccagaaaaagttgctaaaagtcttaaaaaagagattggctaagtgaatgtatacatatagcactaaaaatttttaacgaaatatggtacacttttgtgctaaactcactttttcaaaggatattcttgtatagatatccattagaaaataataaaaaatattaaacatatttatctgcagatattcagatatgcctaataaaacaagtcactctacagaagaggatactgagatgaaaacgatctttaattcacaggtattaaaatggtatcaaatactttaacaaagaactgtaagggaaaaaactgctgtaccttaataatttacaaagtgctttcaaaattttcaagtgcttatttaattctctctcctaagtattgttagcccttttacaaaaatcaagaaagtgagaggttgacagattaggtaaaattttaagtcaaagatctgggactgaatttatttttctgatattccttcttctacagttgtaacagattcaacaatcctttgccagctttaaatatatatatataaatcaatgaactgtagaaagtattccatatgacctgtaaattaaatactttcatctagagaaaagtgaagatgttgactggctataatttaagggaggtgatgcgtaaacactgtttagtagccatatccattatatgaacttcagtcttttctaactattgaagaataagactccatattattttttctaaataatataggacatgcttatagagtaactccaaatatgatcagttttcaattcccattaacaaacagtttacactggtttgttcccactacttaacatagcttagagtcagcctcacacaattctgcatagaatgaatagggactatactgccccttaatcttttctcctctaaggatacaatgcagaaacaaaatattattttttaaaaatttgcctggtttcttcaacaaataaattgcaaggaaagggaaaaaaagagcaacaatggggatgtaccaaataatcacaatgtgtggaccttttctgaatcccttgatttttaaaaaataaatcaaacctgttaaaatcttcgacgtttataagacaaatgaaaacttgaaatacctagtattttaaatttaaaaacaattacttttttcagaataatgttccagcattgttttgttcaaaaaaatggatagaatagggtgatgtctgaaatttgatagaagggggtatggatagcacaggatcagccaagatttgatagttgttggggctgggagagaggtgaatgaaagttcactgaaatattctgtttttgtatgtgtttgaaattctccacagaaaagtttaaagaatatttagcctaggaagaattaaatatgtagatgatccactactgtacatacccatataaagcaaacagctttgggattctctcttgayacttaatggcatggaagttgacggttgagatagatatgggaatttaacaacaaaattccattcacaaagacattcaacaacagttcatgccatattgtctcactttccattcaatttccaaaaagcttgtatttacaatacatgattttactgacagaaatggaaattgctaaaaatcgtcaaaccccactggtttgaaggtcacacgttgtaacatactaaacaaaggaaacaaaagactagtaatttctgaaaaaggtgcrctgaaataggccacttttaccagatacgaagaacattcttcaaaggaaatcaattgtggctgtgggcaaccctctactgcaaacaatgcttccttctccaggaaagacacacctaaagaattccataatatgcagttttctgtcaacaaaacacctgtgtagctgtaatttcatgacaggcattcagttcaaataaagttaatacacttgtgaaattatyaactttctatcaaaattattatcactctgctattattttcctggatgtatataactcaaaatattggactgggccttctatttatattgcacacaattgaataaccaaaaacaaatatgataagttgcctagatccaaaaaaatttaatgcataacttcaaaatagttaccttgcataaaaatctcctgaaccttttgttcctttacccagactttcacttcctcatgaagctgcgggttgtccctgagaactgggtttaggctgtctatgtcgtcctagaattatagattaaaagaaaggtccatgttacgctctcctaccattaatgttaccgactttccctcctatacgttctaaggactgaataaaattcctttgatctaaatgtatgcaaaaacacaaattcatgagttatagttcattggcaattgtgtaacaaaagagcataagaaattaatctgtggtaagatttgacctttgacaacaatgtcctaaagtcaaaatttgaaattaatgtgttttctaacttttaaagtatagccttattcaagtcatctttttaagggattcactattggaagcaatatacaaatgaaataacatcaggtcatttaaaggtgttggcaaaagaactgaggtgaacatttgaatgacaatagatacatacacagatgacttactgaccttcccataatacttaacctctagactttgaaactacttttattctgtcctgatttaaatgtcatcaaattcagttctactcacagtcatctgaccagtaattttgctgctaaaaattttatttcttgaaactagcgccaaagcatccagacaattaaaattacattattgatggtattactctcataacaggctggatctagacatagaaacaaccaattctctctcattggagatgtgaatcatacagtcacgtgatttcccacaatttgctggtctcccactggactctgatattctgttctctctctctctctctcaaagtacctctgctgctcctgcatttgagatcagctgcagggacactagagtagctgagaagaataacaaaccagcactgtcaaatggcaactatttttaaagtggacaggcagggccgggcgcggtggctcacgcctgtaatcccagcactttgggaggctgaggtgggtggatcacaaggtcaggagatcgagaccatcctggctaacatggtgaaaccccatctctactaaaaatacaaaaacatattagctgggtgtggtggtgggagcctgtagtcccagctactgaggatgctgaggcaggagaatggtgtgaaccggaaggtggcacttgcaatgggccgagatcacaccactgcactccagcctgggcgacagtgagactccgtcttaaaaaaaaaaaaaaaagtggacaggcagatcatggaaacccgtgaatagaaaagagctaaactaagtgaactatatctgatgaataaaaaacaatttggcaactttgaaaagccaaaaggtagctgaagtgtaaaaaataaaaaaggacccctaatcaagtaggtcatacttcactcttctccaaagtctatccaggtaaagtgtttccttctcatactgctttttaaggcactactctgtatttttagaatagtattgtggtaaatattctatctgatatgtacttaaacatagtgaaagccaacaggccaaagtaagggcctttaaattaattatgttccttggaaaatacatagaagtactgctttacagcagaagaaaataccagaatgaaaaactgtcatacaaataagtaggcaaaatctgtcattttgggagaaagaaatgggcattaacatgtctttctttactttgcaaagaaactttctagcaatctcttttctctgcaccccctcaataatacagtacacacttagaaagtcctatcagactctaacccccttaatgcacaccagctgacagtctagtcgataacaaacagaacataggaaactttttgtttttgttttttgagacggagttttgctcttgttgcccaggctggagtgcaatggcacgatctcggcttactgcaacctccacctcccaggttcaagcaattctcctgtctcagcctcctgagtagctggggttacaggagcatgccatcatgcctggctaatttttgtatttttagtagagatggggtttcatcatattggttaggctggtctcaaactcctgacctcaggtgatccacctgcctcaacctcccaaagtgttggtattacaggcgtgagccaccacatctggcccatagaaaactattttacaaggaaaaccattactattttcagatatctctgacagcaagttcttttaaaatttttctcactttaaaacttccttacatagcacttccgccagggaggtcccccatctgcagtcatgagtcatttcaagtttatcgatattgttatcaacttgactgacaccatgttcagaggaatttataggggggttcaaaagcatcaagatgatttacaggatgtaacagggagagctgtcgagattggtgttaaaaagtttatgattacaggtggaaatctacaagacagtaaagatgcactgcatttggcacaaacaaatcatatgtttttcagtacagctggatgtcatcctacaagatgtggtaaatttgaaaakaataaccctgatctttacttaaaggagttgctaaatcttgatgaaaacaataaagggaaagttgtggcagtaggagaatgtggacttgattttgactgactgcacttttgtcccaaagatactcaactcaaatactgtgaaaaacagttwgaactgtcagaacaaacaaaattaccaatgtttcttcattgtcgaaactcacatgctgaatttttggacataattaaaagaaatagagatcggtgtgtagagggagtggtgcattcatttgatggtaccaaagaagcagcagctgctttgattgacttggatctttatataggatttaatggttgctcactgaaaactgaaactaatttggaagttttgaagtcaattcctagtgaaaaattaatgattgagacagatgcaccttggtgtggagtcaaaagtacacatgctggatcaaaatatataaaaactgcatttcctaccaaaaagaagtgggaaagtgggcactgcttaaaagacagaaatgaaccctgccatataattcaaatattggagataatgtcagcagtgagagacgaggatccactggaatcagccaatacactatataacaatactattaaagtattttttcctggaatataattggtatatgtcttccactttccatcatgtatgtaaaatttcatagtaaaacttaccgatagtttcartaaagaaattatctgcaaaaaaaaaaaaaacccaaacaaacaaaaacttccatacataaccatccatataccttttccataatatagggaattataaactgttttttctgtgctgktttttttttttttttctgagacacagtctcactctcccagcccgtagtgtactgggcacgatcttgactcactggaatcttcgcctcccaagttcaagcgattctcctgcctcagcttcctgagtagctgggattacaggcgcataccamcatgcacaactaatttttgtatttttagtagagacggggtttcaccatgttgaccaggctggtctcaaactcctggactcaagcgatctgcccaccttggcttcccaaagtgcagggattacaggcatgagccatcacgcctggctataaactgttttaaagaagcattgccaacaccgtgcagacaagtacaccttataaaaccagttgactgtgttggaattttacaacttataactcatttatttatatcttatttattcaacaggttaaaataatgggctataaaaccagttgcctatgtttaaattttataagttataactactaggatatataatctatttcttcaacatttatttataaatattttttgttttgttttgttttgagatggagtctcactctgtcgcccaggccggagtgcagtggtgcaatctcggttcactgcaacctccacctcccgggttcaagagattctcctgcctcagcctcctgagtacctgggattacaggtgcccaccaccaagcccggctaatttttgtatttttagtagagacggggtttcgccatgttggtcaggctggtctcaaactcctgacctcttgatccgcctgcgtccgcctcccaatgggattacaggcatgagcctccgagcccagccttataaatattttttcaacaggttaaaataatgggctctatttccaagatcattaaacaatatacaaatatttttccaacaataaaccattaattatctagcggaaatagcataccattaaaaactgttaaattgagtccctttactgataatgactttatgtaggttcaaactctggtctctcaatctcctcatctataaagcagagttactaatatttccctctttttctatcttaataaatgttttaataagattttttcttatgtacaaaaattagctttcttaaaatatctaattctgatttatgacatttgagtgctgaatgatgtgaactacctggttaattaaaacccacaaaaagtatcccaatgcactgcctgatttatgacaggcattgttgttgaattcctccccctcgtctacatatagtactttgtaagttacagggatttctgttacatcatcattcccattttaaagaggattattaaaggttaaatgagcaaatcttgaaacaaagccaaataggttttttatatatatatttactgacttgaataattttgtaaaggtgctaaatgttagacagaagtcaacaaggctgacttacagataagagaaattaagggtctggaattaaaaactagctatgaatatccactatctttcacagaatttaaaaggtcttcagctgtgccttgagctcgtgtgagattaaaaatccacttaatgggccgggtgcgatggctcacacttataatcccagcactttgggaggccgaggtgggtggatcacgaggtcaggagttcgagaccatcctggccaacatggtgaaaccccatctctactaaaaatacaaaacctagctgggtgtggtggtgggcgcctgtaatcccagctaccagggaggctgaggcaggagaatcgcttgaacccaggaggcagaggttgcagtgagccgagattgcaccactgcactccagcctagagacagagcgagactctgtctcgaaaaaaaaagaaaaaaatccacttaatggcacagtcttcacatttcacactttaaagacagtaactataagtagttacctatatatagttcttatcttgaataactaatacctattaatttttcaaaaacaagtcacctaagctaattgaagagacaggaccctctatgaacctctcctcctatgtaaactgtatcctatttgagctactagttataacctccagcaaacgacaaatggaaaaaaatcagttcactaagcatctgctttattagaaatgtatacagaacacagaaaaagttcaaaaaacatcttaaatgaggtttgggggtacatcagtcacttgtgtgttgttcctcctcttgcaaagatagacatgaactctaattgaacattagtgagacaccttaatgtactgatacacaaaaatagctaccataaggccaggcgcggtggctcacacctataatcccagcactttgggaggccgaggcaggtggatcacctgagattaggggttcgacctggccaacatggtgaaaccccgtctctactaaaaatacaaaaattagccaggtgtagtgacacacgcttgtgaatcccagctactggggaggctgaggctggagaatcacttgaacccgggaggtagaggatgcagtgagctgagatggcgccattgcactccagcccgggcagcaagagcgagactgcatctccaaaaaaaaaaaaaaagctaacctaaaggtgcatttactatggcagacactatgctgggtactttccatacagtatcaattgtaacaactttgtgagctgatatacacagtatgttcagagaggttcatggttacaagcaggaagtgacagagctgttatctgaacttagttctgtgacttccagggctcaggttcttctcccccacccccccttccctccacatacactctctctcattagcacaatcaaaagaaatgaaagtttactattattgycttttaaaatttgacacatttctttatatgtaaggggtaaaaggcaacattatcttataaactgaggctgactcaaaagcaaagaacaacgggtggaagatacctttctataaacttctaacactggttatgtgacattccacatatagaaatagtcaaatactcatcaaagagaggagacttagggtggcaaactcatgcaatcttataatcagaaagtgtaaaagagaagaaacctcactttggtgatgtaccttagtcatgatctacaaatacccaaatgctgtttttttctaggttaacactgtgctgaatgactgcttggatgatcaaaataaaggtattttttcacgtgtacaggaggggataatggggccgggtgcggtggctcacacctataatcccagcacttcaggaggccaaggtgggaggatcccttgagtccaggagttcgagaccagcctgagcaacatggcgagatgccattgctacaaaaaatttaaatatcagccaggcatggtggggtgcgcacctgtagtcccaactactcgggaggctgagatgggaggatcacttgagcccaggaattcaaggcagcagtaagctataatcgtgccactgtacttcagcctgggcgacaaagcacaaccctgtttcaaaaaaaaaaaaaaaaaaaaaaagagagagagaaggacatgatggagtaaaaggctgaaatcaggccgggtgtggtggctcatgcctgtaatcccagcactttgggaagccgaggtgggtggatcacctgaggtcatgagttcaagaccagcctgaycaacatggtgaaaccaaacctcatctctactaaaaaatacaaaaaaaatgtatttaggtgtagtggtgcgcatctataatcccagctactcgggaggctgaggcaggagaatcccttgaacctgggaggcagaagttgcagtgagcctagattgtgccactgcactccagtctgggtggcagagtgagactctcaaagaaaaggttaaaatcaggctggaatgtgtattttgacagtaagactactgtactaacataattttaggtgattatgtactttctacttaattcgaaagaaaaaaataaccatctaggtaatataaaacataagctcagaacactaaaatattcagatatgcctagttaggtttaatgacaccagtattatgaaaatgttaaaaatatacacaactcatttcctaagataataaggtagagtgctccttgccagttcaagaaatatattatttatgtcacacatagtctcatttgactgctgacaaaaaaccaacaaagggtggttagtttctaagtgacagagaagactggcttaataacgtaacagatttgctcaaaagtctcaactgatgtctagagtagcactttcattttaggataaaagaaatatcacaaaactgcagcagtttctcctcctttggacaatttctgatagataatgactgaatgctcactttcaaattgatactgatatgtgtggcttattaatggaatgattttcccctctgctataaaacccttgacctttgtggtaacatccagtgtgctttcttaaattccattccatgacataaatttctccataaaaaccatctttgatagtataagagttaccataaaagcaattattttgtatcctgaacatcagattaggtgattgaacatgttttgccataccagtttcgccagtcataaattcatggtttagcaaaactacaaatagttgcttgttcttagatccctgagattgctggcaacagttttaaaacgtgaatgttaagtccacaagagtgacattaatttttaccacaccacatctttttaacttatamaagaatccattttgctaataaggatttgctgggacaagaaatatataaagtttgaaagttgctacaggggtgctcaaaaagcaaagctgtctataccacctgcagttaactaaatgaaggtaccgctgaaggcttccatgtattttcatgaattataataagggctagcaaacattttttgtaaatggccagaaagttaatatattaggctttatgggccataccagttgtcacaactactcaaccctgctgttacagcagaaaagtagctaaaaaaataccataaaaatacataaatgaatgagcatggctatgttccaataaatgtttctatattagcattctatgaaatttgaatttcatagaatgtttaggtgttatgacatattcttctttttgagtttttttcaactgtttaaaaatctaaaagtaactggacacagtggcttgtacctctaatcctagctactcaggaggctgaggtgggaggatcccttatgcccagaagttcaaagctacagtgaggtatgatcactgtagtcactgtactccaccctgggtgacagagggagatcctgtctctaaaaaaattaaaaaggaaaagataaaaacaagaagcaggctggattagcttgtaggtacagtttgccttttcctaattaaaaacaacaaaacagaacaaccagtatgaagcaagattaaaaacttctacatcaatgtatcaaatacaattttaaatatactaatgcaatttgatctaactgactgcaaactcttatttccacaaatgcttgaaatatatacaatcaggagcacaggaaattaaatcaataccaaatccttttcaccagtaaagacaaaaatatcttaaggtaaatacattatttaaactttcacaagtaaatgagtttccctgatttattctggaaaatgcttagccttccaaatataacaatatacttgattttaatgtacataatttaggaaaaattatctaatttgcaagataagatttcctccattaggtcaatgactattacattcagagattggaatcatcatcttctctgggctctcaagtaaagtaaaaatgagaatatgcattaaaaagtaagagatattataaagatagtctacctgatttattaaggacacgatagattaatctcttaagctctctatgtaggtgtgtgtgtgtctgagtacatataaatataaataaatacttttttwaaaaaaaggaaacatattaaaagatttcacataattaaaagcaaggggtaattaagtctccgtatacaaaatttcatcatttgattagctgtggttaattcagacgtctagaatccagactatcatttaaactaaagcaataaaatgtctatctttccaaaacgtaattatacataaagattcggatggggctactctgggcacactgcctacagggtagccctgctccatgagcagcagtttaaaaaaaaacaaacaaaaaaacagattaagatggtaggaagaaataggacaacaatttatactatccatgtaattattttctcattcatacaatcaagaagataatataaaatatgcttagtctttctaaattatttacattctgcaactagatgagacaaatttagtttctgaatagaattgatgaaaggagtaaatataataaaactctattttcatttattgtaactggaaatagtctagaaatggaagtgacattcagaaaatcagaatgatgtttagatttatttttttattggctaaaaaaggattgttgtaccaggggaaaacagcaaacaccaacattttaatctgttataattattacatttttgcattccaataatattctttgcattygagttttatttttatttagaaacaaaacaaagtgatgaatgactgtgatcccacactgatctaaagaaagcaatttcagtaaaaggctattttaaaaaacccaaaataggtttaggtttttttcctaaaaattaacatactggtaagcatattcatcagatatggaggcctaagtggaattggtaacttgaagtgaaccttaaagacaatgtctagcatgtccacgggcaaatcattaaatttggcattaagtctgtctacacataaaatgaaaataagctgggtgcagtggctcatgcctataatcccagcactttgggaggctgaggtgggcagatcacctgagatcaggagttcgagaccagcctggccaacatggtgaaccctgtctctattacaaatacaagaattagtcgagcatggtggcgcttgcctgtaatcccagctactcaggaggctgaggcaggagaatccgttgaacctgggaggcagaggctgcagtgagctgagatcaagccactgcactccagcctgggcaacagagcaaagactctgtttcgaaaaaattccaccacttctttaccctgcactttttacaagttttgaataccattcattttcacagcatcaacatttaatcataagaatttaagaaacatattaacttgtataatatgcagaaggctccacaaacataagagctaaatgttttgtccatttcataaaatggtaactgtaaatacaattggagctttaagttgcattcacaatggtagttacttaaaccctggctctattaaaattacaaaaacttagctgggtgtggtggcacacacttgtaatcccagctacttgagaggctgaggcatgagaatcacttgaacccagcaagcagaaattgcagtgagacaagatcatgttactgtactccagcctaggtgacagagtgagactgtccccccccccaaaaaaaataaataaaaaataaaatttgaccaccacatattgccacaaaattgtctccaaatgctagtgggagaaaggaggctttctaccacacaaggttaatgcaatgttatttcaaaatatttctaacataattctgagtctgtattgtcaattttggtgatgtgattctgtacaacacataatataataaaatctaaaaattaccagatttatcatcattgttaagtttttaagttgtaagcagaattttaaattattataacttttaaggaacctcttgattctctgtatacattccaaacatgaatattttagagccaagcacttgggacactatttacacaccaacactcccccctcaagaaaaaaccttaaactatgcaagcaagatcttaatgcacacaaatcagaattaagctggtagtacaggattcactcaactgtgatcctaaatttctgtgattactttgattttctaaataagatgggaaaactgtcagtttagagaacagaactgacttcaacggcaattaagcccagctttttacaaagcaagctttagaagcaatgacttactgcaattagcctggtggccttaagaatttcctgccaaacacaatcaaaaacactgattagttatagaaatcaatgagcaagcccgagatctgtatggaatcaaatggtggcagggcctatacaggaactgcaagtatataaaacaaggaaataggccgggcacagtggctcatgcctgtaattccagcactttgggaggccacggcgggcagatcacttgaagtcaggagttcgagatcagcctgagcaacatggtgaaactccgtctctactaaaaacacataaattagttgaacatggtggcacacacctgtaatcctagctactcaggaggctgagacaggagaatcgcttgaatccagaaggcggaggttgtggtgcaccaatattgtgccattgtattccagcctaggcgacagagcgagactccgtctaaaaaaatataaaataaaataaaacaagaaaatagactatctcctttactctttttttcctctagacagagtctcgctcttgtcactcaggctggagtgcaatggtgtgatcacagctcactgcagcctccgtctcctgggttcaagcaattctcctgcctcagyctcctgagtagctgggattacaggcactgccaccatgcccagctaattttttgtatttttagtagagatgaggtttcaccatgttggccaggctggtcttgaattcctgacctcatgtgatccacctgcctcggcctcccaaagtgttggaattacaggcgtgagccacagcacccggtctcctttacccttaagggcttattttcatactgcttcttctaaagttttttttttgtcatagtcttaacaatcatcttctcaatatattactataatgtgaagtcatcccctttctggaacacgttcatcttttcaaagttgtcctgattaaaaaaccactgatcttttaaaattgtttaaaagtttcagaaaagaaattttattaagcccatgaatgttaaaaattttttaaaactgcatctggtcctttacaatgacaacataatttacttttayctatgaaaagaaatgaaaaatgtaaaactgatactggttaataattcatttcagagagaatgagtatagctaaaacctgcagcttgatccaagaatattaactgttatgaaggaaaaaaattccatagtcctaagaaatctacctagaagtttgctgttgctataagcaacccactgttatatatccagatatttcagggatctctccttggaacatccatttggcattgcttgcaactacttatatcattaattactaaggaggaaatgataaagtttaagagaagtatatgtcatgagaaattatgaaatggtaaaagggttctgaattttaaagtctcaagattttaacattttatgtacaaagttctatgatgtttctatggactcatgatttttcaaattaaaatatgattacatgaaataacattcctgtgtcattttcattatttggtatatataaattcaccattaaattaatttcaaagttcattttctgtttacttttaaatttttcctctgttcaaatttttagcaaaccacaattcttgggaactcaaatgttactgcaaacttcatttaaagtgaaaaagaaaactacaatgctgtctaattccactgaatattttaagttattctctctcagttaattttgacattctgatctagaaaagtgactctgacctgaaggctttcacaaaaattatcaatacaaaaacaaacaagcaaacacactacaatttaatggaatctcaaggctgaaaaggttgccacaattttagttaatcctttatagttaaaaatgtgtccaattaacctgcatagtctaaaatatgctcaactgagcaccactgttttcaaactcttcacagcatattaataacctgatttacttcttaagcatatttccctaaggataaaagagtatagtcattttaactcttagaaaagcactgtctgtaacattagcactgataaaattagacttaaaaaaaaattttaaacttcatgtctaacaacacccaaaaaaacaaatctcaaattataatcacattaaaacacaccaggcaaacaaaacagaattaatgacaaatacaagggtattttaatataattgttttcattatattcgtcagaatttatgtcctggaattaaaatatcccccaaatgaaatctacttaagcaatgggatacagccttaaaaatattttatcttggctcaaatgatcacaaacagaaccataaaaacattccttttacttttccaactagaaagattttatatatatatgtatctccatatatacatattatatatatatatatatccacacacgcgcgtgcacacacacacacacacacacaccaccaccaggatatataacagatattaccagtaatttctttagctgagttatgaataatctactttgctatgcttttatgtatttttctggaagttttttattttgcaatgaccatgttttgcttttataatgagaaaaagaaacatttaagatgaaaaagactgatgccaacaatttattcacagtaatactaatttcctttgttacaaagtttcaacaaaaaatgcaatataatctgacagttaaatatgataagcatactccatagaaacctagctaatttagaaattttgttggtaatgataacagagtaaaatgaaaatactctttgcattcttttaaatactcacattaaaaggtggacttaatcacttgagatccagagttacgagaagtctagcatgggtaacatgacagactcttgtttagagtctcttgaaaacaaacaaaatgtaatcacagcactttgggaggctgaggcaggtgaaacgctgagcccagagtttgagaccagcctgggcaacatggcgagaccctgtttctacaagaaatacaaaaattaggcaggtgttatggtgcatgcctgtagtcccagctacttgagaggctgaagtgggaggattgcttgagcatgggaggtagaggctgcagtgagccacgatcgcaccactgcactccagcctcatcaacagagagaaacctcctcttaaaaaaaaaaaaaaaaaaaaaaaaaaaacaccaaaaacaaaaaccttccctatcctataaaaaaaaaccttttaatatgttaatacttaaatttttagatttgctaaaaatatcgttaaaggcctataaaaagaacgagttatttaatgcaatattaagctgggcatggtggttcacgcttgtaatcctagcactttgggaggccaaggcgggaggatcacttgaggtcaggagttcaagactaacctaggaaacatagtgagaccctgtctctatttaaaataataataataaaataaaaaataacaatgctattctattagtacgacattgattgtaccaggtattactcaaatgaaattcttataaaacctttgctagtcataaaaataaaaatttaattctgtaatacattttttatgaactaagtcataaaattcaaatttaacttagctagagggcatacattttctttacttaacagatgtggtatacagaaacatatcacatagtatgtatctgatgattaatgttctaggaaaaaaacagtaatacaacatacacatttaagaaacagacttgtaacttagaaagcaccaggtaaaataaattttgtatttattttaaaaacttgatgcagcgtttcagatactgtgctagaagactaaatgccttattctataagtattttgccaatataaatagcaatttaagaaaatcagccgggcacggtggctcatgcctgtaatcccagcactttggaaggctgaggcaggtggatcgcctgaggtcacgagttcgagaccagcctggccaacacagtgaaaccccatcgctcctaaaaatacaaaaaattagctgggtgtggtggcaagcgcctgtaatcccagctatcagggaggatgaggcaggagaactgcttgaacccgcgaggcagaggttgcagtgagccgaggttgtgccattgcactccagcctgggcagcaagaacaaaacttggtctcaaaaaaagaaagaaagaaagaaaatcagcatgaacacaaaaccaaaattcagtcaattccctattattcagaaagattatttatctatttaacagttaagcatatttacttgccactgtaaattaaaagattttttaaattgtcacaagagaagcactttcacaaagattaacctcatttaatcctaacaatacctctgctattttgatattattaggtaatttctccaaaatcacacagctagaaggcaaatcagcaaaggtctgtctaatgtcaaagcacttcccacatacccttttccccatccatgcgcttgcataatcaaaattttgcatgctctctgctaggttttcaataacttacctacattattaggaatatggtcacataaaaaggaagatgacccaatttatccaatcattttattgttatttttaaaaacagaaaatgacgtagctaaattaaaaccaggttagaagaatatggtattccaagactagaaatggatatcataaatagattatataatttatgaaaatcctcaagagtaattttggaattggatatactatcttaatatacatgtcctattacatcaaatcacaacaaacaactgtgtatcttgctttatctattcggttacagcaatattacattaacagctattaactagcttttttattaattaaaaataactactaatagggtttcttggttgatcacccaactgaaacctatctttcataacaatattcccttgaataaacttgatccagacctgtaatattcctgcattttaactacaatttgctaagtgtcattggtataaggtccgctcctctcagaataaccagagtaaaaaaatcagataaattaagaaaacattataaaaccacttgaagaaaaatgtgttttcttctaaagccacatgttaatattctttgtgatacttttaataatagttttgaactttttatggcagttcaaaagtctggaaggcagtttttctttcaagctatttattggcatgacttttacacagttgagtcatcatgagtttaacctactgagtcacctgcttacagcatctgccaaccacaatttactaactgcagcttcctcaaacttaaactgaaacaaactcaggaaggcctgggaactgtttaatattttccaaagtagtaactgaaaatattcctccagcacaacccaagctttaagaagtaaaaaattcctgggaagctggggagggaggtcaacaacaaaaaagaagtaaaattatatacttgtataaagtattctactgaaaattcctgtgcacaaactaatactgaggctgggcatggtggctcatgcctgtaataccagcactttgagaagctgaggcaggaagatcatttgaggccaggtgttcaagaccagcctgggaaacagagagaccctgtctctaaatatatatttaaaaacaactaatattgaaatagtatacatatacaatcgtgtcaatgattgattcatacagaacaaacactgtttttgttttgttttgttttgtttttttaagacatcttgctcttgtcccccaggctggagtgcaatggcgcaatctcggcccactgcaacctccgcttcccaggttcaagtgattctcctgcctcagcctcccgagtagctgggattacaggtgcctgccaccatgcccagctaatttctgtatttttagtagagacagggtttcaccatgttgcccaggctggcctcaaactcctgacctccggtgatctgcccgccttggcctcccaaagagctgggattacaggcgtgagccactgtgcctcgccaaacactcactaaaaaaaatttttttttaatatacagtgcaatgaatgtaacttccaaattaataccacatcgaagttttttgggctgattttcacttttagcatatagtgctatggaaatgatgaatctataaatgaactatagtaccatacttctattttctcagaaagaacgaatacaatccagtacaaattggaatgatcagcaagacttgctagacttgcccagtgacttagtcttttatgacacctatttgagtccatccacttccttcactgaggtctttgtagagcaattacaaatacaggttgtatccaaaatgcttggagtcagaagtgtttcagatttcagatttttaaaaattctgtaacatttgcattacgcttagtagttgagcacacataattagaaaatctgaaatccaaaatgctccaatgagcacttcctttgagtgtttcagattctggggtttttcagattttagatttttggattagggatactcaacctgtacataagaaatgtgttaaattacacaaaaagaaaaaaaggcggccaggcacagtggctcatgcctgtaatcctagcactttgggagaccaaggtgagcagatcacaaggtcaaaacttagagaccagcctggccaacacagtgaaaccccgtctctactaaaaaaaaaaaaaaaaaaaaaaaaaaaagccgggtatggaggcaggtgcctgtaatcccagctacttgggaggctgaggcatgagaatcgcttgaacctgggaggtggaggttgcagcaagccaagattgtgccactgcactccagcctgggtgacagtgtgagactccatctcaaaaaaaaaaaaaagaaaaaagaaaaaaaggaaggaagctataactaaaattccaatgtatcataatagaaaagcacattagccacctagaatttttaaggaaggtattatccatagtactctttacgatgcctttcagcattttttttttactgctcctagaaagtttaacgtatttagaaaatttaatttaaaaaagggaagagaacataaactgaatgaagcatattaaatgcttattatagtttatctttaaaaaaggagtttatataacataatttgctgaaattctattaattttgaataaaaatatttagagttccttcatgaaataacatactgaacataaggtctttaaattaatactcatggttatctttatattatgatgcagttataatcgatgtaaactgtaacctctataacaaattgttccagaaagacaaaattttagttgtaactgttttttagttcttccataacctcatgctgtcaagctgccaatctaccatcaccactttttaaagtgttggcttctcatatgctatggtaagggaaactagatttgacagcttgttggaattatgtttgaaatagtctaagtgtgggactaggaggctctcattactaaaatttattaggaatatatttcattcaacaagattttgaacacctggtatcaattactgtgccaaggcactggcaatatatctaagacaaagttcctgacctcaaggatcttacaatccagtggaattgagacagacacacaaatacgatacagattaaagtatctttgtatcctctaggatacaaaggtgagacaaaatgggttggsgggtgacctagttaggtgtgtcaggaaaggatttacagagaaggaaatatttgagttgagactcaagaaaagtatgaaaccaaggtttttgagttggaacttcaaaactgcaagggcatctgccagataataagagatcagaaaagaaggtctttcagacagaggaaaattcatacgcaagaatagatgggtgaaacartatggaatatagggacaagtacactggtatggattgaattraggacagcagagtaggtgaggaagaaaactgaaagactgtagtttggagtgttctgtaatagtctaggcgggtaaggatgggagccttacgatagaggagaagggacagattaagcaaagttaaagaggcagaattagtaattctgggagactaatatgtaagggcaagagagagacctaaaacattcctacatgttgattttttttttgagacttgcgtctcgctctgtcacccaggctggagtgctgtggcacaatcttggctcactgcaacctccgtttcctgggttcaagcaattctcctgcctcagcctcctgagtagctgggactacaggcatgtgccaccacacacggctaatttttgtatttttagtagaaacgggggttttgccatgttggccaggatggtctcaractcttgacctcaggtgatccacccaccttggcctcctaagtgctgggattataggcgtgagycaccgctcctggccctacatgttgatttaagtgacaaactggcatagatgtgattgatctcattagctgggatacagaatgatcaggaagaaaaacgaaatcaaggtctgatggttgaatgtgaatacagtaaatagacagcagaagacatgggtttcaccttttcaatgatatctactctgaacattctattaaatatctgcttctcccctccccaatccttattgatcttacactgctttacattttcattttgtcatcgcatttattacattgtatatcacactatataagttacttattacacttattatctacctggcctctccagaattttaactccatgggggcaggaaattttgtatgaatactgcctggcacagagaagatgcttagtaaacagttattaaataatggtagagcagagaggtctggagttttggattcagaagacagggttttaaaagacagtggaaatgtgacacggcttagggtgagtagtgaaatggaaaaaaccaaaaaggaacactacagaaaataaggagcactacaaaaaaaaatcacataaacactaaatcttctacagagagaacaaacatacagcaaagactgattwaaaaaataggaaaacctgaagagaagtatcagagtagcaacaggaacaaagaatttccaaaaggacagtgatccagtgttaaatgcaaaggttcagtaggacagtgatgcacacttgaatattaaatgcagtaactaagagatgattagccatcttagcaacatcagttttgtgaagtggaggaagaaaccaggctgcaataactgaagatattattgggaagcaagaaaatatagatataacggttcacattataagaagtccagctatgaaggaaaggagtaagataaggccataaccagactgggtgtgataacttttagttttttatattagagggttgagtttatataatgaaaagaaaagcaatgaaagaaaaataggcttaagatttggtaaacttagaaaagtatctgtgaagacaggttctagaatacaaaagatattagctttttaaaacataaggcagagagaggaacaattccaaacgactacaaaacacaataaattgagtatatgaccagcgggatatctcctaaggataaaaagaactggaacaaaaaaatacactgttttcagcaattataccattggtggtaaccttagtattgttattctaagtctagtggttacataatgtaagacaaagcaaatgagtaagcctatgatactcttatcattcctggtgttgctgagaagtggcggtattataaaacataagtactgtgaatgagactcgactatagagctagactgttttaatttatgcacatacacacacacttagaaatttaggggcaaaataatacagtgtgtgggatctgctttgaaatacggatgctcgacttatgaaggggttacatccagataaacccatcctaaactgaaaatattaagttgaaagctcaggaacatactgaatgctcctttttcacccttgtgaagtcaaaaagtcctaagtcaaactatcatacataggggaatatctatgacagaagacgagcagtaaagtgaaacaatactggccacaaatcgataattgttaaagctgcatgctacatggaagcacattttactattctataactacataggtttaaaattatttatataagggaaaaagttttatcatattacttttctgctcaaaatgcttcaaaggctttcactccaagcttaatcagaataaaaaataaagtctttataatagcctaaaaagcccaatttaatttacccttatagcctttctacatcattttctactaattttcacatagtatgttattttttcaatcttcttgctttagggcctatccattttctgttccaactgacacttcctgtcactttccaggctttacttttctccatagtactactgtcttctaatatgctaaacagttattttgtttgccatctgtcttttcccacaagaaggtaagttataggaggcaacaaatttttgttttgttttgttcatggctgtaccctaaatacctaaagtagtacctgagatgtagcaggtatctaatacatatttgtaaaactgaagtagtagaagttaaaacagacacatctctaagacaagaggaaagcaggtaaggagaggtacaaaaatagatatgagaacaggaagctaacggggttcctgcttataacctcaatttcctttgtgcaacaggagaaagatcatctattaagagaaaaggaggaagctgagtaaagtagtgataatttggaataattactttaggaaacagaagttcacaggggcatgcgaaaagaatgccaaatgatatactaagggctagggtgatactggagacaatacaatggtaccaaaatacatggatgtcattttctgtgcagtattcagcatttagaggctaagtggttgagaagaattttctacagcataaatggtatatacatgcactgtcccacatacgattatctgggcacttgaaatgtgacctgcacgactgaagaacttttttaaaatttagttttatttaatttacgtttaaatagccacatatgactagtagctaccaataacggacacagcaggtttaggatacatgaaaaaagcaggccgggcgtagtggctcatacctgtaatcccagcactttgggaggccaaggtgggtggatcatctgaggtcaggagtctgacaccagcctggccaacatggtgaaacaaaccctgtctcttctaaaaatacaaaaattagctgggcatggtggcacatgcctgcagtcccagcaacttgaaaggctgaggcaggagaatcacttgaacccaggacgcggaggttgcagtgaagcgagaccacgccactgcactccagcctgggcaacagagcgagactctgtctcaaaaacaaaaacagattacttttctaatgagtctcttgaaagcacacagaacagaaactgagatttacccaaacagacctatttattttcttaactctgaccatatatattctccttattaaaaaaaatttagagtacaaagtgttttcatatatattacctcatagacaatggcaatgatatcatacctattttatagataaaaataaaaatttaagtggttaagtggttatatgcctttcatagcatttcagatagtaagcaacaaaattgggaatggagtccaagatggactgttgttctattgccaatttctgagacttttaacagatgtaaactttgacttctctcaaagagccaaaatacactaacataaattatatatatawatatatatataaatatatatatggctagataggtatctttcaacaaaatctcaatagaatttagtaacttattctacaattgttgtgagctgattctggttctctctatatcttaaaatttgattaatttggccaggcgtggtggctcacgcctgtaatcctagcactttgggaggctgaggtgggagtatcacctgaggtcgggagctcgggaccagcctgaccaacatggagaagccccatctctaccaaaaatacaaaattagccaggcatggtggtgcatgcctgtaatcccagctacttgggaggctgaggcagaagaatcgcttgaacctgggaagcggaagttgcgctgagccgagatcacgccattgcactccagcatgggcaagaagagcaaaattctgtctcaaaaaaaattttttttcactaatttgtaagcaacttctgattttaaataatattagcaataaatcagttctcgaagttcttggtacaaaggcagaaatacccaccttgtaccaccagccaaattaaattgataaaaaatacaagtacagacttccagttccaaaatgacaatgtttgggttcactcccctcagtagaaaacaaaaaagaaatacacaatgctgagattatcaccaataacatcccagacctcaaatatgagagggagacagtcctggggccacagagaagtgaaaaaaccagaagcagataataagagaattggactttctatttatttattttgagagagaatctcactttctatctgcagtgcccctcccagcaatctgcccaggaccacactttcccaccaacttatggtttctacaacactggaaaaagtaagatcaaggtggacaaccagcttccctaccacctggggttttctggcaggagatctatccctgcctcaactgacaggaagcatcaggaacacccaaagggagaaatatccctgaggacagccagaaacaaaggaagcagagaaggactaccatccccagtcctggaaactctgctccataaattagacaaaggagatgccatatcagagtggcagttcagcagcaccatgctgtggagattagttccacaggtacccgaggcacaaacccctagctagtcttcgcactaccaggatattctccactttgggaccactgcaatttgggactcctggcactcctgactgtttactagaaccaaggcaaatctgggcttaagatgtcatttagtgccgaaaaggaggcagcaaactactggggaaaacaagaaaggtaaattatttaaaaagtctaagcaaaaatatctaattaaagccaaaacacgccagtcagagaagtctagaataaccaatccttcaatgcaaagacatagacatacatccaaaagaaacaacagcaaacagggaatcatgacatacccaaataaagcaagaaaacagtgattgaccctaacaaggtggcactgtgtgaactcttaaatgaaaaattcaaaacagctgttttaagaaaacagagtgatctccaagataacacagaaaagcaattcataaatttatcaaaatcagccggggtggtggtgcgcacctatcgtcctcaagagactgaggctgcagtgagctacaatcacgccactgcattccacatcaccctgggtgacagagcaacactccttctcttaaaaaaaaagggggggggaggggggagaacaattaaaagaaattaaggctgggtgcggtggctcacgcctgtaatcccagcactttgggaggccaaggcagccggatcacttgtggtcaggagttcgagaccagcctgaccaacatggtgaaaccccacttctactaaaaatacaaaaagtagctgggcatggtggcaggtgcctgtaatcctagctattcgggaggctgaggcatgagaacctgaacccaagaggtggagcttgcagtgagcagagatcgtgccactgcactccagcctgggcaacagagtgagactctgtctcaaaaaaaaaaaaaaaaaaaaagagagattaaaaaaaattatgagagaaatttaacaaagagattgaaataacaattttttaaaaccaaataaaaaccttagaattgagaaacatattttctgagccaaatatttcattagaggctgtattattagtctgttttcacacggctgataaagatataccccagactgggcaatttacaaaagaaaaagatttaatagacttacagttccacatggctagggaggcctcacaattatggcagaaggcaaggaggagcaagtcatgtttcacatggatagcagcaggcaaagagagggagcttctgcaggggaactctttttttttttttttttttttgagatgaagtcttgctcttgtcccccaggctggactgcagtggcgggatctcagctcactgcaatctctgcctcccaggttcaagcaattctcctgcctcagcctcccaagtagctgggattacaggcacctgccaccacgcctggctaatttttgtatttttagtagagaggaggtttcaccatgttggccaggctggtctcgaactcttgacctcaggtgatcctcctgccttggcctcccaaagtgctgggattacaggcgtgagccaccagcccggccgggaactcctctctttaaagccatcagatctcgtgagacttattcactatcacaagaacagacacactccagtgattcaatcacctcccactgggaccctcccaggacatgtgggaactgtgggagttacaattcaagatgagatttgggtggggacacatgcaaacatatcagagactttcaacaacagaatgaagagaggaaagaatcagtgagctcaaagataggctatttaagaatcctgtcagagaagaaaaaaacaacaatgaaaagaaatgaagataacctaaaagacatatacaaaattacctaaaaagaccaaatctaagaattattggtatttaagaggaagtggagaaacagcagaaagtggaaagcaataataacagaaaacttttcaaaacttgagaaggagataaaatccaggtaaaggaaggtcagacataccaaacagatgtgacccaaataagactaccccaaggcatatataataatcagactctcaaaaggtcaaaaacgaagagaggatcctaaaagaagcatgagaaaagtaaaaacatagagattcaatttggctcccaacagacttctcaatggaaatcatacaggtaagaagggagggcgacaacattttcaaagtgatgaaaataaaaataaaaaacaaaacaaaacaaaaacactgacatgcaagaatactgtctctagcaaagctatacttcaaataaaatggagagagaatttttttttcctaagaaacaaaacctgagagaatttatcaccaccagactcatcttacaggaatgtaagatataagttcttcaatcagaaagaaaaacaaataatgtacaaaaaagaaaatatttaaaaatataaaagctactggtaaaatcaaatacacagacaatacaatgccaygaaacaagcctcaacaaattcaaaaaagcgaaaatcatacggcaaactgtcttttctgaccacaacagaataaacctagaaatcagtagcaagggaaacctctgaaaacacacaaatacatggaaattaaacaacatgctcctgaacaacgaataggtcaataaagaaacttaattaaattttttttaatttcttgaaaaaaatgaaaaccaaacacaaaatctacgggatttggcaaaagcgatactaagaggaaagtttacagcaataaacatctatatttaaaaagtagacttcaaatatacaacgcaacaatgcactccaaggaactacaaaagaacaaactaaatccaaaattagtagtaagagggacataataaaagtgagaacggaaataaactgagacaaaaaaaacaaaaacaaaaacaaaaaaacaaaaaacagaagaaaattttaaaaaaatgaaaagctggattttgaaaagatagataaaatcaataaatatttagctagactgaggaaaaaaaggagaagacccaaataaattagaaatggaaaaaaaagatatagctgagacctcagaaatacaaagactcattagagactactatcaacaactatacaagctaacaaattgaaaaacccagaaaaatggataaattcatggacacacaacctaccaaaattgaaccaggaaagaaaagaaaacctcaacaaaccagtaacaaataatggaatcaaagccttaattaaaaatctcccagccaggcatggtggctcaaacctgtaatcccaacactttgaaaggacaaagaaggtggatcacttgagcccaggagttcaagaccagcctggccaacatggtgaaaccctgcctctacaaaacatacaaaatgtatggttgtgcatgcctgtagtcccagctacttggaggttgaggcaggagaattgcttgggccagagaggcgaagactgcagtgagccaagactgagccaccgcacaccagcctgggtgacagagccaaaaaaaaaaaaaaaaaaagaaacaaaaaccttgcatcttttcccatttcttttccaaagaaaagtccaggatctaatgactttactactgaattctatatgaatcatactcaaatgcataaaacaaaacaaaacaaaacaaaacaaacaaagaagaggagggaatacttccaaactcattccttgaggccagtattacccagacacaacaaaaaaaggaaactataggcctggtacagtggctcatgactgtaatcctagcactgtgggaagccgaggtagtggatcacttaaggtcaggagtctgagaccagcctggccaacatggtgaaaccctgtctctactaaaaatacagaaattagctgggtgtggtggcgggcgcctgtatcccagccactcaggacgctgaagcagtatattttaccacaattaaacatttttattaaaaaatttagcagaaggccaggcacggtgtttcacacctgtaatcccagcactttgggaggccgaggcaggtggatcacaaggtcaggagatcgagaccagcctgaccaacatggtggtcaagttgctaacacagggaagtttttcaaaccccaaagaaaaagcaaccaacatggtgaaaccctgtctctactaaaaatacaaaaattagctgggcgtggtggcaggtgcctgtaaacccagctaccccggaagccgaggcaggagaatcacttgaatccgggaggcagaggttgcagtgagctcagattgtgccactgtactccagcctgggcaacagaatgagacctcatctcaatagatagatagatagataaataaataaataaataaataaataaataaatgacagggaataatgatggacactgttgaatatgtgggaaaaggggaacctgtacgctgttggtggaaatgtaaattagtagcgttattgtgaaaaacaacatggaaacttctcagaaaactaaaaatataactatgatccagcagttccactactggatatacatccaaaagaaataaaatcaatatatcaaagagatagctgcatttctatgtttactgcagcactatacacaatagccaaaatatggactccacctaagtgctcatcaatggacgaatgatataggaaatgtggtatacgtacataatgaatattgtcctggccataaaaagaatgaaaacttgttatgtgccacaacatggatggaagtggaggttattacgttaaatgaaataagcgaaggacaggaagacaaatgatcacatgttgtcactgatatgtgggaggttaacaagtggatgcttggccaggagtggtggctcacgcctgtaatcccagcactttgggaggccaaggcgggtggatcacctgaggtcaggagttcaagaccagactgaccagcatgataaaaccctgtctctactaaaaatacaaaaattagctggacatggtggtaagcgcctgtaatcccagctactcagaaggctgaggcaggagaatcgtttgaacctgggaggcagaggttgcagtcaggtgaggttgcaccattgcacttcagcctgggtgacacagtgagactccgtctcaagaaaaaacaaaacaacaacaacaaaaagcagatgcttaaagatagacagtagattggtggttaccagagacctgttagggttgggggagggaggatgaaaagagtttgattaatggatataaatatacaattcaacagaataaataagacctatggtttatagatcagtagggtgactatacagcacaacaatctattgtgtatttccaaataggtggaagagaataatttgtttatggcataaagaaaagataaatattgggccgggcacagtggatcatgcctgtaatcccagcactttgggaggccaaggcaggcagatcacaaggtcaggagttccagaccagcctgtccaataaggtgaaaccccgtctctactaaaaaatacaaaaattagccaggcgtggtggcgtgcgcctgtagtcccaactactcgggaggctgaggcaggagaatcgctttaatccgggaggcagagttcgcactgggccaagattgcaccactgcattctagcctgggctacagagtgagactccatcttaaaaaaaaaaaaagaaaaaagaaaaagacaagacaaatatttaaggtgttggacatcccaattacaatgatttgatctttagaaattatataaatgtattaaattatcacatgtaccccccaatacatgtacatctattatgtattgataatttttctttttttttaagagacagggtttccctctgttacctaggctggtgtgcaatcgcataatcatagctcactacagccccttcaactcctggggcacaagtgatcctcctgcctcagttttccaggtagctgagactacagccacacaccaaaattagccatgcctggctgattttatttttttgtagaaacagggtcttgctatgttgcccaggctagtcttgaactcttggcctcaagtgatcctcctgctttggctcttaaagtggtaggattataggcttaagccactgcaccaagccaaaagaatttttaaatataaatacagataagtacgtatatttatagacaagacaagatgaggaaaagataccttggaagtgatcaagactaataaaaacaaatcagcagttcaacgctcatttatagtgctggtagtgggtatcactaattaactgcacactcttacttagccagggtagagcctcacaatgcttcccaacactaacatgccaagcagatgctaccaactgatgtaaaatttcctgactgatatatatgcaataaatattaagaaaaattcttaacactaggttttgttaaacactggaaggaactgttaatatgtgatggaacttaatgaccttgaaaaacgatatggatgtgcgatgagagaaacagttagaaactcatcctttggaggtgggttaggtatggtatttttgcttttatttttgtttttaagggagagtatctcactccgttaccctggcttgagtgcagtggcacaatcatagctcactgcagcctcgatctcctgggctcaagcaatcctcccacctcagcctcccgagtagctgggactacaggtgcatggcaccacatgtggctaaatttttatttttatttttagagacagggtctcgttatgttgcccaggctaatatcaaactcctagcctcaagtgatcctcctgtctcagcctcccaaagcactaggattacaagcataagccaccataaccagcctaggcatgagccaccacaactagcctaggtattgcgtttttcaagtccacatactggatgttttgggccttttggcttgaagactttacatatacaaagagatctcatatatcgtgttgttgattcatccttgttatacagaattcaacatttacaaaaatggctattccataaatggcaaatgggaaaagggctgtcaattgggaattagttccatatattgtactggactctcaggcaaagaacatctgaaaaagcactgggtatttttgttgttattgtgattttttactaaaataaatgcattgcatttattttaaaaataccttattactttacacaactgacagatacattggaatatattagtattcctatttaagtgcaaatgtgaaagattcctcatttataattaacaacttttattaaataactaggtctagacagctaagaatacttgagtgaagcaatctgaagaagatattagaagaatttgatctggaattagactggactgaaaggagattgtggacagccaggagaaaacaccatagtatctaaagactcaggaggaagcagaactattataaccattcagaaaggaaagacagatactatactttctcatatttaggatgctgaaagcacctggtatgccacataaatactttgctgtctgttgcccacttcttcgtcaacttggcaagattattttaaaggcttccacttgggtggctgaggtgggcggatcacaaggtcaggagttcaagaccagcctggccaacatggtaaaaccccgcctctactaaaaatacaaaaattagctgggcatggtggagtgtgcctgtaatcccaactactcgggaggctgaagcagaagaattgtttgaacccaggaggtggaggctgcagttgagacaagatcgtgccactgcactccagcctggggtgacagagcaagactccgtctcaaagaaaataaataaaggctctcactttcccaattgtcttaatctatacctatcccaatggctctaaataaaggytgaaaggggatgggaaatggctcagggatatccattaatgaatgagagaacttgccaaaggcattttatttgctaagtcagaggtacagattcctactatgctacaaatgcatgacaaaactaagaatcaaatatgaataacagccatgactgttaattttaagtgtcaacttgactaggaaatgttgcctagtggtctggtcaaacatcattccagatgttgctctggaagtatttttagatgtgattaccatttaaaccagcagactctgagtaaagcagattacccctaacacatggataggtttaatccaatcagttgaaggccttaagaaaaaagactaaggtctctcaaggaaaaatggattctgccttcatactgcctttcagactcaaagactgcagcagcaagtcttgcctgaactactagcctgctggtctaccatgtggaatttggacttgttagtccccacaattccaagagccaatcaataaaaatctcctctttctcaatttctatacacaaacatatatacaaccccacttgccacatcccatactggtactgtatgaggagaaccctaatacagcactctactgagaaacactactacagaaccctagtcttctgagaagtaaagaaaaagaaacaggcaaccataagatattcccccatcagctgattctatactacaaaatactatgcatacagctctatttcagaacttctggcatgttgctgtaatatttatgacctgaaagagaatcaagtattttatctgtctttgagttcacatttagagcaaagtgactggcacacagcaataaatgaatgcctrtatgttatagctcagcaatcacaggatcttctttttcctcgaatcttaaaaacatatgtttcytacaagggaggtcttatgcctaataatttacaaggcaggagttatactcaagacattgatctggtatttcagtaaatttcaccaaaacagaatagtacactttaatgatttatcttagagtgagcaatcatttgaacaaattattcagcggtagaaaagtgggggraaaaataaggtactggaagtaatcaaamcagtgtgatacttgcgtaaggacagatatatagaccaagggaccagaatagagagcacagaaataaactgttacacaaatggtcaactgatttcaagggtgggaagagcactcaatgtggaaaggacaacttttcaaaaagtggtgctggggaaactggatattcacatgcaaaacaatgaaactggacctttatattacaccttttttttttttttgagacgaagtcttgctctgtcgcccaggctgtagtgcacaggcacgatctcggctcactgcaacctctgcctcccgggctcaaacgattctcctgcctcagactcccgagtagctgggaatacaggcgcccgccaccatgtccagctaatttttttgtatttttagtagagatggggtttcaccatgttggctaggctggttttgaactcctgaactcaggtgatccgcccacttcagcctccccaagtgctgggattacaggcgtgagccaccgcgcccggcctcattttttaaaaatatggtgtaatactgcaccaggcgcggtggtatttaaccaaccgtgatgtcctagtggcttagctaatttctattcatcctgatgtaactcaggggtcacctactctaattctaacaatacctccgcatccctacgaccagaatgaattccttattcctccctggtctctgctacttactacattttgcttatatttgtttttctatgtgtgtttcccccattaaattctaggttctttgaaggtatttgtagttctgaacataacaaacctggccsttaaatatatgaattaatgactctcaatccagattatttaatgactaaggaccagtactgttttgtttttagtctgaagcctagaaagacttgaattttagagacaactgttttggcaagagactgacaagggcttcattttaaagtattttatttttgaattttagctttgagcgaatctaggtattcagaatacccrtatgcacaaccaaaaaaacaaacaaacaaacaaacaaaaaacagcaaaacaaaactagacagctgaaaaaaaagagactagaaaacatcttaatatggattacctgccgagggaacaaatgaatctgaaaataatgcacagatttggagtgtagcttgatgccagtgtacgcaaaatctaggtgaaattgtacaggcaataaaattcaggaaaaacttagtcttttatttaggaaagatattaactataagaaaaataaagtgccacacaaaagagaatgatatgtaaataggagacacttcacactggatggctcacaaaggcaggcagtgtaacagaaataatatcttatactctaaaattttgagttcaggttttttttgagacaagagtctcactttgtcacccaggctagattgcaatggcaggatctcagctcattgcagccttgacctcctgggctcaagcaatcctcccatccccgcctcccaagtagttgggactacaggtgtcccgcaaaagttttttttgtttttgttttgtttttggtactggtagagatggagttttgccatgctgctcaggctggtctcgagctcctgagctcaagtgatctgcctgcctgagcctcccaaagtgctgagattacaggtgtgtgccactatgcagcatagctcccccccttttttttttatgagatagggtctccctctgtcacccaggctcaagtgcagtggcragaccatggctcactgtagcctcaacctcctgggctcaagcgatcctcctgccttagcctccccagtagctgggactatacacgtgcaccaccatgccctgctaattttatttttttgtagacaggggttctcccatgttacccagtctcaaatgcctgagctcaagcaatcctcccacctcggcctcccaaagtgctaggattacagttgtgatccaccatacccaacacaggttcttttttgactatcacaagctgtgtgaacctagatgccaagtcacagctgagctaaacctcactttctctgcctaccacagaaaattactaccatatattctcttccttatatttatttcttcttttcaacgtttcattcccctatgccatctatctgtaattttagtagaaaacataaatattagatttaaaaggtcttgtaaaggagcggggacaggtaggtgaattgatactgacacacgtaagtcaaatgaaaactagtgttatgagaagcartatctatgagttagcagaataaacccgtcaaaaaaaggagattctggagagggtttaaagggaatatgtgacttgagttcctaactttctagttcccaattccagtctgagtaaagttcagctgtactttcttgaaatggatgtaccatgacattgcctgctatatcatcacaatactcacacccttttaaaacttaatctactttacatcgtttctatttttgcttccttctcatctgtaagttagacttctcaaacagttgtgtggattaataaattaatatatatcctgaaagcattacacaaaataagagaatacaatctattttcctcataaagctaacattggaaataaaataatgcacatgaaaatattttgggaatgatcaaattcccaaaattaaattctaattctagtaaaatattactattatactgaggaataaaactctaattctgagattttaaataatatgacatgcttcagtaagattatgcaattaagaaaaagaataaatcaatcctatgatcttattttgattggaaaaaagaaaccagaaaatctttctcaatggtaactagtgatggcttagagtctacaagcataatttcacatactttaaattcatagcagcagctatgaaaatttaaaaggagactggcagatttttcagcatatgatcacagcagatttgggaccaggaaagaactactgcagtgacttataaatgtttttaatctgaatattgcagaatagctcatacttgggccaaatttcagtcaaaataacatgttcctaaactccaaggatacattttcaacacatcaagtttcgcaaccaatttttacaaatgaagagctccttttttaaatagcaacagatatgtactggggtaatttatgggaccttaataagcatgtttcattactatttttgaaattatagctatataaaatcatataggtaggtaatggaatatttaaatagaatacagagcaaaattactgaatattaaaacatgatatggcaactttatattaaaaataatttttaaaaaacaaggaagtatattgactctgctttagctgctggttcctcttttcttgttgtccatcctactatcgaggcttcagcttagctctactattgcaagctgtcacttttgacttgaaatggaataaagccaaatattacaaaatagctgtttcctgttctggcctcgtctcctagaccacccccaggctttgcctgcccatggatgctcatcctaccaagccaataatctaccagtagtcagttcatagttatgtatttttaatacttttggcacagtatatatgccacaactgttctcattttactgattttatgtcaacaaggcacctctaaattttaatcaaatgttaaaatgaaggcaaagtgaaatggaaaagggagatgcatatgaaaagtcagggagtaactgggaatgtgttcgacgcctgtcaaaatataatccagaaacagatatagaaaaagagagtagccaggcrcagtggcttacacctgtaatccgaacacgttgggaggccgaggtgggaggattacttgaggttaggagttcgagaacatcctggccaacactggtgaaaccctgtctctactaaaaacacaaaaaattagccgggcgtggtggctcgcacctgtagtcccagctactgaggaggctgatgtgggagaatcacttgaaccagggagatggaggttgcagtgagctgagatcactccagcctgggtgacagagtgagacttcatctcaaaaaaaaaaaaaaaaagaaagaaaaggaaaaagaaaaagagaatagaaagtgctgagtaagtacyattaatctaaatgatcctggttttccaattctgcagaacatctgatttgcatctggcactctaactgaaaagttcttttaagataaacctagctttagttgaatgcctcttatcctaaagactaaaataattagggcttgattcgtttaatgttgaccagagaaggctgttttttcacctttaacaagytcacagagctagtgtactcactgctacaaaggtcatttagtctaactcttttatttaatgcttaggggacttctagaccttagtattatagctacaaagtgtcttcccagagccaaacaaagaaaaataattttgtaccttattgaatatcacttctactttctgagagaaaaataactatcagcaacaagtagagtacatgactttccctgtggaaaaaaggtaagggtgtgctgtaaaggataccaccacartacagttttgttgtcatcttttctaatatcattttcttaaaataatagtttaagaagtcacaatgaaatcttacctacttattcttcataaaaactgggagaagaaaaaaacactactacaaaaacgtgttctattatacactgtctatgggttatattgagagttgaaaaagtttgtttagcaccagctggagaaaaaaatgctaagagttctagggaagactagtaagaaagattgttagaagtaagcagcagatggtggcagagaaatagtcaatgagtgtgtgaatggtaggaagagaaaggagtttcaaatatccacgaaaaaggtttaagataccatttatgaaaagggaaatttacaatatgtctcttattgagcagtttctgtactataaactctttactgtatcatttcatttaatctttctaacaaccctgaggtagacagtatttacagttgaggaaaccatttattcagagcagctgagactttcccaatgtgaactagctaacaaatgctaaaggtaaaatttgaaactaagtttgcttgaactgatgtcaaaattcatgctcttaaccattatgctacaatgaatctctaaaaggttctagtgaagacccaatcaattagctgcttctgatatttacaataaccaacatgccattgttacacagataattttgttactctcctgagaactgtgcttagtgatcttttcctcttttgtctgaccccacaccatgtgtatccagyattaattctattcataaactctcttctttagctaagctgacattctactgtcccctaaaatacttcaacaccaattatgctgttcctcctggcaaatgtctggattaccattaccaccgccaccaccaaccaccccaccaaccccacctcatcctttcacttacttctttaaccatttcagtctttattgacttctcctatctttgtatttcggaagtttttacttcaggctccttaaatccagtctacttcaaggaagtcattttttatgtcagttcttatcatagattataaacttcttgacaataagataaagatcattacttacaagacttttatcaactttaaaaaatcattaaacaactagcagggagccgtgaaattggtaaaaagtaatgctagagcagtgacatgataccacgaaaatgacaaatctgaaaggaactgtaggacaaaaataattacggaagtatactaataaatactgtaccaggtcaaattctcattcacactatagaaatgttacatttttaaaacaatctaaagtgatctgtctgtactataagctgaagtgaaggtaaagtttgaaaaagcaagtcccttctccaccatacaaagcactgtaacaggaagttctgtttacttctttctgtaaactactagtaatatcatattaccctgagaaataaatctgcttataaacaaacctctatcaacaagatttcaaactttgtcagtggaccacttatgtcaaatatttaattcaacaaattacaacatttgtctagtaacgaccaaacaactggttaaattgttcaccttggctgactaatggctaaaatttcaccttatttgcattattccatcctggttgtgaagcaattccaaatgccataggacagtaacacaaatttaggagaaaaaaaaaatacatgtctctggtacactctactccctaaactactgcaaacttaccctaggcaactgtttgagctatttttagtaaaacagatgtgttgagcaacaattaccttagggatattcagaaaccacagccaataaatttatatgatcaatgatgaaagaaatatgggttaaaatggattcaaactggaaaaactatcattgaaagactacagaaatagataaacaatctggcacagtccagacacattcatttactagacaatgtgtgagtcttctctggttaagtctttaagcaatctttagtccaggtactaagaaaatactcaggtttgttctacccattcccttcaaccagcaattcacagcacaacagtactgtatttagtatttagtaaagtactgtagttcaatgtccatactctacaatgatagaactgtagtattaacagtcttatctccaaactttatcagctcattatgatacagaactttttttttgagacagagtttcactcttattgcccaggctggagtgcaatggtgtgatctcggctcactgcaacctccacctcctgggttcaagtgattctcttgcctcagcctccagagtagctgggatccagaacttctaatggaatcattccttcaggtctaggatttatgattctaccttattttagggaaaacacctcattactacaatgaattttaatatactgtaagataaacatgcggtataattttggacaaccacattccgtatcaaatctctaacggttttaactagtgacctttgttttatttctttattacatttaaaagcaaagaggaatgtgatgcctaaaaatactggactaacaagccagaccaagccaggttagttggtatgaatcatgtacaactttcaggtaagaaataatctcttccacattctctatgaagcaaccccaacctgaaaactgtaggtgtgtgcacggccagtagccaaaatccatgataaaatgatttcaaaatcatgctaaaagctaaatatttcatttcattatcaaaatttttatgtgaatgtgatcaaaactgttatcaaaatttaatggaaagtttttttgaacttctataatcatactccaaagtaaagcaacaataccacagagattatagtaacaacaaaaaaaaaactatttttttttgagatgtagtcacgctctgttgcccaggctagagtgcagtggcgcggtctcggctcactgaaacctctgcctcccaggttcaagcgattctcctgcttcagcctccaaagtagctgggattacaggcgcccgccaccacgcccggttaattttttttttgtatttttagtagagactgcatttcaccatgttggccagggtggtctcgaactcctgacctcatgatccgcccgcttcggcttctcaaagtgctgggattacaggcatgagccaccgtgcctggcgtaacaaaaaactattaaaagtacctttaagaagcaataatttattttctcctccttcttcccagctagctaaaaaacacagtagaatctgcagatttccccactgcttcctctcccttttcccttcccccctacttcaaagaatgttaagtgtagccaggcatgatcaggaaacctaaaaggaggaagtagaaacttatttgtgtgcacagggaaggagaaagacacttaacaatatcggggcctgttgcttcagtggcctaattaatatatatccattatactctctgaaaatgttggttcaatttctctttttagtcatgtttctttccaaaatactaaaaactataatatataatgattgcatcctggaatacccaactaaacgtcacccaaaaatctgaccagtgccgggcgcagtggctcacaactgtattctcagtacttttggaggccaaggcggggtggatcatctgaggtcaggagttcaagaccagcctggtcaacatggcgaaaacccatctctactgaaaatacaaatattagctgggagtggtggtgcacacctgtaatcccagttactcaggaggatgaggcagaagaatttcttgaaaccgggaggcggaggttgcagtgagctgagattgtgccacagcactccagcctgagcgacagaaaaaaaaagaagaagaagaaaaaaagctgaccaggttaactaacttaatacttgctatctgatattcaatacattcaaatcattcagagaaaagagtgggcttcaaaccaatgacttaaaagtgaaaggacttgtattaatcctgactcatctgtttcctaaccactaccttagtttatcattctgatttaatgaagaataaggctgtgcaacttgtaaaggaaactaaagaaaaacatactgctactgaataaaatgctgagaaatcaaggataaaggtggcagactgggaattcccactgaaaacatttaattagattcacagcaaagcatcatttctggaaattttaaaaacttacatgtacctaccactctagactaaaaaataatatacacaaaggccatttccaaagagaattttcccccacctacttaaaaagtttataaaggataattagcatccatattaagaaactgcctcatgaaattttaaaaagtgagaaagaaataagctcaattaaaaagcttattcaagtgtacccaaactccccttgacttacagagggttaccctaaggttgagataggtcaaggcactatttacaaaatttatgccagtaacagctgccattttaagaagctaaggaatttaatgtactgcttggacaactggttagaaaacaatcaatctggtatasagccattgtaattacacgaactctaaatttttttttcttctttctagaacatttctgtatttcataagatttatttaaataaataaatttaaccatcttaggtatctgtagtaaattttcattcaaaataagataaatgtctatcatttacacatgggagaaaatatttttatatttataacctgatcttatttaaaaaccctaactataaaaaatgcacatagaaaagctctgctataaaccagcacttagtctaaaattcgtaagaaattctaaaactaaggtatgctagatcccaaatcaagtgctctcatgttaattcctactgatttctttgaactcggaattcacatttttcagaaacacaatggttaaaatgtcaagtcaatcacttcacttctggaagatatggcatccttctaggccagagggtgacttagtatatacactagcagagcagattaaatagcttactaacagagacaaacatacaattcactaaactgcgttaagactttagctcttatgcctctcaaactgttttaaaaaaagttagggtacccccccactctcccccagcatattctttcaatcattgtaattttcaaaaacatgtcgagttttaggccacctggcaagagtttatttttaaaagtaatttctacataacgatttcacttctctaaaccaaatccaagctgaaacttggttccaaaagtgctaataatacaaccacagaattaaaacattaagatttggaaggttcctttgatttcacctagattcacctactctaactccctctaactgactgggggaaatgaaatgataaggtctgtagtaaactaaatggtattcacaattaacaaaataaaaccccagggaaaagctccaacacctccactattaaattgggatttgctatgaaataaatattataaacaaagaacaaaagctaacaatacaaaaaaactaggtcctttaaagaaacaagaaaaatcaagtggaaagacaagagcacatctatatagacttcaaaacatgaaataatgtttacactaaatgaactaacatctcattttggtggacctaagagaactattctaattccctaagtattacaaatccatgcacaacaaataactgctcattaacacaagctcttgttctctccatggaaataatagctctacattttatttttgaaaaacagtaacaagtctgaaataaaatagtattaactttttactccattagaaaaaatttaaactggttcactcatcctttctttccatgcaattactgtattattttaaaacatctgagtaaaaagaaatctataatatatccatttaattcaacctaaactctaaatatacaaatgaaggccaggtgtggtggctcacgcctgtaatcccagcactttgggaggccgaggcgggcagaccacttgaggtcaggagttcgagaccagtctggccaacattgtgaaaccccatctctattaaaaatacaaaaattagctgggcgtggtggtgtgtgcctgtcatcccagctgctctggaggctgaggcaggagcattgcttgaacccaggaggcggaagttgcagtgaaccaagaacgtgccactgcattccagcctgggtgaaagagtgagactccatcacggaaaaaaaaaaaaaaaaaaatacacatacacacacacacacacacacacwcacacacacacacacacacacacacaattctgtgagctttacttatacctgaaaaaattaactggtaatttcaacaatcttaaaaaatatttagcttaatacttttgatgagtttcttcacataattaaaagctaatagtcaactggaaaatgttttcctaattaaatgtatttgtatttaaattgcaataatggagaactgaaatttatatataaaatcattcaattactgacaatctaaaaaaatttcccctttaaaaaaagaactattatgctaaactgataggtatacataaacactaatctcatttaattatattaatttacccaattcttaacgtttagcattgaagacaatttatactaatatttaaccaattattttctaataatgattatttagaatgtcagatactttattttgtttacttctgtattccttgcaacagaacactgcctggctcatagtaggttctcagtatatattgttaattgaattaataaatcgtttatcctataagcaaaatcaactgactgcattcattgggtttttcacacaactagaagttagatgaaatgatatttaaagaatattgtttaaagaatgtctgaatatcaataaagtttaattaacctttaattttaaaaagtaatctaaaatttcttacctggtagggctgaaaggcactatcttcagttaaaaaatccagttgcttatctacaaggaattctactgcagtgactgaactgggtatatttctttcaaccagaggtttgaaagtctgccaagaaaaaaaaaatttctaatgataattttctgggtagtatcctgaaattatgaaggaacacacaccaatacaatgtatcaatgtcattatcactacagagtcttagggtacctaatattaattttcatattataaactaatgcttttatctacaccataaggtatctgtgtttatttaaaagaaacaaactagatctacatgtgatatgggcatatttgagtatactaagtcccaactgtttacttttaaaaagggatgtaataaaatatgcatgtgtgtaaaaatgtctgcttaaaaagagaaattgcttttgaaacagtaaactgggttgtagagctatttacccccaccttttttttttaactgtattatttcttattaaagagagtagttattatttcaatgtacactttttgtctagctcattcacattaagcaggattttaaatgatcaggaagtatctggtcttttaactccaccccttgcactcccacccccgcccctgcaccaagcacagataaaaatcccgcagcttcggtgagagaagcatggaggaagggagtagagagagtccggtaagaagtactacacaaaactctactttgcagtcaagtccaaatctccactacttcttttaaaaaaagtcaatccaaggtcatttgattcctttaagaagatacctttaacatatgagatttaactcgtatcttgggtggggatgacagggacagagccagggtaggaagaggaaggaaacagggatacaatgtataaatttctttatgactatcacactcactttcaaagtagatgaagattaaataaaatacaagtgtcttatattcatggtactgttctaaaaacttgaaaatgaaaacaaaattccaccattttaaaaacacagctgctttactataaaaaaattttttaactggaaaaaagttcggaaaacagaattaataatcaactcaatttctaagttacctatatcacatggagaaatctttctagctacagggtaatttgtgttaatatttccacacaaaacaaagattttggcatagacagtacaaattaccaggcatttcaaaatcattgtgtttcccctttctcttattctgtcttaaaaaatatataacattttgttaataacaataaacatactccagggaaaaacttcaagatgtttggtttggagtggcttttaaggagttaatttctatatttaagaaattcctaagaggaatttcaggttgactcactgcaatctgtaacaatgtttcaaagttaaaaatttaatattaaatttaagcaagtcttatttctatgctatctacatcatgaagttacaaataatattttcttaattaaaaaacaggaaaaactctcttatattctcacttattttcgatatttaagatcagaaaatctagtcacagtaatatcctctctcccatatcctaggctaaccttttaagcactctattatttatcaaaattactattatttgggtgagaaatcacattttcaaaatagaaaatcctcacattatttagctatttccttctactgttatcatttaacacttttcaattacataaaatcctataggatttcataaaatcctatttattattttacttaagtgacaaaaagtttgtaagaaattcaagagcatttattgtatttaggctttaaaagtgtccaccactacgtgaccaattgacatgaaatatgtaacataaacagggatattcggctgatccctactgtaaaaaatgttttttcatattatatctctgtcagtttagtttttaagtaaactagaaaacactggcatcttctcaagaggacttttaatccttgaacattatcaaatgatctatttcttttcaaacagtaccatatcaggtcaactcatgaaggttaacaaaaaggtccacaaaaggtattatctaagtggctaaagatacaattcaattaagtaggatttgaaaaagaagtaaagttctccttctggagtgcctctttcttacgcaaataatacaggtggcttgcatttcctatgagacctagtcattttataatatgaaaaacattcttctgaagagagctctccttttcaaggtaggccagagttctaagggtaaatttcaacaagccgaccaatgatttaaattattctaagttaatttgaaaaaaggatttctaagctaaaaaaattctcacgttttaagatgtctcattgaaagccaagtaaaatttggctaccagaaatctaagaaaactagctgacaatgatcaaatttgaatactcttacaaggacatgagtacttataatcatttacaagtggaagtccaaagtatatcatgcttcttaaatagcaaataaaaagtgctgataaatacttttatagtatttgttaaaagaaatgtttcaatatttattaaatgagaaacagtgaatatgtgtgactgctctactttaaggaaaaatgaaaggcaaacaacatatgaagtgatattaaaatacaccccggtttttttaactggcaaaacaaccatgttaagtattgctaatttttgtattagtctagtacatttcaaaggaacattataagtttaaaaataataaaaaacatatttaaataaaaacaaatgggtcctacagctggtatgatgaaatttgtagtaaatagttcatgggtctaggtgcactggaatgtaaagaaactagaactcatgcataactaattcaacactctaaagatatatcattctatgagtaacttccacagcctaaagggaagcaatgagctaacatctgatgaaagtcacagtagaatatggccctaatcacaaaagactatcattcaaatgctctaaaaagcctttgaaaaccaaaatgaaaattactaacactaaatgttcagttgaaacaaaatgctttttcaattttattagagtgagagttttttttaaggtcatttatcagtgttaaacatactttttaaaaatagtctacggccaaaataaatatagttgagagcctgcatttctagtagggcctaccrawctataggaagaatgcttagaacaactgtatcctgtttggggctccatgctgcaccacattccattcacatgaggaagacgcgaacagatgagccctccccgaaaaacatttttaaaataaatcagctacagctcttaaacacaactcagctgctcaaacaaacgatgttaaagctcaccatttcacatttaacaggaaattcaaggagcttatgtctgcagtcttagtttctaacaatctccggttaacagttaacaattccaagttaaaaaaaaaaaacaggcttattaactgcaaaaatactaatataaatctcaccaaaggtaaatactaaagcagaaaacaacctaagcaacattttagaagttaagatttagtctaccaaaaaaaaaaaaaaaaggactggagtgacttgaaagaacaaagtccaaattcccacccaagcaggtctattgaaaaacacgatactgttagaaaacaagttgggggtggggaagggaataaccaaaaaaaaaccttacaaaacaaatacccccactttccttgaaacactagtctgaaaatcctaatttgaagcacttctgccataatactttaaacaattaaactcgttttttaacatttacagttattaaattactacaaayacaataaacctttttaaacaaatgaaagttaaaaattcttaaaactaaaaacattgaggccagatcttttataaaaggcagtgaccttaatttctcaggctgagaagaaaaaccaaatgtaaattaagacaaaagaaaaaggaagcagaaaaatacaaaccgtactttgttcttgagaattttaaagtatctttaaatctcagaaatccacaacaaggctttaaaggtcagtaagtatttgctgaaatttctattttgttctggaagagtatctagtgtaaatacttctttagtcttcaaaaatcacaggcaaatggctctcaaaccaagcatttctgagctcacttgcagcggcgtcattgtatagraagaaaagccaagaccacagaacgaagcaggagctgtaacctaacaagtctccaacgagcaaatgacgattttctgtctgctctggctcagccctggcagtgatgaggattacaactcgctctttgtcatcagcactgtggtgttaacgactaagaaatcctgcagctgaagcactactgcatcctccgatctgggtcaggataatttctctcgaggtcgcttacataaccagtaagatactccaaataaagagaacagccatccatcagctggagaaagcctttcccactgtactctgtctgcgtggaaacacagtgcagtagcttccaacagtgcagacacccaaatgagaacgagtacttggcttagggcacactgagagaagggaagaggcggtgctctgtaaactgtaactaatcccccgtcacaggtgctgatggagtcacttccagcacgagtcacattactagtgattactcatttggctgcggccatagagactggctcataattttaacaacagacaaagacagactagtggcgagactgaaagctcaagtttactgtctccttcataaagcaaatgcaaatactaagtttttgctttccagatttaccaaggtgagaaagtgcagaaaagaaataacatgtgactatctctcaagttggtaaaaataaagcatcaaatatactttgtatgtttttgggcacgatttatttattagtataaccattttgccttaaaaatattaaaaacttcaaaataaatcaatttaaaatatttttagacaatgatctcaacaatctcataggcattttactaaaaaaaaactggtaatatttattttggtagatttgaaaatattcctcaaccattttcactcattacaaaaaacaacttaacctagatagttctaagatacaatttgaaagcataaaatgcatttctcagatgtgttatataatatagtctcttaacatctatctaaattctagagttctgctgtctgatgttgtccaatatggtagttactaatcatatgtagcaactgagcacctgaaatgtagttaatctgaattgagatgtgtgatgtacaaaatacacattgaatataaaaaaaattaagaggtatctcatgaataattttattttgatatgctaatattttgacatattgggttaaataaaatactgtaaaattaatacacctatgttaaaattttgatgtaaagacaatttaaaatcacacatgtagctcacattttatttctactggacaagaatgctctaatagtaagttctctctctattttttggaggacgtagtcttgctctgttacccaggctggagcgcagtggcatgatctcaactcactgcaacctctgcctcctgggttcaagcgattctcctccctcagcctcccaagtagctggcattacagggacgcaccaccaagcccagctaatttttgtatttttagtagagacagggtctcaccacattggccaggcttgtctcaaaaactcctgacctcaggctatccacccgcctcggcctcccaaagtactgggattacaggtgtgagccactgtgtccagcctcttctttttttttttgagacaggattttgctctgttgcccaggctagagtgcagtggcgcgatcttggctcactgcaatctctggctcctgggctcgagcgatcctccgacctcagcctgccatgtagatgggactacaggtgggcatcaccatgcctagctaactctttgtattttttgtagagacagggtttcaccatgttgtccagaatggtctggaactcctgaacttaagcgatccacccacttcagtttcctaaagtgctgggatttcaggcatgagtcaccctgacaggccttatagtaatttctcgtttcatagtggagacttacgtgatgatatgagactgactttggctactcaataaatcaaagagcagagatggaatggaatataaatttgtggctctatgtaaaacatcaggttatgtctattaatttgtcagtataattaaattttaacctttagagcatccagcgaaaatttgtaagtttctgacttagagcaggaaagctggccatatacttaagtcaaccacgcttctgtattacaatttaattgaaatggtttcagttttattgtagaaattacatgatgaaagaggaattatatatggtaacatgcactgaaactttaaaaatacacttgtaggtgcaagaaatatttaatttattttaaaaagatgtatgtaaatagtcttttttttcttttctttttttttctgagacagaatctcactgttgcccaggctggagtacagtggcatgatctcagctcgctgcaacctctgcccccgtggggattcaagcaattctcctgcctcagcctccagagtagctgggactatagacacgcgccaccgtgcccggctaatttttgtattttcagtagagacaggggtgtcatcatgttgaccaggctggtttcggatccctggcctcaaatgatccaccgatctcagcctctcaaagtgctgggattacaggcgtgagccaccatgcccggatgtaaatagtcttttattataaatgtatccctatggagaaatctcaatttcagtaaatctaaaaattcatgctaattaaaaaaaatttttttgagatagagtttcgctcatgttgctcaggctggagtgcaatggtgtgatcttgcctcactgcaaccactgcctcctgggttcaagcgattctcctgcctcagcctcctgtatagctgggattacatgcatgcaccacaacacttggctaattttgtattcatactgatgttttttaaataccacatacataatccctttaaatctactccagaagtatcaatttcatttcacagaaattatcaggttagctactgaaaagaggccgggatcagtggtgggtggatcacttgaggtcaagagtttgagaccagcctggccatcatggcaaaccccgtttgtactaaaaatacaaaaattagccagggcatggtggcgtacctgtagtctcagctactctggaggctgaggcaggagaattgtttgaacctgggagatggaggctgcagtgagccgagatcataccactgcactctggcctgggtgacagagcaagactctgtctcaaaaaaaaaaaaaaagaaccaagaaaaactaccgaaaagatattttcaatttagtatatgatgaacttgcacttataaaaagaatgaaaaagagatgggcaatgattagcctaagactgtgagtaaagtatggctttattttacagaacatattgtgtagaacatgcatgatccagaaggtaactttatttttttgagatggagttttgctcttttttgcccaggctggagtgcaatggcacaatctcggctcactgcaacctctgcctcctgggttcaagcaattctcctgcctcagcctcccaagtagctgggattacaggtgcacgccaccacgcccagctaattttgtgtttttagtagagacagggtttcaccatgctgaccaggctggtctcaaactcctgacctcaggtgatccacccgcctcggcctcccaaagttgctgggattacaggcatgagccactgctcccagccaaggtaactttagaacgaagtgtttttaataatgttgtcaagtggatattaaatcgcatataaccaccctaataattcattcataattaatcagacataaaataaaaagaatctatgtaaataaaagaactcacaatgtcatgttaccaaaccaaaaaaagcaaatgcttaatacagcttaatataacaaactatcaaattttaagtactttagtacatttccccaatttattgtacattagaaaatttcacaggatttatctcataatcttgcataaactcaagtttgtctacactatatgatatagacttaaaaacagctatttttgcttctcaagtacttcagtcccttacagaatcatatagcacaaagtacacttagctaaaccatacaattgcctcaaaagtcatacattcttagtaacacaaatgtactaatttttagtaaaattaatgtaattaacaatactgaaaaaccaaacattcatttttaaaaagtatttcacactacatcatggttgaattaaaataagactggcttctccactactaaaaatactatagaatcaattcttgatgcaaaggatgcagagttacaactagttggtaataatgaatgccttttaaatatttaaaatgggcttgacatacatatatttagagattgggtctcactctgttgtccaggccagagtgcagtggagctatcagctcactgcagcctcaaactcctgggctcaagccatcctcctgcctcagtctcctgagcagctgggactacaagtaagtgccaccacatctggctaatataaatatattaatgtgactggtctggtattaattggtctggtactctggtaaatttttaacacaaacaaaaataatgaagtaatgacatagagaacccacttggtatcaagcataaattgctagcttttacttcaagtctccttaatgcactcctgttcttataactcattagagaatggtagatcccacctttcacacaatttagtcctttaaattgattgttcttatggcttataccttctttactagactgaggtaaaaaggtgaaaagttaatttttgtttctttttgttgggaggtgaggaggggagtaaaaggccttttttggctgctaaaccaggctaggggaagaggaaactactccagttactgcccagaaatacacatctctaacttccttcctttttagttggtttctaggttacaagctgaatgtatcaacacaggtcagaaggtaaacagaggctaaaaggaaggcaacactgcctgcctacccaaagaaaatctgctccttccagtaatgtgagaatcttatatgtacaattttaggagttaaaataaacaaagattttggttccatttatcttgggccatgaaaagaatacatctctcatctttatacacgtggaagcctaaacaaaccactggattttaaaaaattatacagactcaaaaacaaaaaagcaaaaaactctgacaagttcaatgatctagcaatataaatatttttaaagacatatgggtggaaaaaaagatgaacaacaatcgtaggaggaattcaacttgactggccttacaagaaagctgactataattcattaaagtatttttcaataagccatactgtaaaatctatgaaaatacataaaaatgtaactcctacatcattgtaatgtccaaaggattaagtttttaacagtaggtcatacgcagtggttcacgcctgtaatcccagcactctgggaggcggaggcaggtggatcacttgagcccacgagtttagatcagcctgggcaacatggtgaaaccctgtctctacaaagaataaataaaaatagccaggtgtggtggcacgcacctgtggtcccagctactcaggaggctgaggtgggaggatcgcttcagcccaggagccagaggttgcagggagctgagattgtgccactgcactccagtctgggtgacagagcgagactcagtctcaaaaaaaaaaacaaaaaagtttttaacattaataactccatgcagatcttctaagcaatgcaaaacttgtgtatcacagtttcaaaccttcaatagtctatgatttctacaaggatttctagtagatatggaccttaagacttttttaactctcctatctccagcaaacattgtagcacattcattcaatcaataggtataaaatggcttctatgtgcaaggcaccatgctttgggccagggtatgcaatagtgaggaaaagacaaccaaatttttaccctagcagagtattcagtcttttataagagaacggaatacagtaatcatacaaatcaagcagcaatcatacaagcagacatagtggcatgcccctggaatcccagctacttagaaagtgagctgagaggatggcttgagcccagggagtagragaccagcctgggcaacattgcaagatgcygtctctaaaaatataggtatttttaaaaaagaaatacaaaatttagtcctattactttaatgttagaaatactctcatttttacagataaaaaaatggacactcgagtctaagtgactttgtttgtcaaaaatcttgtttatagaagtgctaggaccagaacttggatttcctaattcacagctgaatgatttttacatcataagatggtgtgaaagcattgtatttattttcatgctggttggcatgggtggcagagagcaaagtgttttgccatctgctgaattaaactttaaactttgaacgctgaatggagaaaaatgaagcctgtctagaagaaactgcaaagtcacaaagtacaaaggaaaagaagtatgacataagtttatgtatttttaatttgctttactgacatacgtcacctttcacaaaggagaaataagcaggattaggaggaaaaatcaattcaacataaagggtttttaaagctatgttcagaaaaagaccattgggaaagatgataaaacaccaatatttggaagaaagaaaagcttatttaattacttttatttctgtcaagaaaaagtgattttactatggaaaatatgaactagagattaaaaaaaactaaagattaaatgatatgtagaggatcctttttgtttccaaaaatagttttcttaacaagtaacataattatatttgagaaaatttgtaaaataaatgcatgaaaaagatcccatattcttatccttagtgaacccagccagttaactatttaagtgcactttcagccctttttttcctcacaaccatattagttatcaacattcaggatacacgcaaattttaagttgctcattttatttaataatcttctcatgttcttacattgccatcattttaacgacttaaaaaacaggcatgagtttattaaagcattagttttattattcattctcttaatgttgaatgctaaagctgcttgcaattttgtattataaacaatactatgaacgtcttcatgcttttagtaattaaaaatcatagattaaattatatgttagaatactaaattggtaggtacaagctcagagccattaactggtagtctttgaaaaaaatcatggcattgccaagacattagagataggcagttgaggccgggcacggtggctcatacctgtaatcccagcactttgggaggccgaggcgggcagatcacaaggtcaggagatcgagaccatcctggctaaaacggtgaaaccccgtctctactaaaaatacaaaaagttagctgggcggggtggcgggtgcctgtagtcccagctactccggaggctgaagcaggagaatggcgtgaacctgggaggcggaacttccagtgagccgagaccccgccactgcactccagcctgggagacagagtgagattccgtctcaaaaaaaaaaaaaaaaaagaccagcctggccaacatggtgaaaccccaactctactaaaaatacaaaaatcagctggacatggtggcaggtgcctgtgatcccagctactcaggaggctgaggcaggcatggggattacaggtgcccaccaccactacgccccagctaatctttgtatttttagtagggacagggattcgccatattggccagggtggtctcctgacctcaggtgatccaccctcctcaacctcccagtgctgggattacagacttgagccatggcaccctaccaggaaaccaattttaattacgtatgtaattaacagtagtcccacaaaatatgagactcactgaagagtgagatattgaagcttatacagcatctgaagctatggaaggaatagaagcttggggcttttttttttttttttttgagagagagtctcgctctgtcgcccaggctggagtgcagtggcaagatctcggctcatgaactctgcctcccgggttcatgccattctcctgcctcagcctcccgagtagctgggactacgggcacccaccaccacgcccagctaagtttttgtatttttagtagagacagggtttcaccgtgttagccaggatggtctcgatctcctgacctcgtgatccgcccgcctcggcctctcaaagtgctgggattacaggcatgagccaccgtgcctggccaaaatagtaatctctatttttttattttttttaatcaatgttgaccaggttggcctcgaatgtgtagcctcgcctccccgagtgccagggcaaccggcctgagccaccgagactcccagaagcttggggcttttaagggttggtgtctacacaagttatacaaaatggagtgagaggaggaaatacatgatgaataaagatagtcttgttatgcagactaaagtctctcaggtaataacagttgtctgcagcagccctttccctgatacaggtaacttttactaaagtagatctcctttatagatgggtaaatttcttttacaaaagggcagcttttcaaaattactcctgtgtctgcagattctcagaakaactagctcaaaacatggcaaaaaaagatattttggggatggtatattctggtctcttaccagaatattttgggtggggtatcttgagccaacaatggataatcagtataatgaaaatttttaaaaaacaaattgaccaagtaagagcaaaatatattcattgagagtaatttgcatttyttttttttttttttttttttttgagacagagtcttgctctgtctcccaggctggagtgcaatcttgtgatcttggctcactgaaacctctgcctcttggttcaaaagattctcctgcctcagcctcccgagtagctgggattacaggtgtgcgccaccacgcctgtctaacttttctatttttagtagagatggggtttcgccatgttggccaggctggtctccaactacctcaggttatctgcccacctcgacctcccaaagtgctgggattacaggcattagccactgtacccagcctgcattttaataaaaacaaaagttattaggttaataagatttgaaactaagctttaaggaacttgacttaaacaaaacttttatcaagacaacctacaataggtaagtcaatgaaatacaggctggatgataattacatatctgcagtgggttaaagagtactgattaataggccaggcacagtggctcacagctgtaatcccagcactttgggaagttgaggtaggcagatcacttcaggttgggagtttgagaccagccttaccaacatggtaaaaccctgtctctactaaaaatacaacaattaaaagagaataataataataataataataataataataaaattagccgggtgtggtagcgcatgcctgtagtcccagctacttgggaggctgaggcaggaatcgcttgaacccaggaggcaaaggctgcagtgagctgagattacgccactgcactctggcctgggcgacagacgagactccatctccaaaaaaatcaaaagcaagcaaacaaacaaacaaacaaaaaaaagagtactgattagtagtactgttgccgagcgtgtgatcccagcacctttaggaggccgaagtcgggagttcaagaccagcctgaccaacatggagaaatcctgtctctactaaaaatacaaaattagtcaggcatggtgacacatgcctgtaatcccagctacttgggaagctgaggcaggagaatcgctggaacccaggaggcagaggttgcggtgagctgatattgtgccattgcactccagcctggacaacaagagcaaaactcccatctcaaaaaaaaaaaaaaaaaatagtactgttattaacctgtgatatgttattcattcatttctggtcttatatactcattatcgcttgaaagctatctctattttcaaattaacaaatgacagaatggctggctacgcacggtagctcacgcctgtaatcccaacactttgggaggccgaggcagctggatcacctgaggtcaagagttttagactagcctggccaacatggtgaaacctcatctctactaaaaatacaaaaaattctccggtgtgttggcgggcgcctgtaatcccagctactcaggaggctgaggcaggagaatcgcttgaacccacgaggcagaggttgcagtgagctaagacggtgccattgcactccagcctgggcaaaagagcaaaaacgtggtctcgaaacaaacaaaacaaattacatagtgatttaaaaatatgtcttatgataaaaacaatcatgacctagattttaaaatgatcaagaaaatctggaattgtatccattgaaacagaaaaaaaattttaaaaagctaaaataaggattaaccttaaattttaataatgaaaaaatttacctacatttaggtttaaaaactcaaactactcaagtagaatgtacagaagcactagcttccttgaaatgcatgtgaaagaggccaagggccaggggctcacaccataatctcagcactttggtagggaggcaaaggtgggaggattgctttgagacagtgagaccatctctacaacaaaaaaaaatttttaaattagctgggcatggtggcatgtggctgtagtcccagctacaaaggaggagcacttgagcccacgaagttaagactgtagtgagccatgtttgtgccactgtactacagtctagatgacaaagcaagaccctgcctctaaattaattaattaatttatgtgaaagaatcctgaagggtttgaagacactaaaccaatacatattacatatacatttttaaatgggagtggggggaatcaaaacttgaataggctggacacggtggctcacgcctgttttcccagcactttgggaggccgaagtgggtgatcacctcaggtcaggagctcaagaccagcctggccaacatggtgaaaccctgtctctactaaaaatacaaaaactacctggagtgtggtggcacacacctgtagtcccagctactcaggaggctgagacaggagaatcacttgaacccgggaggcagaggttgcagtgagccgaggtcatgccactgcactcaagtctgggtgacagggcgagacttcatatcaatttaaaaaaaaattacagaataataagatcatttgaaggaatgctaaatgttttgcctggggaagagaagaggggcaaataataaatatgtacgattatttaaaaagttagtgtaggccacacgcggttgctcacgcctgtaatcccagcactctgggagactgcggtggacggatcacaaggtcaagagattgagaccatcctggccaacatggtgaaacccggtatctactaaaaatacaaaaaaattagctgggtgtggtggaacgcacctgtagtcccagttactcgggaggctgaggcaggagaatagcttgaacccaggaagcggaggttgcagtggggcgagatggcatcactgcactccagcctgggcgacaagagtgaaactccatttcaaaaaaaaaagattctgaatgaaaatttgtcaagtcgtcactataaggaatatatttctgcctctgcctggggatggtttataaaatattaaagattcttttcaattctaagattttaatattatcttgttcaatctacttagtgtttaagagcaaagtacagataaatgtgataaaccaaactcttcataaacactgctaccacttgtgtatatataaagaagcataaaataagtactcctgaatgtttcatgtattattcacatgaactggcagaattaaaggtaaaaagtaacatctcccattttaaacttcataaagtaaaccaagtaggctgtcccgcttgacagaaataaaacgacacaagatgcttgtgtggcatgggatccatgggatcctttacctctttttctttttttttttttgagacggagtcttgctgtgtcgcccaggatggagtgcagtggtgcgatgggatttcaccgtgttagccagcatggtcttgatctcctgacctcgtgattcaccgcctccaccttccaaagtgctgggattacaggcgtgagccaccacacccggcctttttttttttttttttgagatggagtctcgctcgctctgtcgcccacgctgaagtgcagtggcacgatctcggctcactgcaacctctgcttcccaggttcaagcaattctcccgcctcagcctccctagtagctgagattacaggcacacgccaccatgcccggctaatttttctggktttttttttgtttgttttttgtttttttagtagagatggggtttcaccatgtcggccagactggttttgaactcctgaccttgtgatctgcccgtctcggcctcccaaagtgctatgattacaggcgtgagccactgcgcttggccttttttttttttttttttttttttttttttgagacggagtctcactctgtggcccaggctggagtgtagtggtatgatctcggctcactgcgacctctgcctcccgggttcaagcggttatcctgcctcagcctccagagtagcatggacaataggtgcatgccaccacacttggctaactttttgtatttttagtagacatggagtttcaccatgttagccaggatggtctcgatctcctgacctcgtgatctaccacctcggccttccaaagtgctgggattacaggcatgagccaccatgcccagccaatcctttacctcttgaggataaaaattaaatataattctgtgggaataagaaatattataccattaaatcaactcaaccataaaagcaatgcttgtgttaaaatgttaatactcataaaaatcacaggagaaactgaggttaacctaaaataaaatgtcctcaatcttgagtcctgtcaagcacaccatcctcaaggagtaggacatatacgtttgcatatgactgatttcctgaccttttttggtcaaaagctagtaatatgcctcttccagtttttcctaatcgtttcattgtttgtcctcttagaaacttgaataagacacyttttttgcactggttttgttcatttccatctggcaaacatctgtttcttgtgcagtataagtcaacaaggctctacaattatttccccattacctccttgtttgttaaaactgatgatgtcagcaacaatctggaagccaaatttttcaatggacaaatgagatacacaatttccattaagtatatgatacgatgcagtatctatttttgcatatttagaagattaacatttaggtgacaatgatcacctatgttaagtagtatttagattcaaaacatggtaaagtaataacaaagtaatccaagtttctaccatatttctttaagtattggtaacttatgccgatattttgacagcagtgaaatatcaaagtactgatatgcaacacagaaagactatactgaaagagagacctttttcacacaattaaagattggcactgaagtgttttctttcaattacaaattacgattcatttaaaagttcttccctttctagcatgttaaggggtaacaaagttatatttttaaaatgtacagggaaaacaaatatactaatctcctctcaggtcaataaaatttcgataacatttcttctttaaaagaccttccccactaaaactctaggttttctttttttgagacagagtcttgctctatcgcccaggctggagtgcagtggcgcgatctcggctcactgcaaccgccgcctcccgggttcaagtgattctcctgcctcagcctcccaagtagctgggactacaggcgcgtgccaccacgcctgactaattctttgtatttttagtagagacagggttttaccgtgttagccaagatggcctcggtctcctgaccttgtgatctgcctgcctgggcctcccaaagttgctgggattacagatgtgagccacagcgcccagccctctaggttttcttaattcaggtcagtttcactgaagtcctgtccctctaaaggaataagacaagagtcccagatctaactgggaaagaaaaaagttaaggcccactaatgatgtccaaaagccttacaagttcatccctgtggagacaggaaaatttcatagactcttcataaataataaagatttcttccagagttgcagtttcctacaaagtttcagatagcctataagcagtctgagcaaataaacttctttgtagcagtgttttatagctttggtaacaattgccttttctttggggatctgaaagcttccctgtattagcaacctgaccacctgctttctgagcctttttttttttttttttgagaccaagtcttgccctgttacccaggctggagtgcaatggcatgatcttggctcactgtgacctccgcttcccaggtttgaacgattctcctgcctcagcctcccaagtagctgggattacaggcgcccgccaccacacccagctaattttttttattttcagtagagatggggtttcaccatgttggtcaggctggtcttgactcctgacctcaagtgatgcacccacctcggcctcccgaagggctgggattacaggcgtgagccactgcacctggcctttctgagctttttaatagaaccattcttcttcatttcaggaattctcagaatcattcttcctgcttcctgtcacatttaggttaaacaatattttgttttaactttgtgctgtattctacttggccttggaaaaatgtgggtatacttaaaaagttacataattcagtgtaaaaaacaaaaaaaaaccatttaaagtagtcatggaaatatgcatttttctactctgacaataagaaaagcaaaatgctacatagagaagcaattgttcatgaactaggtttgtcaagagtcaacttaaaatgtctgtgtactttgctaggaaaaagagaattttctgttttcttttcttctttttttttttgttttttgggaggggggacggagtctcgctctgtcactcaggttggagtgcagtggcgcaatcttggctcactgcaacctctgcctcctaggttcaagctattctcttgcctcagcctcctgagtaacggggatacaggcgcgcaccaacacgcctggctaattttttgtatttttagtagatatggggtttcaccatgttgagcaggctggtctagaactcctgacctcaagtgaaccatccacctcatcttaccaaagtgctgggattacaggagtgagccacccacacctgacctggagtttcctttatccttcttttacagtggtgaattagattgagctttgttatgcttcattatgtttattactgtcattcattctgaagaatcctgaaagcctgatgctgaaggctgagagtggtgttaaccaaggcctagaaccagtggttctcaaaggataaccctcaaccagcagcatctgcagaaacaccaacccttcattaacttcatccataggttcttgggaataacttataatgaaaccaaaaccacagtctgatataaacaagagttaagttcctatggcatgtttctggtgacaaaaacatcattaaacttcgaaataaggactcaaagcacattcaatatttaacattgaaataaatgtaagctatacatacatttaagaaagattaataaaaacaagctaattatttacccaattattacagttcagagttgtgagtggccagagcttatcctagaagctcaccattcaaggccagaaccaatcgtgcacaagatgccattccctggcagggaagattcacacacacacacacacacacacacacacacacacacacacacacacacattctctctactcgctgtctctcacacatacacgccacacatacacacacaatttacacaagcaaattaaattagcttgcacatctttgggatttgggaggaaaccaggatatcctgagcaaacccacgcagacatggaaataaagtgcaaactcctcacggacagtgaccctacaagcaccactgtcacaaccagtttgtgaccaaactgggcctacaccattgataacaaaatgtcgagttatctcataggtataatggagccccaaactgcaagtcatgtagcacgcacgacagaaaaagcattaatgacttaacaacacctggaaccaataattcctctcctcagaacccagactgggacaggagcagaacctgaatgtcagaacctcttttggaagtgaggggtccattggccggaaaagatacagggctaaaattggcctcaacataacttaccgtaaatggcaaaatttgaagccctccaatcagaccctgctaagccaacatttctaaatcccttcccttgccctctgagtccataaacttgccgcagatcccaaatcagaaagatttgagtctgactcttgtctccttcctagccagttttgccataagcctttctttactgcccgggcagagtggctgaagcctccaatcccagcactttgggaagcaatcacttgagcccagaagttcaagaccagcctgggcaacctggggagatcccatttctacaaaaaatataaaaattagctgggtgtggtggtgtgtgcctctagtcccagctactcaggaggctgagttgggagaatcacctgagcccaggagtttgaggctgcagtgagctatgatcacaccactgcactcgagactgggcaacactgtgggaccctgtctcagaaacaaacaaacgaacaaacaaaacaaaaaaacctttcttttctaaaaagccaatgccatagttattggttttctgtgcacactggacagcaagcccatttgcttgagagcagccccagctaggaatcaatactttttatcatcaatgaaataacaaaatgacatcattcaaggacctgttgtaattaacaatgcatattcctgtgctccaaaccagatttactgaatcagaaattctagaagtggggtccagcaatctgtgctttaacaaattcttaggtcattctgatacactatcaagtttgagaattagtggcttctagcaactgttcttaacattttgattttcgaatcaaagacccttttaagaatctgacgaaagctgtagctccaaaagaaacatgagacacacactattttgctccacaatttcagaattttcaagatcacctggagaacattctaagaatacacatatctaagccttactctgtaacttacactgagggtgggtcccaggaatccttaggtttwaaaagctctctgggttagttctgaggttcaatcacctttaggaaccgttgcttcagccattgcgaccgtgaacacggttaagaacacctggcctagagtgaatatatctcagagcagagcacctcagtccagaacttagaccttttcttaacagatcagtttcctggtcactttgctcactcaacatcctactttctcaggaaccacaggacctttaaataatttaccaagagcttacattggaaagctgcccatcctcagtatgyagctctttgaaccacatagaggccctttaaactttacccaattatacrcaccaggttttcaaatacgaaaaatctagggctagtaagagaataagctctttggtattttgcagaagatatttatttaaaggtattctggcttcctaaaaatatcaagcagctaaatcagcaccctgggaaagtggtaatgctgcctccccagaatacacagaaacagaacgtaagtaaaaatagtaaacagaataacctcaaaagtagtttcttcttgatgcttaaaaaagatgaagattcaatcatwgttgatctcaactttctatgcatactaagaggaacaaagaaaaagtgcctcaaaagaagacacgagaaaccagaagtaaagttaatcattcaacaaaaaatttatcagccctggcaacatagggagatcttgtctctacaaaaattacaaaaattagctgggcatggtggcgcacacctgtggttccatctacttaagaggctaagtatgttgcaatacatacaaaccccacgcccacaggtacatattagtataatatgtggtaaaaccagcttggcagcttttgatgcaaaaaaggattaggaagttttattcattcaacaaatattcattggaacatttaaagtgtattaagcaytgtctcagagattttgggtgatgcaaagatgaagctaaacagaaactcagtaggagacaacactgttctgtggtatgaaggttaaagctgtcgttccacgtatgtgaagtaccagtctcaatacattgatatcatttgaaatgaaaattaaagacataccattcagaaagacattagaaacattagaaaacaaacaaacaaaacaaagacattagaaacataagaaaataaagccaagtgatacggatagtgaaggtctatctagaatcgttatgttatgaatggctaaaagaaatagaaatgtttagtctaaaaccttcattatactttaatatacacgaaaaatttcatatatcttattctagagcagaggatctcatcctgagttttcttagaaagcatttaaggagtcttagaataccctgtaattatttgcaaatatttataaatatgtgttcttttccccttaaaagattagattttctttttcttttttttttgagacagagtctcgctctgttgcgcaagctggagtgcaatggtacggtcttggctccttgcaacctccacttctgggttcaagtgattctcctgcctcggcctctcaagtagctgggattacagacacctgtaccacacctggctaatttttgtgttttcagtagagacggagttttgccatgttgaccaggctggcctcaatctcctgacctcgtgatccaccagcctcagcctcccaaagagctgcgattacaggtgtgagccactgcgcccagctaaatttttaaattttttgtagagacaggttctcattttgttgcccaggctaatactgaattttctatccatgtttcattgcagaggcagaacccacagacacagagggccaactgtatgtactgaaaaaaaatccctgtataagtagatctatgcagttcaaacctgtattgttcaagagtcaactgtacttggaatcatatactatgtagccttttcagattggcttctctcacttagtaaaatgcatttttctccatgtcttttcatagcttaatagcacatttctttttagcagtgggtaatatttcaatgtctgaatgtaccacagcttatttacatattcacatactgaaggacatctttgatgcttccaagttttagcaattatgaataaagctcctataaaaaaatccatgtttaggttttggggtagatgtgttttcaactcatttgggtaaacaccaaggaatgactgctgtatcttatggtctaatctgttcatgtcttttgcccatttttacgtcaggttgttcatgctcttattgttgagttttaagaattggtatatttcaagggctgaatacagtggctcacacccgtaatcccagcactttgggaggccaaggtgtttgagaccagcctggccaacatggcaaaaccccatctctactaaaaataaaaaattaactggacatggtggcacatgcctgtaatcccagctacttgggaggctgaggcataagaattgcttgaacccgggaggcagaggttgcagtgagccaagatcgcaccactgcattccagcctgggcgacaaagtgacactgtctcataataataatacaataataataataataataataataataataataataatgataataatctgtatattttatttaagtcttttttcttaatccgacatgtcttttacaaagactttctttacgtttgctttctcattcttttaatatccttagttcttgcaataaattgatttaataattctagaatcccagtattttaatatgggttatgggtcttttcgttgcctggcctctgggagactttgccagttagtacacatggataataccattaaattagggtagttttctacacaacactagtaaagatcacctcagctataaaaaatccagaactagtgaaatttaaatcattgtacttctactcagttcattcttttcatagtcatgtaacaagactttcatttggtttatgtgtatacaaatttaataagagaaacaaacattttttctcttagaggactggtaagttactttctaatgattcattttgctaggcacatgataaaaactacttgtgatctgaaatgaatgaaataaaaaaatgtaaatttgtggatggaaatatcaactaaaacagcaaaaaataacttaaacacctttgggagtatttgttttttctagcagtggcagcagtgatttagcttataaattaaagtttcaagagcagtgacttgcttttcatgaatagtgacaagctctacttgattgtttgcatgtagtttaaatttatgtatttacaagttaaatcctgttaaataaagcgccaagaaaatttacaaataccttaatgctaaaataaacagtattgtaatccatattacttaaagtttctggattactggttgaatctcataatttttttaaaacacagttttcagtgcagtagtatatactataacaagattttacataaatattagatcacagatgccacaaatacttctaaattatggcattttagaaaggtcattcattattcaaaaacctgattacaggcaaaaattccaagatgactgtacccatgttacttataaaatttaaatatataataaaagagtatgaaaatcacagaagttaaaaaaatttaaaggaaagattaatgaaaggtgaacaaaatcaaatattacaatacagcctacatcaaataagcaataataaacaggacaattctttgaaaatatataaattacatgactgttttggaaagcaccaaaagaagtttgggtcaaaataacccaaacttttataactgaaaaaaacaaaccttaaaggaaggtctaaacttttataactgagaaaagaatcttaaagaaaggtctaaaaggcatatattagacttctagggaactctgtatatttccgaaacttctgaaaacactgaaaaacatttaaaagtaaatggtggccaggcgcggtggctcacacctataattccagcactttgggagggtaaggcgggtggatcacctgagatcaggagttcgaatccagcctggccagcatggtgaaaccccgtccctattaaaaattagtcaggcgtggtggcggatgcctgtaaacccagctactcaggaggctgaggcacgagaatcgcttgaacccaggaggcggaggttgcagtgagccaagatcgcaccactgcactccagcctgggcgacagagcaagactctgtctcaaaaataaataaataaaagtagatggtaaaaagcttctgaagcgataatatagggaaaagctacactggcaagacacaaacaaaataatccaataggacttttttatgtctaatgtctatgattactctgaggtacttatttatggaaagagattaaaatacacactgtagcaaaatgcttgcaattttgctattactataagttcatgatattcaggattggaattcatgtcacaataatgaagaggactggctgtagaaatttaaatttcttcatgaagaaagtaacgacaagctaaaaaaaatcagtatgaaatctttatttttttaagatagcaratattgagaaaaaatattaagtatattagttgtttcaaaacatgtccaaacactcatagatatttagtaagaaaaatctgattgcaattacaactactttgtttctttttaagaaacagggcttgggctgggcgcagtggctcacatttctaatcccagcactttgagaggccgaggtgggcggatcacgaggttaggagttcaagaccagcctggctaacacggtgaaactctstctctactaacaatacaaaaaaaattagctaggcatggtggcacatgcctataatcccagctacttgggaggctgaggcaggagaatcgcttgaacccgggaggcagaggttgcagtgagctgagatagcgccattgcactccagcctgggaaaaaagagtgaaagtctgtctcagaaaaaaaaaaaaaaaaaaaagggctgggcgaggtggctcacgcttgtaatcccaacactttgggaggccaaggtgggcggatcacaaggtcacgagatcaagaccatcctggccaacatgtaaaaccccgtctctactaaaaatacaaaaaattagccaggtgtggtggcaggcgactgtaatcccagctacttgggaggctgacgcaggagaatcgcttgaacccgcgaggcagaggttgcagtgagccgagatcatgccactgcactacagcctgggcaaaaagagtgaaactccatctaaaaaaaaaaaaaaaccggaaagaaacggctttgctaagttgcccaggctagagtgcagtgactattcacaggcatgatcacagtgcactatggcctcaaactcttgcctcagcctccagagtagctgggactacaagcatatgccactgtgcccagctggaattacaattttgcaatgcttttgctatcctagtctctataataaagctgggtttacaactaatcttttattttaatctgtctcttcatttctttgggtgggggaggttgactggaaatggaaaataaactatgtatagacatgagaaatgtgtgtgtgcatgtctgtgtgtgttgtatgtgtgtgtgtatttgagacagggtcccactctgttgcctaggctggagtgtcatggcacgatcacagctcactacattatcagcctcttggactcaagcaatcctcccaccttagcctcctgaatagctgggaactataggcacacgccaccatatctgactaattttttttagtttctgtagagacagatttttttttttttttttttgcctaggctggtcttgaactcctggtctcaagtgattctcccacctcagcttcccatagtgctgggattacagatgtgagccactatgctgggccctaaatttatatttctattctgcattttaatttcactcccacaggcttgttttaaagaattttactaaaatggctgggtgcagtggctcatgcctgaaatcccaacactttggggggccaaggtgggcaactgcttgaggccaggagttcaagaccagcgtggccaacatggcgaaaccccgtctcyagtaaaaatacaaaaattagctacacgtggtgttgcatgcctatagtcctagctattcaggaggctggggtgggagaattgcttgaacccgggaagcagaggttgcaaygagccgagatcacgccactgcactccaccctggatgacagagcaagactctgtctcaaaaaaataaaaataaaacaggacaatcatcacatcatactaatgtttacaaacattctaaagccaaatccacttcgtccatagtccctctttattaacaggatgatataaagtcacctaccattcttaatgtcttccttaaaaccacttccggctgggtgtggtggctcaygcctgtaatcccagcactttgggaggctgaagtgggcggatcgcctgaggtcaggagttagagaccagcctggccaacatggtgaaacccctctctacaaaaaatacaaaacttarctgggcgtggtggtgcttgcctgtaatcccagctacttgagaagctgaggcaggaaaatcacttgaactcaggaggcagaggttgcagtgagccgagatcatgccactgcactccagcctaggcgagagtgagacttcctctcaaaataaacaaacaaacaaaacaaacaaaccattgcctacaaccaacctagccaagtattttccccaggaagattacacattctaatccccattatcagaaataatcacttctactgttgttattctagcatcagtctcaaagaataaatgacttcctcgaccttttcttggtttggtggtctcaatgccaccaaaccttaactgaaataaaccatggtcactccattttatattcatccttcttgccagcaaataaaccaacaaatacctagagataagtagtgtgtagaaccaaacaaatctttctgctctcacagagcttttattccaagaatatatcactaccttcctagccatattctgatgatcagacctctcctacttcttttacttaccacttacattcactgctaccattctctcaggtccatcaaataaaatataaatatgtaatatttgtttttccttctttatcaaaaatacacaatcaacacactcattgtcataaaatagggcctgaagataaaatcttcaggtcatcctacttttataatcacatgtgatctagctgtctaattctgcattcctttgaaactcctctctcaaagtaatggcccaattattgataaattcagtcctccaccctcctcaacacagaggcattcgtattaatgataacctataagaggcttatttctcctttgactttgaaaataccatattctgatgctttccctatttctctaatttttttttttcaatcttcccagatggctccacttcttcacaacccttaaatgtggatgtggctcaagattaagccaatcactttgaactccaactgatcatcttatggctctaagtattatctatatgcagtaaactgtcacatctaggtcctttttctgacctttcccatgtactaattcagttctttttaatttaattgcccttcttgcatttaatctaactcttccaactgatcctaaaagacaaatttaactaaatcattccctattcaaagcactttattactacattttgcaagatatcctaatcatcttcaccttgcagatgaactcttcagcaattcaaccctttctgctttccagattcatagttcactatggtcattttcgtaattatgcgtatctcacatccttaaacgtcctctgttcttttacatttattctcgtctaatttagctcaagatgtttccctttatctgttcagttcaatcttttttttttttttaattttttgagacagagtctcactctgttgccaagctgaagtgcagtggtatcatctcggctcactgtaacctccgcctccagggttcaagcaaattctcctgcctcggcctcctgagtagctgggactacaggtgtgtgccgccacacccagctaatttttgtatttttggtagacacggggtttcaccatgctggccaggatggtctccatctcttgacctcgtgatccgcccgccttggcctcccaaagtgctgggattacaggcctgagccactgcrccctggtcaatctttccaaggcctagttcaaacatagccttgtctatgaattaatttctgtatctcatcactcaaaattaatcctttcctgctttatatacccactgctatctgtttggacttctactaccacacagtaaaaatagttttaacttgttatttatgcatgtatctgtctccacaaaactttggagttctaggaagacaaagatttcttcaattttgtttttgtattttccatagtatctaaaaacaaaggctatcattaaatatttttaaagaagttctaaaattgagggtcattaaggaaaacactttccaccagctcctaggaagttaattttaaaaggcattattgaaaatgtagaactaaattgttgcagccagtctacagttttttatgaggaaattatgtaagaagagccacaaccatcttaggtcatcaaatttaaaaaacagcaattagaagataaagattctttctgaagtagttaaaaaaaaaaggaatagcatttagattttttgttttgagtgaggatctctccgtgtcgttggggctggagtacagtggcttgatcatggctcagtctcactgcaggtgtgaactcctcagatcaagtgatcctcctgccttagcctccctgagtatctcagaacacagacatgtgccactgtgcccaactaatttttttttttttttggtagagacagggtctcactcaggttggttctgaactcctggcctgaagtgatactcctgcctcagcctcctaaagtgctcggccacccaaagtcacaggtgtgagccaccatgcctagcctgcatttagaattctgagggcaaccataagtattaactgaaaatgttaagaaattacaattagtgtttcaagcctatgagttctgtcttcattggctgctttcttgctatgattctatataggctcaccagagaacctgctgatcaagaaaggggtctctctcaagaagcattaactagattttgaattgttttatgagcaagtttcatttcaaacagaaaaaggtacaatttatttccaaattgttagagacaaaattttttcaacagtttagtcaagaaaaatctggtaggtacaattgattcttgttatgcatggtagttacgctctgtaaagcccctttaaacaatgaattagtaaatactgagctactgttcttaaggaaaatacaaggtaggctccaatgagccccttgtcacatttttgttaactgtatttatccacaaacatgtttcatgtgtgtttctgcttaaccacactatatatatgtatatatatatacatgaatacgtgtatgtatatacatgtacatgtgtatacatatatatatatacacgtatatgtgtgtgtgtgtgtgtgtgtgtgtgtgtgtgtgtgtgtgtgtgtatatatatatttttttttttttcttagatggagtttcactcttgttgcccaggctggagtgcaatggcacaatcttggctcactgcaacctccgcctcccaggttcaaatgattctcctgcctcagcctcccaagctgggattacaggcatgcaccaccacgcccagctaattttttgtatttttagtagagacaggtcttcaccatgttggccaggctggtctcaaactcctgacctcaggtgatccacccgtctcagcctcccaaagtgctgggattacaggcatgagacaccatgcctggctatcttgttgattcattaatattgagatcacgaacagcagcactattaactcatgcctaaatgaaacttgtctaacacatgtattttccacaaaaggcatatcatcacagccttcttgcccttaaaaaacattaggcagtactcggcactacatttggggagtattttaaacagcaaaatcactaacctaaaccagaaaaacagaacaatacaaaaaacatgacattaaatagaccattaaaaggatacttgtttacagtatgaaatctgaaacaagaaagcagaacatcacctgttcaatctcagttggaaatgtgcgtataggtgacaaaaatttttctccactctgcgtaagtctatgaatggtcaaggaagtgccattttgggttacaaataatttttagtgagtaggcatatttgcaattacagaatctgcatataatgagatcagctatattttctacatgctagtaagcctagttatctagctgtaaaagatagtctctcctggttgacagtatgaagttcttaaaagaaaagggggtggaggatagacaattttttttaatttaaagcaaaaatctctattttactcgtaagttcccattttaagattttcataaatcaggttacacatttcttcgaagtacctgttactatataattattcccttcttgaaccatatgtgtttctttcaccactttgaaagtttctcaaaattaggaaccagtcatctcctttggmatcttttctcatcatcatacccaggatcctgaaaagtatatgcagtttagttgtgtcgacagcgaagtgtttatttaaaaacattaaataaaccaggcgcggtggctcacgcctgtaatcctacaagccagggatggcctgaagcctggaggccgggctgccagttctgggtagagtctccaacccagagaacttccttgatgccttttggccagtcggatagtgctttttccaggcccacccatggaccagtcagcatgcacttcctccattctgagcctataaaaaccccgggctcagccaggcttggacactcatcaggactacctgtctgcagataggagctacctacttcaggtctcctctccgctgagagctgttctatcactcctctctgtcttgctcaccctccagttgtccacataacctcattcttcctggatgcaggacaagaactctggacccaccaaatggcaggactgaaaggagctgtaacacattcctggctggcttactgaggtgtgggtggtaacatgctcccagattgtgaaagtgaagagtggtgaactttctgggggcccagaccttggggttcccaaagccagagcttccgtaacactacagccctcctgccctccaccaggtagccaccccatgggatgggaaaaagcaacagggccgggccagcccaggagttgccagctggagcgggatggcaggactgaaagagctgtaacacaaatgggctgaaactgccctccagaaactcaccccctcactcgccacactgcaggtgacgagaaagaaagaagagctgtggccctactgggagcccagacctcagggctcctcaagccagggctgtgacacgctgtaacaccctttttgggggctctgcagatcctggcatttctaagctttcagatgataccacattccctccatccacacgcgggtgctgcagcgacagctgcttacggtacatctgatccagctgcagcctcacaatggggccagacctgtgctggtgactggaactgcctgccccactatagcagccagtatgcctggctgtgcacagtgattggaccctgtgcttgcccggtcacacacccctcaccactctgctcctggctcgcccttgataggcgtgagatccaggccagtagtgtgagccgagttcagcctgccaggccaagtaggcagaatgagcccagtgggaataagcaaaactcaagcactggtgccactggccacagaatttccagctggtgaagtgacatctgtgacataaacaggaccatgtctcctctgaaaactgtaccagagcccttccttgcctctcctagcttctggtggtctgctggcaaccttttgcaatcctgagcttgcagaagcatcatgccgatcyctgccaatgttgacacatggtgtctacactgtgtatctctgtatccatattctctcttataagaaccctagattaagggcaactctaacgacctcatcttaatttgattatatcttcaaaaaccctatttcttaaggttatattcacaagtactatatactacaagtattaggttttcaatatatctttttggggaaaacatttcaacccgtaacatatctatttaagatgttctcccgacatcagtaaaagacagaatgccacattcattctaatctttttttttagacggagttttgctcttgccgcccaggctggagtgcaatggtacaacctcggctcaccgcaacctccacctcccgggttcaagcgattctcctgcctcagcctcccgaatagctgagaatacaggtgcccaccaccacgcctggcttttttgtatttttagtagagacaaggtttctccatgttggtcaggctggtcttgaacttctgacctcaggtgatccgcccacctcagcctcccaaagtgctgggattacaggcatgagccaccatgcctggccttcattctaatctttaaaaaacactttagtcattaatttacatatttaataaacattattactaagtctatatcaaacaccatgtagaaactgtataatatgaaaagtttagaaataaagatatatgaaatatccttaaacattataactgaatttttcttctttttttgagacagagtcttgctctgttgcccaagctgaagtgcagtggtgcaatcttggctcactgcaacctttacctcctgggttcaagcgattctcgcccctcaagactcccaagcatctgggattacaggcctatgccaccacacccagctaatttttccatttttttttttttttgtagagatgaggtttcaccatgttggcaaggctggtctcaaatacctggcctcaagtgatctgcccacctcagcctcccaaagtgttgggattacaggcatgagccactgcacctggcccagatttcttattatagtttctcagcaagaccatttaaaaatggttaattaacaacaaaacagagctcacctacggcacaaacaatagcacaaataatagagcaaaacaaacatttcaaatgccctacaaataatgtcaactttgatactgctgcccatagtttttgtataaaaaaactattaattgataatcttctctttggcaaaaacataaaaacgatttgaagatgaacaaactgggttaattcctatgaattccaagaaactctacaagaatgccctcatccttgtgttcaaattcatctctgaaattcagagatgattttgccttggaaaatcatctctgcaagaaatagttaaagcctttcaaggaacccagtcttcttgaattttcagtttttttttttacagatgatcaggtctttgaattatgtcacttataatgatgatgatgatcctatacttatttccaacaaataagactgtaggataaattccttacaagtggaatgtctgagttgatgagtatgtacaattagaactgctgatgatctgtgttttctagaaaaacagctaagtatacagcattaaacaaccacactacttgaatgctgactccactaggcagttattacattaaagttaatacaatgttcaaccaaatattcaagttaatacactcaggcagtctggtaagaaagcctgattacagtactagtgaggccaaggtcaaggacactatctcacatgaagctctgtatgctgggttcagagtgacaaactatcctcccatagtaagtcagcctggttatcaaaagcacaataagattagagatgaaaatatttgtaccaaaagaaagggaagctatctttgtttgtctagatacaaataagagatttacacatcatctaagtttgctactttaggaaatggtattattgtttcaagagcttgaaaaaagaaaaatgttctatcacaggaagaatttttttattcgaaccatctccactatatgaacaaaatctttgctgtttctttgtctgaatcttcatatcatgtgaacagcagagaattacttttagggttaaagttgaaggctaacagaaattcattaagaagcctggcgtggtggctcacttctgaaatcccagcattttgggaggccaaggcggtagatctcatgaggccaaagagttcaagaccagcctggccagcatggtgaaacattgtttctactaaaagtacaaaaattagctggatgttgtggcatgcacctgtagtcccagctacttgggaggctgagggacaagaatcactcgaacccgggagaaaggggttgcagtgagccaagaacacaccactgcactctggcttgggcaacagattgagactctgtctcaaaaaaaaaaaaaaggaattcattaagagacaaccatctataaatgttgaatattcaatgttaagaccttggcatattttctcaggctactgaagcatatatcccaggaagggcaataaaagaaaatgcatgagaaccttttttaagacagagtctgctctgtcacccaggctacagtgcagtggcatgaccttggctcactgaaacctctgcctcctgggctcaagtgatcctcctgcttcagcttccccagtagctgggactataggcatgtaccatcacgcctggctaatttttgtttctttgcagagatggggttttgccatatcgtccagactggtcttgaactcctggccccaagcaatcctcccaccttggcctaccaaagtgctgggatgacaggcatgaaccaccacatccagcctctgagaatctttctctctcacatgcacagtgtacaaacattcaaaaatatgaagaaaaatcccaattacccttttactctaggaagtacacctagtttatcacacaggcaacaagttttaatgcattcttatgttttcttccagagatatggtatgcatattcaagcacacatacatgcacacttaagatatagttcacaaataaaacaaatggctaatcattctcagcaaactaacacaggaacagaaaaccaaacaccgcgtgttttcactcataagtgggagttgaacaatgagaacacaaggacacagggaaggaaacatcacagaccagggcctgtccggggcctgacaaggggagagagagcattaggacaaatacctaatgcatatgcagggattaaaaccttgatgacgcagcaaaccaccatggcacgtgtatacatacctatgtaacaaaccggcacgttctgcatatgtatcccagaacttaaaagtaaaattaaaaataaaataaaacattttcacaatgaagaaaaaacaaacaaatggctaaagaattctgttctgtcctacactttaaaaaaacttactatgacgtggaaaccaatccatttcctatgagtacatacagaactacttcattcttttaaatggctggctgcattgtattccactggatagatgtaaaataatttattaaactctttttttcccttgagacaaggtctcgctctgttgcccaggctggagtgcagtggtgggatcacggctaactgcagcctcgaactcctgggctcaaacaattcctcccacctaagcctcccaagtagctgggactactggcatgagcaactgcactcagtttatttaacagatagttaggctgtttccagtcttctaatacatacaagaagaagccctgtactcaastcatctcccacaaatgaataaatgcatgtagactggacaataagttacgagaagaaaaatgcctgagtaaatgaatatatataattagaaatgcattccacaagctttatatctgtatatactcataaccagcaatgaatgacagtggcagtctttctacactcttttcaaaaacgtgttcaaaacatttgatctttgctaatctgatatttgaaaaacagaaaaaaagtatcccattatagctttatcttgcatgagaaccatttataagaggcaagttgtatgtttatcttcacagacagctaagactgaagaaaaagtgaaagacacctttacaacatcttggaactatgtttttacttcaattatgaataatgtatgaatataaaaatcttatgtcagtatttaaaatgtttaccaagttgtgactgttgcagtctgactaccagtcctagacccagacagtaattagtgaaagctctagcacaagctggacttagtaatgaggccatttgtaaggtcaggtcttatttggaattagccaaaattatggcctcttaaaaagtagattcaagtcacaatcaaataataattacacttcagaaacaaaccaacagtgataaacatccacttcttcctaaagtttacatacacatatagagactactttttctgagacagagtcttactctgttgcctatcatagctcactgtaacctcgaactcttgggctcaagggatcctcccaccacagcctctccagtatctgggactacaggcacacaccaccacacccagctagaaactttctygaaactcaaagaaagtaataggaaaaaaattgtgttgtaatattcactaattcactaagcatgttttaataaagtttattcaatcactcactgactagttcttgaactaatgatttaaaactctttgcatctaagatctttcaactattaacctgactttaaaatgcttgtatgtattgtgactcattgagggaagagaggcattcttctaacttactgaaaaagactctgcttgtgccttttttgttgatgttgttgttgttcagacggagtctcgctctgtcgcccaggccggagtacagtggtgcaaccttgactcactgcagcctttgactcccaggttccagcgattcccctgcttcagcctcacaagtagctgggattacaggcacgcgccaccacacccagctaatttttgtatttttagtagagacagggtttcrtcatgttggccaggctggtctcgaactcctaacctcaggtgatctgcccgccttggcttcccaaagtactaatattacaggcgtgatccaccatacccggcctgcttgtgcttttaatcaatcccagtgctaaatgacaacctcacgtataacgtacatatgtgattcatatcatgttatttcttgtactgttatgtcactttgtaagcacatagacatttcatgcatctaagatcaatagcatacaaactatttggatacaggtttaaaaaatatattttttatttctgtcacagtaatagctcattgccccagaaagccattaataatagcttgttatctttgccaagcaaaaaataaccaagattcttgtttatcattaatatttccagatactctaaattcatactaagagtttttctgataacaatataatagtttcagaaggaatagtaaggatatccctgagaagccagtgtctgttatggaactgatgttagaaacaaatactctaatgacactaatcttactctaccttgaattacagtattaatggacctgtctgagcaaggactttgccttacttatctttgtattcctggcagtatctttctatcagagtattcttatagttagtactatataaaatatcttaaattgttatgacctcaaaatgggaccaaagactcaaacttcaaacttttgaaaaccattaaatatgaattatagttggttactgccttagccattatcagaaatgcaagcaaaataactcatattggatatcagaacgcgttggtaacagaagtttgggcataaggctgtctctacttttcagacacagccatgcccagattgctggctacatctgagagaatgaggacttaagattcacagccaggaatttaaaaaaaacaaagcaaaacaaaaaacaccaaaaaaacccagctccctgttaaaattcaaaatggaaaaggactcaaaaagaaataaaagacgtgggatttaattaaacattcatattaataaactcttgttttttgggttgtcaggaataattcaaaatgtaagattactttgtctaaaatgcaaatcaacttttaatgttggtagaatctgtcccaagaataataattatgacaatagtctgtatagtaaaaacactgggaactgggttgaggtagaaaacctcaattaaataaggccacagaaaagatcagatggcaattgcttttactctcttttaatctacatgcaaagtctaggaaacttaaatataaatgtatatgtatgtgtgtatttacacacacagcaaattggtaaatagccaactaaagattgactaggaggccaggcacaggggctcacatctgtaattccagtacttggggaggctgacgcaggaggatcacttgaagccaggaatttgagaacacttagacagcagagcaagaccccatctctaccaaaaaagtattttaaaatataaaccaggcatggtgccatgtgcctgtagacccagtgactcgggaggctgaggtgggaggactccttgagcccaggagttaaaagttgcagtgagtggctgggcatggtggctcacacctgtaatcccaatactttgggaggccgaggcgggcggatcacaaggtcaggagatcgagaccatcctcgcccacatggtgaaaccccgtctctactaaaaataaaacaaattagctgggtgtggtggcacgcgcctctagtcccagctactcgggaggctgaggcaggagaatcgcttgaacccggaaggcagaggctgcagtgagccaagatcataccactgcactccagcctggcgacggagcaagactccacctcaaaaaaaaaamaaaaaacaaaaaaggttgcagtgagctctaattgtaccactactacactccagcctggatgacatggcaagacgctctgaccctctctctctctctctctctctctctctctctctctggaggcaaggtctgaccctctctctctctctctctggaggcaaggtttgtcagcctcgacttcccaggctcaagagatcctcctacatcagcccccaagtagctgggactacgggcaagcaccaccatgctggcgtgtgtgtgtgtgtgtgtgtgtgtgtgtgtgtgtgtgtgtgtgtgtgtgtgtgttgaaagatctttctcaaagggatattgctatacttgtattcaaactgtattgtaacgtaagtaatttgattaaaaatcatttttctgatatttcttctgtgtgcagtggcacaatctcggctcactgcagccttgaactcctgggctcaagtgattctccctcctcagccttctgagtagctgggactataggcatgtgcaaactaatttttttattttttgtagagttggggtttcacattgttgcccacgctggaatcaaacttctgggcacaagcaatctgcccaccttggcctcctaaatactgggattaaaggtgtgagctactgtgcccggtagagaccccatctcttaaaaaaagaaaagaaaaagacytagtcattagtttatcacgtttttttaattttatttttttttaattttcagagtgagtcttgctctgttgcccaggctggagtgcactggtgtgatctcgactcactgcaacctccgcctcccaggctcaagcagttctcctgcctcagcctccagtgtagctgggactacaggcgcctgctaccacaccgggctaatttttgtatttttagtagagatggagttttaccatgttagccaggctggtctcaaactactggcctcgaatgatctgcccgtcttggcctcccaaagtactggaattacaggcgtgagccaccgtgcccagccaacaaagtcttgacatgacttttagattaatttttggatcctatggtctcatcaatacagagcctcaaactccagtaacccacaattttgaaggctagaagtctaagatcaaggtggttgtgagatgaaaccagatttataaaagaaaaamtgtatgactgtgacatcacttaaacaaatttaattttaaaaagtgtatatatacctaggcttacctatttcacattttatcttaagagtctaaatatttcgaaactaaaaatatataagtacaatgaccttatttttaagagttcccactactgagcctgtaggaaaaatataaaaatgttacatatcaataacctattaataacaccygatgtattattgagataacagacgttttcaaaaattttccaaatattcaagtaaatacaatgataaataaggtttataggtagctttactgccatatgaaacaaaaatatttataacatgtttataaggaccagtattaagtctggtcaatcatatccctccttatttaccagggttaaacgtcctggagttaacttcatttacttttttaaagatctttctgaaagggatattgctatgcttgtactcgaactgtactgtaacgtaagtaatttaattaaaaaccatttttctgatattacttcttaaacatttatctcaaaagaggtatttaaaggcaaaattttttcatttaggtatttttacagtggttggtgtccacaacaaataattctgaggattcgtctaaaatttcctaaactgtctctttaaaaaaaaaaatcttgctcctattccaaaaagcaagaatgaatgctgagatttacaaaaatagttaacagatttgctgaagcatttattttaaaaacatatatggaacaactagatattatgyatttcagtatatttcaatgtttcatcataaatatcacacatattaaaaataasgcggacaatttaaaagtaggtttaggtttccaggttaagatggcgaatcatatacgtctatgtaatttcagtaccttgtgaaacctactacaaactacatcaggagaaatctttaagaaaaatacctcataaggacaggggcaaagtgggtagaaacagaaaaagcaacggcaatttgatagaaacctgaattccagcctgacagagaagctgagaaccaacccactgtatgccatagaatcttaaacaggcataagaaatggtaccaccaggtaagactggcactgggggctaaggaagtagagggctaaaaagcaaagaggatttcagtgacagccatttaagaaaaaaaaaatagatccttcaatcccctccatgactctgtactagggagattcactgttttagaagtttagtctctgcagaatttaaaatagaaggtctcaatacagagaaaacccaaggccatttctgtgcttcatcatcatatccaaaccaaaactgggaaatcaggctgggcacggtgggtcacacctgtaatcccagcacttcgggaagctgaggcaggcggatcacttgaggtcaggagttcgagaccaacctggcctacacggtgtaaacctgtcactaataaaaatacaaaaaaaaattagctgggcatggtggcagatgcctgtaataccacctactcaggagactgacgcagaatcatttgaacccagtaggtgaaggctgcagtgagctgagattgagccactgcactccagcctggacgacagagtgagactccatctcaaaagaaaaaaaaaaattgggaaattaaatgactgtatgcatactaatatctaacgaacttcagccattttccccgactctgcacccagaattcttgcagacagatccttaccatctatgtaggagatggatttcttccctgaggaaagtaaccagtctaggagatgatatctcaaaattctagtatactggagtttgacccacaaaataaggttcccagatcaccatcaactaaagttcaaaatagacaaaccctatccatcctagccagtgattatttagtatttgtggaaagcctctaaatttaaagggtccacgaacaaagacagagacaaaagaataagagcaacatgtaggaaaaagagatttacacagactctaaaacattaacaaaaccaagatttgtattaccagaaaaagagttatttcgtctaagaaacaaaaataagctgctataggaaaaaaaaaaaaacagttggaagcttaaaaggaaacttaaggaaacctcccagaaagaagaataaaatgagagaaatagaaataggagagaaaactagaaagccaaaaaataaaattgaaatgacaacatccatttgagaacaaaaaaaaaaaaaaaaagaaagggaaaactgtcatcaaaaagaaaaaaaaacaacaactaaagaaaatttcccagggctgaagaataagttgccagattgaaagggcctaacacaacagataaaaatagacacacataaagaaatatcacagtaacatttcagaatcttggggaaaaagagaagattctatatgcttttagaaagaaaaagtgacaaaggatcagaaaacagaatggcagaatggcaggcttggatacttttacaatggtccatcttcagaatagtaatttccaaactaaaattccacacccggggcaaaccattcaagaaagaccaaacaacaacaacaaaaaacctcaagcaccatatctcaagaaactactcagaatgtactccaccaaaacgacagagtaaactaagaacagaagcaaatattaacacagtataaggaataaagtcgctgggcacgggggctcatgcctgtaaccccagcactttgggaggccaaggaaggtggatcacctgaggtctggagtttgagaccagcctggccaacatggtgaaaccccatctctactaaaaatgcaaaaaattaaccaggcgtggtggcaggcgcctgtaatcccaggtactcaggaggctgaggcaggggaatcgcttgaaccgggggggcagaggttgcagtgagccaagatcgcaccactgcactccagcctaagcaacaagagcgagactccatctcaaaaaaaaaaaaaaaaaaaaaaaaggaataaagcaacctctaagatgataataaaggaagatctcaagtttataactgtataacagacctacatggtaaccaatccacattgaaacattttgattcaaaaatcaggtaaacaggccggacacagtggctcatgcctgtaatcccagcactttgggaggccaaggcgagcggatcacgaggtctggagttcgagaccagcctgaccaacatggtgaaacccagtctctactaaaaattcaaaaattagctgggtgtggtggcgcacgcctgtaatctcagctactcaggaggctgaggcagaagaatcacttgaacccgagaggtggaggctgccgtgagccaagatcgcgccattgcactccagcctgggcgacagaacaagatttcgtctcaaaaaaaagataatttatagtcaaaccataagaacatttaaaagagttcagcaagcctactggacaaaagatcacgtcacaataattagctgtatttctctatatcagtatttaccaccaaatgcagattttactcataatagcaataaccactatcagatcacaggaattaatcaacaaaaaatttgcaaactttatagaaaaaagcgtaaaccctatctaacagcataatacaagactccaaacaaatgagacataaatactatattcatggacgaaatgattacagtaaacagacattttccctaaaataatatataaattcaatgccattccagtgaaaaatctcaaaggggttccttcttttatgtattaagctaatcttgaaaactgccaagaatagctaagatagaacttcaagacaacaaaatgggaacgcttgccttgccagatagcaagacttataaagttacaatatttaagatattgttctattggtgcaagacaaccaattggaacagtggtacagattaaatgaatcagaaacagtcctactcattaaaagaagatgctacttaaagaggtggtgttagattactgtgaaggatgggcagattacttagtaagtgctgcttagaaacgtaatacactacatgggaaaaaatttcattcttcagaagatatatgaaattaacttgataaattgactatcctaaaatttaaaacttttattcactaaaacttgctaatgtggaaaaawgagctgctgggaaatgatatatgtgatatagaaccaataagtaattatctaaaatataaaaacaaatcctacaaatcatttttttttaaatacaactttctattgacaatagggaaaaataatgaacaatcactgagaaaagaaaaggcctaaatggtcaacaaatgtaaaaaaagatgtttaactttattggtcatcaaagaaggacaaataaacccgacattaagatacgattttatatttgggggatttacagcaattacaaagactgaaaatactaaatgttgataaagatgttacaaaataggaactttcaaaaagaagtgatgggaaaatatatgaagaaaaccacactggagagatgtatgagaatgtctagtaaatgggtatgatctaaactcagtaattccggccgggtgcagtggctcatgcctgtaatcccagcatcttggaaggccgaggcaggcagatcacctgaggtctgtagttcgagaccagccaggccaaaatgatgaaaccccggctctattaaaaaaaaaaaaaaaaacaaattagctaagtgtggtgatgggcagctgtaatcccagctactcgggagactgaggcaggagaatcacttgaatccaagaagtggaggttgcagtgagctgagatggcgccattgcactccatcctgggcaacagagtgagactctgtctcaaaaaataaacaaacaaaataaataaactcagtaactccactttccaaaatatactctgtactaatcctcacgtgtacatcatggagaaaagtaaaaaacaattactccaacattgtgtctaaaaagaaaaaccaagaaacctaaaagttattaaaaagaattatggataaatgtattctgacggaatcatataattgaaaaccacatgtaagttaaaatacataatcgaaatcatgaaagcaagtaaatcattctgaaaaaaatacaatttatacagtatgtcaggttcagaaacgtgaaacacatttatgaatacatgttgtttatgaatgcctacacatatagtataaaagcgcagatgagagtaagaaacaacaaatttagacagtgattactgatggagaaagaggagagctggattaaaaagaagtacaagaacacttttatttcaagtagaaatggtctggaataagtaggcaaaatgttaagatgacaacgctgcacggtacatagttaggaatgtattaggttattcttaatttattatatgctttcacttaattgtttcttctgattttgagaaaacctcaattatataaagttatgtacctgtcaaaagccaaaataaattacttaacaaaataaaaagtaaacaaaattcttcatagtaagtaatacttctccccagacatggatttatgactagtagctaaacttttttttttttttttttttttgtgtgtgtgagacgaagtttcgctcttgttgcccaggctggagtgcaatggcacgatctcggctcaccacaacctccgcctcccaggttgaagcgattctcctaccttagcctcccgagtagctgggattacaggcatgcatcaccacgcccagctaatttctgtatttttagtagagacagggtttctccatgttggtcagcctggtctctaactcctgacctcaggtgatccgcccaccttggcctccccaagtgctgggattacaggcatgagccaccatgcccggttgactagctaaatattaaacatatctgtgtgctggtaagtaaatattacatgtatctgtgcatcaaaatccaagaaatatggagttaacctaataatctaacctaaaaaattacttttcccacttaactccatgaggaaatctaaataaaaataatttctttcttacaaggattgaactgaaggtatcaaaagtagaagttttttatatttaaaaagttgtgaagtggaaatctgaactaaacaatttagtaaaaagttttccaaatgccttgtactatacttaacaatacagtccactcctgaattttctctccatagtatgttttataattgcttctacacaggccttgaaaattttttgctaaatgtattccaaagtatttgtctctgattacctaatataattataaatggtatttccaatttaattatacttagaattgattagttctgtgcctttggatgagccaccgtggccaccctaattttagatgttattaaactagaagcacacttttacattaaacaattactttcttaaaactttttttttccataggtttttggggaacaggtagcttttggatacatgagtaagttctttagcggtgatttgtgggattttggtgcactcactacatgagcagcatacactgaacccaatttgtagtcttttatcactcaatccccacccaccatttcccccgcaaggccccaaagtccactgtatgattcttatgcctttgcatcctcacagcttagctcccacttatgaaagagaacatacgatgtttggtttttcattcctgagttacttcacttagagtaacagtctccaatcccatccaggttgttgtgaatgccactaactcattcctttttatggctgagtagtattccattgtgtgtgtaagaatttctttatccactccttgattgatgagcatttgtgccagttccatatttttgtaattctaaattgtgctgctttgaacatgactgtgcaagtatctttttcatataatgactacttttcctctgggtagacacccagtagtgagactgctggatcccactactgggtatggtacttctacttaaaggaatcttcacactgtccatattagtcatactagtttacattcccaccagcggtgtaagaatgttccctttccatcacatctgcaccaatatccattattttttgactttttaataatagctaatctgactggtgtgagatgatctcatgattttgatttgcatttccctgatcattagtgatgttgagcattttttaataagtttgttggccatctgccacttgtgcatattcttttgagaattgtctattcatgtccttagcccactttttgatgggactgttgaactttttgtttgagttcgttgtagattctggatattagtcctttgtaggatgtatacactgtgaggattttctcccactcagtgggttgcctgtttactctgttgttacttttggcatgcagaagctctttaagtcccacctatttatctttgtttttgttgcatttgcttttgggttcttggtcatgaagtctttgcctaagccaatatctagaagggtttttccaatgttatcctctagaattgttagtttcagatcttagatttaagtctttgatctactttgagttgatttttgtataaggtgagagacgaggatccagtttcattcttctacatgtgacttgccaattctcccagcactatttgttgaatagggtgttctttccccacttcatgtttttgtttgttttgttgaggatcagttggctgtaactatttgttaaaaaaagttcctttagaatcttctgtatttctcaggcaggggatgtggtggctcatgcctataatcccagcactttgggaggccaaggcatgcagattgcttgagtccaggagttcaagaccagactgggcaaaatgaagaaactccatctccactaaaaatgcaaaagttagccagccatagtggcacacacctgtagtcccagctacttgggagactgaggtgggagaatcacctgagcaagggaagtcgaggctacagcaagctgtgatcatgccactacaaccagagtgagaccctgtcacaaacacacacacacacaaactatattttccaaacaattaatcatttatggtaggcttcgcttctttgtaaggattcaaagttttgtttttttttttttcaacttttattttattttatttgagatgcgagtttcactctatcgcccaggctggagtgtaatggtgcgagctcagctcactgcaacctccaccacctgggttcaagcgattctcctgcctcagccactcaaatagctgggattataggcatgcaccactacgcctagccaatttttgtatttttagtagagacagagtttcaccattttggccaggctggtctcaaatgtctgactttcaggtgatctgcctgcctcggcctcccaaagtgctgggattacaggcttgagttcactgtgcccagccttttttktttttttttttttttttgagacagggtctcactctgtcaccaggctggagtgcagcagcacgatcttggctcagtgcaacctccgcctcctggattcaagagattgccctgcctcagcctcccaagtagctgggattacaggtgcgtgccaccacatgtggctaattttcaacttttatttttgattcatggaagtacacttgcaagtctgttacctgggtataactatgttgctgaagtttggggtatgaattatctcatcacccaggtactgagcatagtacccaacagttttcaacccttgtccctctcctacctcccccatctagcagtccctagtgtgtactgctgccatctttatgtccatgagtaccagatatttagctcttacttataagtaagaacatgcagtatttggttctctctttttgtgttaatttgtttagggtaacttttcatctattgtaacattccttctgccataagaaccttaacatttcttgcagttcatgtctgctaatgatgaatccactcagtttttatttgcctggaagtttttttctcttcacttttgaaggttatacttgctgtaagaaattctggccgggtgcagtggctcatgcctataatcccagcactttgggaggccgaggcagcgggcgggtcacaaggtcaggagattgagatcatcctggccaacatggtgaaaccctgtctctactaaaaatacaaaacttagattggcatggtggcatgcacctgtagtcccagctacttgggaggctgaggaaggggaatcacttgaacccacgaggcagaggttgcagtgacccaagattgcgccactgcactccagcctggggacagagtgagacaccgtctcaaaaaaaaaaaaaaaacaccacgaaaaaaaaaaagaagaaattctaatggctgggtatggtggttcatgcctgtaatacaagcactttgggaggctgagatggacagagtacatgagcccaggagttcaaaataagccctggcaaaatagtgagacccctgtctccttaaaaaataaaaaaattagccaggcatgatggtgcacacctgtagagttccatctacttgggagggtaatgtgggaggatcacttgaggctgagactatgaagctgcagtgagctatggttgcaccactgcactccagcctgggctatagagcaagatcctgtctcaaaagcaaacacgcaaacaaaaatttgttgttttcatttagcacttcaaacatgtcattccactgcatttggcttgaaaattttttgattagttagaagtacgcagtaattttcatatctgtttttccgaaagtaatgtgccttgattcattggctgcttttggcattttatacttgtcactgcttttgaggcatttggttatgatgtggcttcttacgtgttttttggtttgttttgtgtgtacttctcttgcttgtaattttcttttattctgtatataatattcatactttctgagacagagtttcgctcctctccaggctggagtgcaatggcatgatccctgctcactgcaacttccgcctcctgtgttcaagcgattctcctgcctcagcctcccaagtagctgagatcccaggtgcccaccatgatgcccagttaatttttttatttttagtagagatggggtttcaccatgttggccaagttggtcttgaactcctgacctcaggtgatccgcccacctcggcctcccaaagtgctgggatcacaggcgtgagccaccacagctggccaatattcatacatttttatgtagtaatgtggtattctgctacatgcatagaattgtattgatcaagttaaggtatttagagtatccaccaccttgagtatttatctttttgtttgtttgttttttgagatggagtcttgctctgttgcccaggctggagcccactggcaggatcttggcttggctcactgcaacatccaccccctgggttagagcaattctcatgtctcagcctcccgagtaggtgggattacaggcgcatgccactatggctggctaatttttgtatttttagaagagacggggttttgccatgttggccaggctggttttgaattcctgacctcaagtgatccacctacctcagcctcccaaaagtgctgggattacaggcatgagacaccatgcccagtcagcatttatcatttctatgtgctaggaacatttaagtcttctcttctattttgaaatataaaacgctggatatggtggctcatgcctgtaatcccagcactttgggaggccgaggtgggcagatccacgaggtcagaagattgagaccactctggccaacatgatgaaaccccgtttctactaaaaatacaaaatttagcttggcacagtggcgtgtgcctgtaatcccagctacttgggaggctgaggcaggagaatcacttgacttattaactatagtcatcctgctctgccatagaacattggaacttatttcttctatttgaatgtatgtctctactgattaatcaacttctctcatcctcctaagcctactacacacacacacacacaatcattcccattgtttgcaattctttaagattcttgactctgcatgtttataatgttcttgcaaatatgaaaacatttcgtacattatttaatcaaatattttcactggctgcctccttgtccttgcaccctcctccaacaccagaatgccaatggtgcatacataaatatttgatatcattccaaaggccactgaaattctattcagtgtgccccgtcgccccccatcccatctattctatctgtgcttcattttgcattgtttctattgctacattaaaggtcactgatcttttttcttttcttttcgagacagggccttgctctgtcaaccaggctggaatgcagtggcacgatcacggctcactgccactccaacctccaaggctcaagtgatcctcctgcctcagcagcctcccaagtagctgagagtatagccatgcaccaccacgctcgttttgttttgtttttggagacagggtctggctctatcacccaggctggagtgcagcggtgccatctcgactcactacaacctctgcctcaagttcaggtaattctggcatctcaggctcccaagtagctgggaattacaggtgcctgccaacacgcccagctaatttttgttaatttttaacttttttgtagagatggtgtctccttatgttgcccaggctagtsttgaactcctagactcgaggaatcctcctatcctggcctcccaaagtgttggcattacatgttgggattacaagtgtcagccaccacccccagcttgatcttttcttttcccatgtctaatatcttgaaatcaccatccagtgatttcatttgtgttgttcacctctaaatgttcatttgagtcttttttatattttacatttctcttatgttaatgttttactttaaatccttgagtatactgagtatattataatcatgcccttttctgccatttccttcattctgtcattattgcatctgtttctgttgtttgctcctttaaatattctgttactggtccaaaaatatacgaactgataataacatgtccagaactcttacgtaagttcaacattcctgggacatcaatacttgtgattttctaaacaaactggaatttaaaaaaaaaaagtttcttyggcatagataatttgagaagtactgacctagacttttaggttcagggttaatatggacatattttctctatactttggttagcttcactaaccaatgtatttcatcatcttcacttcatttatctctttcaacgtttccttaaatgggtctgctcatttcagtgcctcatctaaacttatttttaatattaaggtttgaaaaaccttctggtatctgtattcttgataaaaatttttattatggctttaatatctgaatgacaacttggtgggatttaaaatctaggttctcttcaaaccttaaaaaatgctcccagcactytgggaggccaaggtgggcggatcacaaggccaggagatcgacaccatcctgactaacatggtgaaacaccgtctctactaaaaatacaaaaaattagccgggtgtggtggtggcctgtagtcccagctactcgggaggctgaggcaggagaatggcgtgaaccccggaggcggagcttgcagtgtgctgagactgcgccactgcactccagcctgggcgacagagcgagactccatctaaaaaaaaaaaaaaaaaaaaaaagctaatacattttctgcttacattcaagagttactgctgaaaaagtgtgatgccaatctaattcttcttcatttgtttgtgacttttttttttccctcatctctgcaagtctttagcattttctttatctctggcagtcttatattttaactttaacgtatgttgtgtttctttcttctctcttgactctgaactccttttaatctgaaatttctcacctctctcttttctctctcactttaattctagaaaactatcccttttatccctttaagtatttattctccacttaaaaaaaattatctcccttcttagattcctatcttctggatgtcaatacctttatttctgtatttgawagctgtcaatttttcttttatatttgctatttccttgtccttttatccccgtgaaatattctctttaatcttccaattaacaattttgttcttcaaatagatcaattctgttattcatctttttgtttgtttgcttgttttctccacgacagagtctcgctctgttgcccaggctggaatgcagtggtgctatcttggctcactgcaacctccacctccaggttcaagcaattctcctgcctcagcctcctgggtagctgggattacaggcacatgccaccacacccagctaatttttttgtagttttagtagagacagggtttcaccatgttggccaggctggtttcaaactcctgacctcaggtgatccacccgcctcagcctcccaaagcgcttggattacaggcattagccaccatgcctgactcaactaattgttatatttttagtagagatggtgtttcaccatgttggccaggctggtcttgaactcctggcttcaagtgattcgcctacctcagctttccaaagtgctgggattacaggagtgaaccaccatgcccagcatatcttacattttgtattatgtttttgatattgagtaattttttcttttagattttatttcatattatcttcctctaatatttttaatacatttattaggataattttatattcatcatttgtctaatctagtatttctactactaatggcatctgtaatccagtatattatttttctttcctttgaatgttttatttggtctgtgtgctcattttcttctaggaaaatacatttaagcaatgtatatagacgatgtcagcccacaatcactgtcagccccattgagctcaagacatacaggtggaaaatacctaaggtggaatattccaggcagcagaaaactacaatctctcatcttttctcaaaacaattccttgggaaagtagcttcactattttttcacatgttaaagcatctaaatggagactcttcttcgactattgtgataacatgaaatatatatttgttttttgtctccatttcctgacatacagcttctaaaatccttgtagatacaggcactaggagaatcttttgttctaatatttgtcctttgactcctggttcctgacaccgagctcctaaatccctaggaatttcctaggtgacagaagactcttttgttctaatgaggcaatcttggtgggcttctagatagccccaggatggtgcttgttaccaagggaaccaaccatgtgtttagagagttggaaagttcatagccccaccccagacctccagggagaggagaggggctgaaytgagttgatcaacaatggccaattatataatcaatgatgcctatgtaatgaagtctccataaaaccccctaaaaatagagtttgaatgaggttccagactggtgtacaagaacacatccacgtgccaggtgggtggcacacacaaactccacagggatgaaagttcctgttctctggacccttccagatcccatcccatgtatcttcatctggctattcatttgtatcctttaaaatattctttgtaataaatcggtaaacataataagtaaagtgtttctctgacctttgtgaattgctctagcaaactaattgaacatgagaaggagctggtctatagctgatcagtgaattttatagctgctcagtcagaagtataggtgacaacctactacttgcgattgtcatctgaagtgggaggcagtcttgtgagattgagtcctcaatcagtgggatctgacgctagctgtaggtagacagcgtgaaaaaataattcagttggaggatatccagctcatgtctgctggagatctgctaggtgtgtaagaaaataccccaacacatctggtgtcagaagtgttgtgttgagtcgacagtggaaaaaacaatttggtttggtttttcctgcatctcttaccaactatagcgtattagcactgagaactgtctgggtaagaggtagggaagcaaaagttcattttttaaatccactcagaaggaaagggcctctgcactatcctgaattgactcctcaaaatatcaaaggtctgatactttacaagtgtacgcgagttaggcacctttgcttcaaaggcgtgaagagcttcaatagttcctttcctattttttcttctgatagccaagaggatgccctctctcttgacctgggacaaagcttctctattccacacaccagttcaaaacagcctttcttccaccaacctaggggatttctcaccatttgctcagaacatttagttttcccttctaactgctgaagctgaccttgggtgaggaagccaaaagtcacacttcttgaatgtcttttaaggaatctaaaccagttcattcattgtaatgatgaaatatcttctcatctgagtatattaagaggattttcccccaaagctttcaaaacagttccttgtattttcctggctattctttttttcctacatgtttattctctctcatgttgggaaagctcttttcaaatgttgcacatgccttggttatcaatttacataaaagagaaaagaatattattaaaatgagtggatgtcagtttactgaggatctcacctaaggactctaaattttcagaatttttttcctctggaaaattcaaatttctacaaagacaaaatccccctctaaactcttagttaaaaggtatatgccaacctgcagtatattatgagcgcaagagatggaaagtgacttaggtggaagggactcagtacgatgattttaaagctgctaaattgtaaaatacaaaatgcaagaaattaagatagaatagggtttaactttttacacttatttgaactgttaaaaaattttctggccaggcacggtggctcacacctgtactcccagcactttgggaggccgaagagggagaatcacaaggtctggagttcaagaccagcctgaccaacatggtgaaaccccgtctctactaaaaatacgaaaattagtggcgcgctcctgtagtcccagctactagggaggctgaggcaggagaactgcttgaacctggaaggcagaggttgcagtgagccaagatcgcaccactggactccagcytgggcaacagagtgaraytccatctcaaaaaaaaaaaaaaaaaacttttttttttttcctaagtttgtcaaggcacagttgaggaaagaacagaatctatatcaaatgttaatattaatgtaattaatatatattgatgtatattaacaattgtttacgtatctagtcataaatacagaggcagagctgggaaaagtatttaatatatataaaaatttaacatatacatacatagatctatatatgaaaattagataatgttgaacaaaaagtagagaagagagaaaaggaaagaactgccgccttgggcaagaccaaagcagcactgggtaagagtatgcgagacagtaaagtcaacaaagctgtaatgacagctatgatggacaggtagtgctaaagctgaaacacaaggaaaagcctgttggccacaacaaattaattaagcctagaaacaacagtggtgccgggtacagtggctcacacttgtaatcctaacacttctgggaggccaaggcagacagatcacttgaggtcaggagtttgagtccatcctggccaacatggtgaaatcccacctctactaaaaatacaaaaactaggcttggtggcacgcacctggaatcccagcaactcgggagggtgaggcagaagaatcacttgacccaggaggctgaggttgcagtgagccaagatcgcgccactgtactccaccctgggtgacagagcaagactgtttcaaaaaaagaaaggggggaaagaaacagcactggtattttctgaagcacaagttataaaacaatgttatccattcaaaaaccagaagtcatactgataagagcacaataaggccaggtacataaaactaaaaaaattcaaggcatacttagatgtgatataaaatgagatggctagtacaatggcctgcgggggccatcttgtgcattctctcaatcttcaaatgtctttgtattagagttctccacaaaaacaggaccaatagagtgtgagcatatttgtgtgtgtttctctgtgtgtttgcatrtgtgtgtgtgtatacatatatatatataggctcattatctcatatgattatgaaagccaaaatcccatgatctgcagcccacaagctggagaaacaggaaagccagtggtgtgtcttggttcaagtctgaaaaatgaagaaccaggagcacccacatctgaaagcaggagacaaggatgttccagctcagaaagagccaattcatccttcgtctgcctttttttttttttttttctatgtgggcccccaaaggatggacaatatctgcccaaatggataagggtggtccttccctactcagtctactagctcaaatgctaatctcttcggaaacaccctcacagacacagtcagaaataatatcttaccaggatctgggtatcctgtggcccagtcatgcttacaacataaaatgaaccatcacagtcctcaaccaacactatctcgtatatccttaaaacagagaaaccaaggttcagaaaagttacctactgtcacaaaagtaagtaaacagctaaaccaaaaatcaaactcgtgtctatctaaatcaagagatcaaacacaaatgccaactaagattctgtggaggagataatagtacaaagttaggcccttgctccaagaaagttcctgcagacggagatcagatttatacacatcaaacaatacaaaccctgtattattctatattgactacaacttataaacaaagaagcctagaggaaagaaagattcagaattaaacagattccttcattcaatgaatgcttcttaagaacttgatatgtgacaagcactggtaaccacaaagtcaaagcagtgtgttaacaaaactcctacctatagagctcataatcctgtgtgagtgtagaaatggcaataaacaagtaaacgtgtatgtcagatggtgataagtgatttagagaaaaataagcattttcgggaagaaaagaggttccagggtggtggtttatactgggtagtcactgcatgtaagtctaatcagaaaacatttaatagaaaagacagaacttgaactaggctttcagctagattttgagttaaattgtaaattgctggagtcatgaaatccttagcttgcttcatacaaaccaaacatacatttttactgtcagctggctatctacctaaagccatcataggtggcctttattctcataaaatgacaaagatatatatagtctaattcttaatattacaaactcagatatctgattttgtaagcatactgagactagatgtcctattagggacaaacttagtaatcaagctcatagctactgatatataaaccagaatgcaaatttattactttaaaatgataattattagctgttaattagtgtagaaagcatggggattaacaaataatacaaacttttccttaggaaagctaaatcaaaatattacttgataaacacaaatgacgtaaaacaggggaatartaagcccaagaatactagaatagggtttcttctacctcagtgttttggttttttgttttgttttgttttgagacaagagtttggctctgtcacccaggatggagtgctgtgaggagatcacagctcactgcagcctcaatctccgcgctcaatcaatttttatccagttcaccctctggagtagctgagaccacaggcacacaccacccacccagctaattcctccgacagtgtttaaataagcaatgtcaatttctggctctttggacctctcttttctgtatctagagcctaaaaagaactttcttctttccttctaaactcaaaaaaggagtaaatacaactgattagatatctaattactaaattcaattacattttggtgccgtctctcaaattccttaagtatgtacttgacatccagttaacttataatataactgataaacagttaatttacccaaaaatatttcatttattctggacacagttaaacataatccttcttagaataaactayaaatctcagtgaactaccttatttccaactttttagggatcatatacttgtttccatatccctccaatgtcttaatgcatatattctatgtagatcaacatacttatatttattccatttacatattaactgctaaatccatcatagcacagttgtttttgaattataaaaaattattttaaatgacaacagcaatataatgaagacaaagatgcatatgtgagcataatatattttagtacaactaagaacatctttcacgtaatgaagtatccacatagaggaacaatgagcaacatgaataggtgacaaataagaaatgacatttgtaattgacggggaagcgtaacaatttctgagaagtgtaataacacagtgaaagccgtgtttaaagatgataaaatggccagacgcggtggctcacgcctgtaatcccagcactttggaaggccgagacaggcggatcatttgaggtcaagagttcaagaccagcccgaccaacatggtgaaaccctgtctctactcaaaatacactgtactccagctgggagacagagcgcaattccatctcaaaaataaataaataaataaataaataaataaataaataaataaawaaagataataaaatatggtaacaatttattacaatggcaagaaatcagtaatgttataagatactgcctataaagcctaacatgaaatactgaaggtccacatcagactggtggaggcggagaggtggacagacattggacactgacacattacttaaaataccaggagctgggccaggcacagtggctcacgcgtgtaatcccagcactttgggaggccgaggcaggcagattacctgaggtcaggagttcgagaccagcctgaccaacatggcgaaacctggtctctactaaaaatacaaaatcagcctagcgtggtggtgggtgcctataatctcagctaatcgggatgctgaggcaggagaattgcttgaacccaggaagcagaggttgcagtgagccgagatcgtgccattgcactccagcctgggcaacaagagtgaaactctgtctcaaaacaaaaaacaaacaaaaccaggggctgggcatggtggctcatgcctgtaatcccagcagtttgggagaccgagacaggaagattgcttgagtccaggagattgagattagcctaggcaacacagtgagaccccatctctacaaaaaatacaaaaattagcccggtgtggtggcatccacctgtagtcccagctaccgaggaggctgaggtaggagaatcgcttgagcccaggaggctgatgctacagtgagctgtgaatgcaccactgtactccagcgtgagccacagactgagacctcgcctcaaaaaaactaaaacaaaaaacaggacagcctacaatctgaaaaggggcaagtgttatgagaacacaataataataatatctggggcttaaaaatacgtttctatgtaaacatgcttcaccttcattccaatactttgcttcatcaatgtaaataagcctacacaactgtggttttatctgctgaaattcaatttctaaaagggtgaaacaaatagagaaagttacttcattgccattatatgtatatttcccccacccccaagtaaaagccttttagtgctggcagaagaataaatttgggctagatatacaccttccagttacaactaaggaagaagctcacaaaaggtaaatggacttcctaaagcacaaagttacgagaagatgtagtggaagaatccaagtttcagattttcattctgctgtcaatgcactttcaactaaattgctttttaaggatactgtatcaagggtacacagaaaaatttttttttttttgagatggagtttcgctcttgttccccaggctggagggcaatggcgcaatcttggctcactgcaacctccacctcccagattcaagcgattctcctgcctcagcctcccgagtagctaggattacagacatgcaccaccacgcccagctaattttgtatttttttagtagagacggggtttttccatgttggtcaggctggtcttgaactcctgacctcaggtgatccacttgcctcagcctcccaaagtactgggattacaggtgtgagccaccatgcccggctgaaattttttagaaaagtagtaaggctaggcgcagtggctcacgcctgcaatcccaacactttgggaggccaagccaggcggatcacctgaggtcgggagtttgaggccagcctggccaacatggcaaaactccacctctactaaaaatacaaaaattagccaggcatggtggcaaatgcctgtaatcccagctactttggaggctgaggcaggagaatcatttgaaccccgaagttggaggttacagtaagccgagattgtgccactgtacttcagcctgagcaactaaagcaaaactccatctcaaagaaaaaaaaaaagaaagaaaagaaatatataaaaatgctatccaatttagcttgtcacatatataaaaaatttgagaggattaggggaaaaagctggcaatatgttgataacctttgattttgcatatacttaaaaaagagctcccactgcaaattcattacgaattgaaatacacacatttcataaatgaggtgaataacattatatttatagacatgtgatgttttgtctgtatttccagttttactggtgagcactttatcatggctgtttcatatcagaagtaattttctgttcaaacaactgaaatttgcaacatacacatacataaatgcataaatatgggaacaactttcatctgaaactaaatgttctcccttttagactgtgtattttgagggtgtacagacatgtttttacatctttgtattccaacttaaatacctggaacatactataataaatagctaakaagtagaattacacaaaaatgtctaactcagtttaatatgtactttaactttgctaaaaagagggctgttttaatttatttgggacatttattctagttacttttattagtaagtaaatgtacgttayattttaattgtatttcacaagatctaggattacactatcatttccacagtggcagtggaacttgtgaaaacactgtattcacgcactggaaattatcttcactattaacagtaaaaaactggccaggtgccctggttcatgcctataatcccagcactttgaaaggctgaggtgggagaactgcttgagcccaggagttcaagaccagcctgggcaacatggtaaaaccccgtttctacaaaaaatacaaaaattagccaggcttggtggcatgcgcctataatcccagctactcaggagactgaggtgggagaatggcttgagcctgggaggttgaaactgtagtaagccatgatcgagccactgaactccagcctaggcaacagggagaccttatttcaaaaaaaaaaaagaaagaaagaaagaaagaaaaaaggaaattaaagactagcattcatcttctcaaaaattcctaaaaggtattttgcagactgtgaataaattttgttactcatttgtgtgataggataagctagcaacagggcctgaacaattattcagaaacttgggtgaataaacaaaactatctccatcaattgaaaaaaaaaaaaaaaggatatgaactgaaaaagtcaactgcggggccaacacaaaaacactaaaaaaaaaaaagaaaaaatcttgtcagcaacaatacactaacttgacaaatacataaaaacaaatccacatatgtatatacaaatggtctctgacttagaatggttcaactcagaattttttgactttctgacattgcaaaagcaatacacattcagtagaaatcatactttgaattctaatattttcccaagctagtgatacaccgttgatactctctttcaatgtgggttagcagcagtaagccacagctccccgtcagccacactattacaaagggtaaacaacagaaattctatagtttattgtgttgcctgatgattttgcccaactatagggtaagtgtcctgagcatgtttttttgttttgctttgttttttgagacggagtctcgctctgtcgcccaggctggatgcagtggtacaatctaggctcactgcaacctccgcctcctgggttcaagagattctcgtgtctcagcctcccgagtagctgggactacaggcatgcgccaccacgcccggctaattttttatatttttagtagagatggggtttcaccatgttggccaggctggtctcgaactcctgacctcaggtgatccacctgccctgacctcccaaagtgctgggactacaggcgtgagccaccacacccggccctaagcacgtttaaaggtaggctacactaagctatgatgtttggtaggttaagtgtactaaatgcattttcaatttagaatattttcacaacttacaatggtttttagaatttaacataagtcaaagaacatctgtacatgcttagtaagagaacacatgtaaataattctatttatgtaaaagaagaaaatggtatctttctagtttaccataatgctttaccattcatgttctacttttctaaaaaaatgaaagtattatatattcatgattttaaattttattagaatccaaaggtttattacatataaagaggcaatggcaaaaaagggagagaatcaaagacagtaagaatatatctacactttcttcctcttaatgttcacatatttaaaatattgaagttcctactctcctattatcattttttctttctcttcttaggattatttctattgtttagcctacctatatctcatttgttctgaagatacttctaccagatgttaatgatccacccccttttcacagataatattctaaaatcaaaagttaaaaccatttcttctttaacagtcctcctctttgtatttctgaaatttggcttcatcttcaatgctccactaaaatgcccagaataacacagcacttactccaaaagacttattgttcttatttttcctttctaaaataattttagaatctaatcatctcacatctctgatataaactgttcaaggtaggcattcctctaaggctctgcacagtcgattactctatgacctgtatactccccacctacttacttgacttcattatcttcaagtatcaatttcattttgaattccaaattcatagtaataatttgttttctaaaatacgtactatcaatagaaaatttccaatgctagtatctccaacatttaaaatataatatgctaaaacaaagttttttctctccttcatttcttattattctcctagactctggtttcaaacrtaacactttttgtgcatgtaatcagctcatttctgcctgagctttctactttacctcttgccctataaaaatatgtccaatcctctgttaaaactcttaaacccacttctcattacttacttttttcctatcaaatctcaattttacytacttcaatatcctcgtcctacaaaattatatgtgaaactgcacaattrgaattacatttccaatacattcgcttacatggtttttcatttgcttgccctatttttttcacttttagattatgaggttttaacttgcgatccaaagatacatttcagggaagtccacaaatccactgatagtctacacaaaactgttcgcctccatttgtttctagggtgatccagacgttttaacagaatgtcagagaagttcaacacttcaataaataaacatatatattgagccagtctcgctctgttgcccaggctggagtacagtggtgcaatctcagctcactataacctctgcttcccaggttcaagtgattctcatgcctcagcctcccaagaagctgggaccacaccacaggcatgtgccaccacgcccaactaatttttctgtatttttagtagagatggggtttcgccatactggccggcctggtttcaaactcctgaccctcaagtgatcccttgcctcagcctcccaaagtgctgggattacatacatgagccacagcacccgaccttttaacaaccaacataccacagattactgtatattcccagggtatacacatactacccatattcactacatgctcagaaagtaactgcctattcttcacttaaatattaatatgcgtatcttaaaaaccagttaacttcttgctttccacaaaagacaatagccaacatttttctaatattataccatttaccctaactaaaaaacaaaaccaaactctatattaacattgactagatgaagtctaagttaggcatgacatcagacttctaagtggacctcaaaatatgactcccacaagaaaatgcagcttatataagtaaagtaagaaaaaggttcagctggataagccaccatatgtgtcactaaatttgatgtcaattcatgatttctaggaattccccaaaatttaatatgatgcaccaactctatattgatataaccagtaagataattcagatgcagacatctcaagcaccatatcaaataatgaaaacacctaagtatcacctgtgtgatgaatactggatccttataataatggaggaatagactgtaaccttggtgccagactcagtttaactaaatcaagatggcaaagaaggcagagaaagaaatgaatgggaaagagatctagtaatagctctgtaacttaccaattgtgtgagtttaggcctcatttaaccttccaggtttctcaattacaaaacggagatatcttacatrttacttaaatgcctgataaatagtatcaatgatgataattatcaattagatttcaaaaagtaataatcatctctatgttccatttatttttataggttaaagaatcacttttcaaatgaaaggaattcaaaagaatatgctaggttgagagttacacatatttgatttttcaactagctgtatgaggtagagatttttaacttatgctgtctaggaatactgatctatcacgtgaaaggcttagattcattgtttctattatcatttccagttttaaaccattatgctaattatcagaccacaatacataccatgaataacaacccatttctcaaaaataaaaaaagcaaacctgtatattctatcagcattgtttaagcttaatttttagcaacagaaatatttcctaaaagaaaaacacagtttttataacactggcatattatttttctttataatatagtaaaatatacaaaattaatagattcttagcatttttctatctacaaatgaaaaactgttgacctttaaaaggcatgatacaaaatttttaaaacaaatcacataatacagcttcttaagaaaaacaatatccattctcctatttcttgcgtatgagaaaggcagggctgggtgtggtggctcacacttgtaatcccagcacttagggaggccaaggcaagaggagcccttgaacttaggagttggagaacagctcaggcaacagggtgcaacctcctctctacaaaaaataagaaaaattagccagccatggtggctgtggtcccaatgacttaggggactggagcaggtgaagggcttggcctacgaggttgaggctgcaacgactgcactccagcctggacaataaagtgagaccctatctcaaaaaaaagaaaaaagagagagaaagaaaggcaaaacactattactgaccataaatgtctcccaaagcatgaatctgaataaaatgttaccatcttgtggtaaactcactcactgctctgcaaaaacttctaatttaattgtaatctacatgacaattatgaggcagaaacctaggagcattgcccacataattattcttctgtaaaaaaacgaagaaaaggcttctacactatctcttcatttgagcacttaaaattgtcagagacttttacaatccttgcaaatgaaacataagggtcatttcaccttgatataatttcttagttaaattttgaatatttaaatacaatttttccagcaaaatatctgtatctatagacagttttctaaatccaaataccaaaatgaaaacacaaagcagatcaattaaaaaaaataatgtattagaatcagaggctatttggtatactgataaaaagaaagtaagtaacagaagtgattcactgcactcctaaataaccttcagagactgtactgacacaaggcttgtcacaaaatacattagatgctgacccaagaagaggtggtagacatactccattattcttcagcatgtaccactttttcagtactgttaaatgtgattagaatcacaagttttgatgaataaaggagacagaggacatggttttttctgttttcttccgaatataaatttgtgttcaattttaaatgactgatgtaactctttttacattagggaaaagacatgtaatttggatttcatttaataaatcaaatcataccaccttaatgttcattaaaatactaatgaacacagatgaatatgatctatacttctatatgtcaggaatacactacagagattttggagttttaaaaaattatctattttgttgttaaatcttgttccaccaaatactttgggaggtctaggcaggtgaatagcttgagcttaggagttcaagacccgcctgagcaacatggtgaaaccctgtctctacaaaaaattcaaaaattagccaggcgtggtggtatgtgctatagtcccagctactcgggaggctgrgttgggaagatcacctgagcccaagaggtggaggttgcagcgagctgagattgtgccaatgccccccagcctgggcaacagaatgagactgtgtcttttgagacacagactcaaactcgctctgtcacccaggttggaggggtggcgtgatctcagcttactgcaacctccacctcccgggttcaaacgactctcaggcctcagcctcccaagtagtgggactacaggtgcgcatcaccacatccggctaatttttgtattcttagtaaagacagggtttcaccatgttggccaggctgttcttgaactcctgacctcaggtgatcctcccgcctctgcctctcaaagtgctgggattacaggcgtgagccaccatgcccagccaagactctgtctttggaaaaaaaaaaaaaaaaaaaaaaaaatcttgttcctaactaaggagttccagtccttcacaaaaaagaactgacccagaaaaatggagacactacctcacaggtaataaggtcagacaaagcagtctgacaaagtgcctctgaatgttgctatcagagattgttgttccaggtcagacacagcagtctgtcaaagtgcctctgaatgttrtyatcagagaatgttgcttcaacctgaacaatgaaagctgtaagacaaacaacctggataccctgtttaaaaatggtgataatgtaggcatgggggcaaagcaatgcaaaaaaagacctctgcactaccatatgttgagaatataaagaagtgcttaatattccagttaaaaagctaaatattccatttaatattcagttaaaaagaaaattgattccaaatataattccccttaaaagttggcattttcactgcaatgtgcaatctgaaccatcatacttgtttttttgttttgttatgagacaaagtcttactctgacgcccaggctggagtgcagtggcacaatcccggctcaccgcaagctccgcctccagggttcaagccattctcctgcctcagcctcccaagtagctaggattacaggcacctgccactgcaacagctaatttctgtatttttagtacagacggggtttcaccatgttggccagactgttcttgaactcctgacatcaagtgatctgcctgcctcggcctcccgaagtgttgagattacaggcatgaaccacggcgcctggcataatattttcctaaaaaaaaaacactttggctgggcaccgtggctcacgcctgtaatcccagcactttgggaggccaacacagacagatcacctgaggtcaggagttcaagaacagcctggccaacatggtgaaaacccatctctacttaaaatacaaaaattagccaggcgaggtagcttgtgcctgtagtcccagctactcgggaggctgaggcaggagaatcacttaaacctcgcaggcggaggctgcggtgagcggagatcgcaccactgcactccagcctgagtgacagagtgagaccctgtctcaaaaaaaataagaaaaaaagaaaaaaaccacgtctatgaaacacaaatatctaataccacccttaaaattgtattaaccatgtaatctcagcactttgggaggccgaaggcaggaggatcacctgaggtcaggagttcgagaccagcctggccaacatggtgaatccccgtctcaaccaaaaatacaattagctggacatggtgggatgtgcctgtaatcccagctacttgggaggctgacgcaggagaactgcttgaacccaggaggcagaggttgcagtgggccaagattgcactactgaactccagcctgggcgacagagcaagactctgtctcaaaaaataataataaataaataaaactacttayccagatttcaatcctaataatacatttaattttccattagtttccacatcacgatccctaaagctatttcctaggatactttaaaatctatagaataaataaaaaagaagaatgagatagttaatctaaaaaacaaaggacaaatattataaagggtcagcactcaccatctgtctcaatgacatcatcaaggtgttatggctgcttggtttcacacaaatcctatattagaaaaccctgacaatccgatatcaacttgtcattttcccttatagaagaatgcaaataaacagagtgtgagccaggaaaagctaattcctaattagtgcccactgcattcaactctagccctctttttttgtttgttttttaagacagagacttgctctgttgcccctggagtgcagttgcgtgattttggctcactgcaacctccgccttctgtgttcaagcgattctcctgcctcagcctcccaagtagctgagattacaggtgcccgccaccacaatcagctaatttttgtatttttagtagagagggggtttcaccatgttggccaggctcgtctcaagctcctgacctcaggtgatccgtccaccttggcctcccaaagtgctgggattacaggtgtgagccaccatgcctggccaactctagccctcttaacttccaagttaagaaatgctttgtaaaatcatagaaactccaccattgagaccggcacgggcaccactgagactgggcacttgagaccagcctggtcaatatggtgaaaccccatgtctactgaaaatataaaaattagccgggcgtggtggcacacgcctgtagtaccagctactcgggaggctgaggcaggagaattgcttgaaactgggaggcaaaccttgcagtgagccgaggtcttgccactgtactctaacctgggtgacagagtgagcctccgtcagaaagaaagagaaggcgggggggggggagggagagagagagggaaggagaaagaagagaaaagagaagggaggagaagggaggggaagggaggggaggggaggagaggacaagaaaagaaaagaaaagaaaagaaaagaaaagaaaagaaaagaaaagaaaagaaaagaaaagaaaagaaaagaaaaagaaaagaaaaaaaatccgctattgttcctcacagtaatccactaacagtggcagtcctgttccttggggaagcctcatatagattacagattccctcattcttcctaccacttgaggaagagcaagctgatgagccagaagatgtgtgatcatgctctcatgcccttttctcccagaggtaaggtatatttagtgacattctgttgttattactatagtaagaaatctcttcgcaaagtatttgataatttaaaattgtaaactaaaaccacttcatattcattgtcttaatcaccataagaatctcaagatgaagatgtggcaagtaaaactataagaggttaaataacatacaagctcataatcttcataaagaaagctgagagtaaaacccatgtcagctgaccactaacccaagttttcttttcacagcggtaaaagaccaacataaataaacagaaatactatttctaaagagtttatctggagctctttagagtaaatctgaatatcatcagttttaagagacagagtctcactttgtcactcaggctggagtgcactggtgcaatcagatctcactgcagcctcaagctcctgggctcaagccatcctcctgcctcagcctcccaagtagctgggactacaaatgtgcaccaccatgcccagcttatttaaaaaattcttataagatggagtttcaccatgttgcccaggttgctcttgaactcttagcctcaagaaattattccatctcagcctcccaaagtactgggattacaggcatgagccaccattctcagcccttgatttggatcttaatgatttgttttgttgttgttgcctggctgtttttgaaacttttcagataaaatttaagtaggcaccrctaagatagacctagatatagtggcatcatttcaaggaagcttaagggctgactacacatgctacattagccactacaaactttaaacattttgaataatcaaatatctttctgctccttagatttttttttttttttttttttttttgagatagagtttcgctcttgttacccagacttgagtgcaatggtgcaatctcagctcaccgcaacctctgcctcctgggttcaagcgatcctcctacctcagcctcccaagtagctgggattacaggcatgtgccaccatgcccagttaactttctgtttttagtagagacagggtttactccatgttggtctggctggtcttgaactctcaacctcaggtgatccacccgcctcagcctcccaaagtgctgggattacaggtgtcgtgagccactgcacccagcctttagtttaattcttcatcttgtgtagtatgaaagattattgtttcactttatgaagatgtgagaatgagcaaatatgttttcttcatcccaagaggccccttgtttatggtaaaaaaacaaaaaatatatttctattaccattctacaagctggtagataccactttaccacctgcctaacagatctagccagcccaacagggagaagatggtactgtatacaccaatgtaaaggagcaaaataagagattcactgaagagacttgctgcactaaggcaaatacagacatcttaggaaacagtgctgtaagcaattatatactagctatatcctgtatttttctttaaaccatttctcattcttagacataagatcaagaaaagtgagggtgacaaaaaaaatagagcttcaactaaaccttgaaaaaataacacttgcatatacacggtatgagaaaatggtggaggaatgaacaaaacacattgcaggctgagataatgactagagtagatgcaaaaacaagaaatacattaagtatataggttgaggccaggtgtgctggctcacgcctgtaataccagcactttcagaggcagggatgggaggatcccttgagtcagggagttcaagaccagcctgggcaacatagtgagaccaccatctctaatttaaaaaaaaaaattaaatgtaggccaggcgcagtggctcacgcctataatcccagcactttgggaggtcaaggcaggtggatcacttgaggtcaggagtttaagaccagcctggacaacatagtgaaaccacgtctctactaaaaatacaaaaattagccggatgtggtctcacaaacattttgtaccagtagctcaggttcactgcggagaagctggactgaatgatgactgcaagatttttttactccttgacaactgttctaattatccttcagctgaaattctcattacaggcatgcacctgtagtccctgtagtcccagctacttgagaggctgaggcaggagaaatgcttgaacccaggaggcggaggttgcagtgagctgagatagcgccactgcactccagcctgggtgacagagtgagacttcatttcataaataaataaataataagtaaattacacatatataggttgggcatccctaatctgaaaatctgatgtctgagcaccaaaatgacaccacatgtgggaatttccacacctgacctcatgtgacaattcacagacaaaatgcaggcatacaaacacacagtttattcagcaaccctgagggaaaaaaagaccctctcagccccctttagctgcaatatatcttttctgaatacgcccagattaccccacacatgtgtgcacataaagttggccaaaatggcacatacacaggcaggacatgacaatggcaggctccacatggagccaagacctatgtgcattgctcactgtgtgtgtgtggttttttgtttttttacttattctctgctctgtggtgtaaagatactattgaaaatgtcaaaaagtccttcagatattcctacgggtaacggttattaaaaagagagaaggcatttatgtttatatcacagaaagtcaagttgttagagaaactggacagcagtgtaactgtaacatgtcttacaaaacagtatggtgctggcatgaccaccatatattaatataacgtgaagaaacaaaaggataggccaggcgcagtggctcacccctgtaatcccagcactttgggaggccaaggcaggtggatcatctgaggtcaggagtttgagactagcctggccaacatggtgaagctccatctctactaaaaatacaaaaattggctgggcgtggtggcaggcacctgaaatcccagctacttgggaggctgaggcaggagaatcgcttgaacccaggagatggaggttgcagtgagttgaaatcgcgccactgcactccagcctgggcgaaaagagcaagactccatcttaaaaaaaaagtagaagaaacaaaagacagttagttacatgctgaaattcataaacagaagttagtgagaaatgctgtacaaagctaaaaatgaagatttcaactgtgtattaaaagaatgaatccaacagtgtcacagtgaacaaatgccacttaatggtattctgatcatgacacaagcaaatatccatccggatgagctgaaaaactgaagggaactataaatactcaataggtgggttgcacaaatttatgaaaaggcacagcattgcatttttaaaggtttatggtgataaagcatctgctgatcatgaagcagtagagaaattcattgacaaatttgccaaggtcattgcttatgaaaatctgacgccagaacaaatctataatactgatgaaacatcaatgttgtggcgttactgccctagaaagacactgactacagctgatgagacagcctctacaggcattaaggatgccaaggacagaataactgtgttggsatacgttaatacaatatgcatacataaatgtacacttcctatgacaggcaaaaacttgtgtcctccctgttttcgaggagtgaatttcttaccagcccatattaagctaatgaaaaggaatgggacatcttttttgaatggtttcacaaacattctctaccagtagctcatgttcactgcagagaagctggacagaatgatgactgcaagattttcttattccttcaactgttctaattatccttcagctgaaattctcattaaaaataatgttcgtgtcatgtactttcccccaaatgtgacttcattaattcagccatgcgaccagggtatctttagatcaataacgagtaaatattaacacacgttcttgaacgacatgctaacagcagtaaaacagaactgtaggtgtggaaggttttcaaaaaaggtgaagatgccacatacgctgttgccaacgctttggacacagttactaatgatgcagttatgtgtgcctgtaactatattcagtgatgatggtgaacaaatggtgacttgtaactatattcagtgatgatggtgaacaaatggtgactttgaagaattctgtatgtcaagtgagaaaaaagtttccaaccttcttacatatgcaaaacaaattccatcactgtccatcagtaagctaaaggaagtagataacgaagacgactttgacactgataatgatattccaattgttcattcattaaccaatagtgaaatagccaaaatggttctgagtcaaagtgattataataagtgacaatgaagatgacattgttaaacactgcaggaaaaagtgcctatgcatgacatggtaaaaatgtgtgatgggcttactgaaggactaaagcattgtgcattcataacagaacaagaaatcatgtcagtttataaaatcaaagagagacctctaagacaaaaaccattgttaatgaggcagatgacactggggaaaacattttaaaaagccatctagcagaatacctcctcatcactagaggacccacttcctggtcctcaaatgcttctaagctttcttctcacctaaaagaaatacaatgtacagtaaccttttaatcaaaacacagcatcagaggtggagactgaaagcctgttgtctgttcttgctgttaatatctgatacaggtattctggtaatgctactgtgctgattagttacagtgaacacattatttcttcactgtactaatgatatttcatatttttactgttcagtagttttgtgtgaataaatataagaaaatgattacttatcaatagcatataatttcagattcaaaaatggtgataaccatgactgtccacatgggtggctgcaatagtgataattttgctttctaatgtacacaactttgtttaatgcacaccattatttaaaatattatttaaaattaccttcaggttatgtatataaggtgtatacaaaatataaacaaattttgtgtttagacttgggtcacctccccaagatatctcaagtatatgaaaatattctaaaacctgaaaaaatccaaaatccaaaacacttccagccccaagcattgtggataaggatactcaacctgcattaaaaaaataactgattttggccaggcacagtggctcgcgtctgcaatcccagaactttgggaggccaagataggcagaccgcttgagctcaggaattaaagaccagcctggacaacatggcgaaaccctgtctctacaaaaaatttttttaaaaattggctgggcatggtggcacacacctgtagtcccagctcctcgggaggctgaggcaggagaattgcttgagcccagaaagtggaggacacagtgagccaagatcataccattacatttcagcctgggtgacaagagtgaaactccatctcaaaaaaaaaacaaaaaaaaaaacagattttaatgtatgctaacacatggactaatgaagtacatatagcctaggttggctggtgacttcatttgtttttctggtatcattaataaagcacatacacatacagacaatatatacataaaaagattttgttaatatatataccttacatcgctgcttctactctaatcatcttagcttgaatgtaaaatgtgaaactaaagtacagtcatatgctgaataatgacatttcagtcaacaacggaccacatatgaaggcagtgccataaaattacaatggagctgaaaaattcctatctggtgacactgcacagccattataacactgtactgcaattatttttaaaaaaaattaatttagtgggccaggcgtaatggctcacaactataatcccataactttgggaggctgaggtgggtagatcactggagctcagcagttcaagaccggcctgggtaatgtggcaaaaccctatctctacaaaaattacaaaaattagccaggtgtggtggtgtgtgcctgtactcccagctacttgggaggctgaggtgggaggatcacttgggcctgggaggtcaagcatgcagtgagccaagacagcaacactacactccagcccgggcagcagatagagaccctgtctcaagaaacaaaaccaaacaaaacaaatataggatagcctaggtatacagcatttataaagtctacggtagtgtacagtaacattctaggccttcacattctcttcccactcattcactgacatgcctacagcaacttccagtcttgcaagctccattcatggtaagtaacctgtatagtatttcctttaccttttatatcatatttttttgtaccttttctatgtttagatacacaaaaacttaccattgtgttacaattgcctaaaatattcagtacagtaacatgctacacaggtttgtagcctcagaacaacaggccataccatatagcctaagtatatagtaggcaaaccatcttggtttgtgtaagaacactctgtggtgtttacacagcaaagaaatcacctaaggacacatttctcagaatgtatcccctccattaagtgatgcatggctattcgtaaaagagaactgaaaaaaacctttgtgatcacagcaatgagttcttaggtatgacaccaaaatctgacccatgaaagaaataaaaacataaacttcatgataattaagatcttttgctacagactggtagaaggccatgtatctgaaagaggacatacattcaaagttgaaaagaaaccattacaacttaaaaataagaaaaacaacaaaaaatgatttaaacaagcatgtctccaaaaaraaaatagacggtaaaaaagttcaccaatagtattcaatacctattaccacaaggggaaaaaaaattaaatcaatgctgtaccactacatatctaacagtatgcctataaaaaataaaagtcaaccctagtaataccaagttctggtgaggatgcagatcaactggaactctcaaacatttcaagtgggaattaaacatagtacagctactctggaaaatagtttggcagctgctatttataaaattaaatatattcttaccatacaatccagcaatacccctcctagatatctgcccaaataaaataaaaatgtatgttcacacaaaaatctgtatatgtatgtttttaggagcatgattcaaaatcactcaaaagtagaatgggtatctgttrgcgggtgaatggataatctaactgtggtatatccatacaacagaatactcattaataaaaggaacaaactggctgggtgcagtggctaacgcctgtaatcccaatactttgtgaggccgaggtgggcggatcacctgaggtcaggagttcaagaccagcctggccaacatggtgaaaccctgtctctactaaagatacaaaaattagccgggcgtggtggcaggcacctgtaatcccagctactcgggaagctaaggaaggagaatcgcttgaacccaggaggcgggaggttgcagtgagccaagattgtgccattgcactgcagcctggggaacaagagtgagactttgtctcaaaaaaaaaaaaaaaaacaaaaaaaaggaacaaactaccaatctatggaacagcataaatgaatctcaaaattaatgaatgaaagaaagaagccagctttgaaaggttatatactttatcattacatttatacaatgatctgaaaaatgcagaaactagccagaggttaggagtagggagacaactacaagggggcagcacaggaaaatttttaaggtaagagaactattttgtatcttgattgtggcagtggttacctgagtctatgaatttgcccaaactcaaaaaattgtacatggtaaaataaatgaattttagtgtacacacatttttataaaaccagtaatttttttttccagaaatcatactcaagtactaagtaaagcacggtctttaactcagtactaattaaaggagacagggaaaaaggtacatacggaataaaaggaaacagacccaactcttaaccgtggttaactttaaaaaaaattaaagatgatttattttactccttacgactttctgtgtttttcacaaatcatgcagcagatatttttaaatcttataatcagtaaatggggtctcactatcttgcccaggctggaatgcagtggtgcaattatagaacactacagccttgaactcctggcctcaagagattctcctaacttagtcacccaagtagctgggactacagctgtgtgctactctgcccactgggaaatgaatcatttttttaaagtgtgattagatactacaagatacagagatttctctgagtagctgagaagcaactaaaataaagccatgaaaaggggaaacataagataaatgaagaggaggctctaaagcctatgagtgacactagttttgttaaatcaaaatctggcctgaaacagccctaaagcatacttgggttcttatgtatgaactgcaacctaacttattaggtaagcaaattctcacttagcaatatgcttctgtaacaatagctaaatctcagccaaccacagcagccatacttcaaccactcatgaataaccaactgttcaaaccatgttcattttgccaaataaagcaaataaactataaccaattcacttctgtacctcatatttccattttctatacatcacttttctttttctgtccgtaaattctctaagaccatgcagcagtaccacagcctctctgaatctgctctaagggctacccaatttgtgaatcatttttccttgctcagttaaattgtaaaatttgtctgaaagtttttcttttaacagtctattggtctatctacttkgctactatttttaagagacttatcgtatcattcagtgtcataccataatttagcgcaactaaaatatcattttaaaaggcagttttaaagttcatctgctaatgagtaatacagttttgggaaaaagtgaaagtcctaaaatttcaggacttaggtccccctacacccccggccctccatgatacatattttcacaccaaaagtaaagttggcccctcagggatgacatttttaatgagcttttactattctgcagtatagaacaaatgaaaagaatttttttttttttttttttttgagacagagtctcactctgtcacccaggctggagtagtgtcatgatctcagctcactgcaacctccacctcccaagttcaaggaattctcctgtctcagcctcccaagtagctaagattacaggtacctgccaccatgcttggctaatttttgtatttttgtcaactccaactttatgcctccttgtaaaaatttttcaataaagaaattacgggccgggtgtggtggctcacgcctgtaatcccagcactttgggaggccgacgcgggtggatcacgaggtcaggagttccagaccagcctgcccagcatggtgaaaccccgactctaataaaaagacaaaaaaaattagccaggcatggtggcgcacgcctgtagtcccagctacttgggaggctgaggcaggagaattgttgaacccagcaggtggaagttgcagtgagccaagactgcgccactgcactccagcttgggcaacagagcgagagtccatctcaaaaaaaaaaaaaaagaaagaaaagaaaaagaaaaaaagaaattacagggcaggcgtagtggctcatgcctgtaatcccagcactttgggaggctgagatgggtagatcacctgagatcaggagttcaagaccagcttggccaacgtggtgaaacgcccccaccctactaaaaatacaaaaatcagccaggcgtggtgtgggcacctgtaatcccagctactccggcggcggaggcaggagaatctcttcaacccagggggtggaagttgcagtgagctgagattgcaccactgccctccagcctaggcaacagagcaagactccatctcaaaacaagagaaattaccgctgggtgcaatagatcatgcctataatcccagcattttggaaggctaaggcaggcagatcacttgaggtcaggagttcgagatcagcctggacaacatggtgaaatccacctccacttactaaaaatacaaaaattagccaggtgtggtggcgcatgcttgcaatcccagctacttggtgggaggatcgcttgaaaccaggaggcagaggttgcagtgagctgggatcgcgccattgtactccagcctgggggacagagcgagacttcatctcaaaaaaaaaaaaaaaggcattcaaatgtcatcaagacatcaaaaagtcctggcatttgaccagggcagatatcttaagcaggtatcactgagtcaactctgagaattgataaagtcatctctccaatccatgagactatgaagatatactggctatctgaactaaaactggctctcagtttacaccatsactaacaagaaagctttacataatccagagatatgattcatttctacaaatagtttacttggttaaatataatgacattgggtcaggatagcttaatcctaggtctgccattcacaaacagtaaatccatatgcaggtcgcctatctcatgagtcaagtcaccttatctgcaaaatggagataataaggatgttgtgaagattcaggatgttgtgataaattcatacaaaggtgactgatactgtttggatgtctgtcctctccaaatctcatattgaaatttgatccccattgttagaggtggggtctaattggaggtgtttgggtcatggggacgtatcctttgaatggcttggtgtccttttcaagataatgggtgagttctcactctattagttcccaggaaaactgatcactaaagagagtctgggcggtggctcatgcctgtaatcccagcactttgggaggccaaggcgggtggatcacctcaggtcaggagtttgggatcagcctggccaacatggtgaaaccccgtctctactaaaaatacaaaaattagccaggcgtggtggcaggtgcctgtaatcctagctacttgggaggcagaggcaggagaatcacttgaatccagaagtcagaggttgcagtgagctgagatcacgccattgcacttcagcctgggtgacagagtgagactctgtctcaaaaaaaaaaaaaaaaaaaaaaaaaagccttccctctccctatgtgatgcctgccctcctttgccttccactataaaaggaagctccccaaagccctcaccagaagcagatgttggcatcatgcttcttctacagtctgcacaaccatgagccaaaaaaacttcttttctttataaattacccagtctcaggtattccttttacaacaatgccaagtggactaagacagtgtttttacacaatgcctggtatggagcaaaagtctgttaacagaagttatcgataccagttttgcgttctcatacactctgtgtcaatgatgttcaagatattgtgctctagcacttggggagaagaaagtaaaaaatataaataagacataatcaatccctgtcctcaaagtgcttatagaatagtaggatagccaggcatgtattagcaataactgtatctcaaggcctcatgtaaatgttgaaactttttataaaaagcattagacttacaaagaggagtctctgattgcaaccaatggaatccttgaaatgcgggaactatatgagttaccctggatttttagagatttaattagcagaaataggtgaaaaggcttcataggtgggggaaaagtatgaataaaagaakggacatgtaaaaacacctagtattttccagaagcgctamacagttaggtatagataaaatacagaattgaggaaaatagtgatgaattttgtaatactgtaaattcactaaaagaataattgacagatacctgacattacagattgataactggtaaagagtatctacataaattttttaaaactttagggtttttaaaaactcttgacattctgccccatcctgaaagcttgtaactaaaaagtaaagcacttattacttctatatgacaagcatcctacgatgtcataaaaatttatacctataaaagaagacaaaaagaataagattttaatatattattcacataaaatgattttctcacttctctatcaatggaatctcacaaccaaatacttttctgtaacatccttattayctccattttgcagaaaaggtgacctgactcatgagataagtgacttgtgtgtgggkttattgtttgtgagtggcagatgtaggaaaagctattctcacccaatatcattagatacatacyaaagggtttatgttttttcagatttttaaaatccttacctgattgatctattgtcatgataatcatactgccaattttattgctgattaaataccaactactgttcgaaataacttttttcatttttcaaagtcaaataacttttgcatagtaatagtgccaagaaatactatgaattcgttgaaggattttatataggtaaacacatttaaaactcacaacattactatgaagttggtattattgttttctcctttgtagagatatgaaaatagaattacagagggagttaagcagtcacccataattaaacagctagtgagctgcagaaccaactttttttttttttttttgagacggagtctcactctgtcacccaggctggagtgcagtggtgcaatctcagctcactgcaagctctgcctcccggtttcatgccattctcctgcctcagcctcctgagtagctaggactacaggcgcccgccaccgtgcccagctaatttttttgtatttgtttagtagagacggggtttcaccatgttagccaggatggtctcgatctcctgacctcaagatccgcccaccttggcctcccaaagtgctgggattacaggcgtgagccaccgcacccggcccaaaatttttatatacattaaatatttctcccaactctggtgctgtatttatgactagatatgtaagcaatcatatttaatatacatctatatatattacattaacatttgatatagattctgttcttctctgaactgtgccttaacaaacagaaatttttcttttttttttttttttgagatggagtctcgctctatcacccaggctggaatgcagtggtgagatctcggcccactgcaacctctgcctcccaggttccagcaattctcctgcctcagcctcctgaggagctgggattacaagcgcctgccaccacgcccagctaattttggtatttatagtggtatttatatttggtattattcacaatgttggccaggctggtcttgaactcctgacctcaggtgatccagccacctcggcctcccaaagtgctgggattagaggtgtgagccactgcacccagcctataaccattaatactataaccaatcataatctaacgtgaataattccaatatatgtattaaatttgtataaaacaagtttgaggtctattataattcctagacaacattaatttcatttacttcaaaactgggtcgtatgaaaaaagctggaatggtatatagacttttcttcttttaccctgagagcatttgctgaatggggacaaacaaaatcaagtttatagagccttgtggggaaacaaaaatagaacataaaatcaccctctgttcatgcaaagaagactaacaagagacctacaaagggctaactactcattgggataacagagtaccagaagtaaacctaccctaattctttttaccttcacaggtctgcaaggaaagctaggttagcaccgagcaaatacggcttaaaaaaaaatccttgaatgccgtaaccacaaaccagtcccagtatgaattcattcacatcattttagtgatacaaaaaacttcaagctttcaatttaatgtagtccaaggccatcagtgccatctccccagatatacagcagacacaacagcaaatcctctctagagaaacctacctccattctagacctaaatcattctcaaaaatctcccctaaccatctcatcctagtaaggaggggcgagaataaaaaaatatacacaaggaaacaaggtcacatgactgagaaccaatgaagacagaaaacaaaaaaattttagacataggaattagcagatacagattaacacagactaacttgaggtactttgtgtttaacgaaataaaggtaagtttagaaatacgtttagaaacaaattaaatgagcaagtaaaattgaaaaagaactacacagagcttctaaaaataaaagactaatagacatattttcaaaaagcaatgaattgataaaagtttattagataccaataaaaaggataagtaaactggaagtctggccagccatggtagctcacgcctgtaatctcacccctttgggaggccgaggcaggtggatcacttgaggccaggagttaaaaaccagcatggccaaaatggtgaaaccccatctctactaaaaatacaaaaattagctgggcgtgatgacatgcatctataattccagctactcaggaggctgaggcatgagaaccacttgaacccaggaggtggagtttgcagtgggccaagatagagccactgcactccagcttgggtgatggagtgagactctgtctcaaaaaaaaaaaaaaaaaaaaaatttaaactggaagtcaagtcagaggaaatacagcacagaggcaaagcaataaaacagtaaaaataatatacagttgaccgctgaacaagagaggtttgaaatgcataggtatgcgtagtttttaatagaacatggatcaaaaatacagtgttcatgggatgtgaaacctgtgtatacagagggctgactttttatgagtgtgttctacggggccaacttcaggacttgagtatgtgtggaatttggtaaaagtaggctggtggtcctagaatgctattcggagttccactaatggaggaatggtattgttcacaacactgaacaaaaccaatcctgacgactgtattcatgggacatacagtctacgaggagagactgatggtcatcaaacaacataaaatatattacatttcatgtgtgataaatgaagttasgaaaatttattaagtactttcctcaatcaagaccatgggtgtagacagccctttcatgaagacataaagtaatatctgaactatgagtcaagttaactaggaaaactttctaggcagagagaacagtatatgcaatagaactaggcagaagaaaatacagtatttttttgtaagaactcaaagaaacttacagcaataaattgtgaataagatttgggaaggggtcacggtaatgatggtggttcataaggctacaaagggaagaccatgcaagtcttataaatgaatatatttggtctatctactactaatgtgaagatgctaacagattttatgcaaagcaggtgaaacggtagatttttatttggaaatatattcacaataattgactgcttcctttgggaaccacaggtactttgggaatcttttttgttttttggttgagacagtctcactctatcacccaggctggagtgcagtggcgtgatctcggctcactgcaacctcttcctcccaagttcaagtgrttctcctgcctcagcctccggagtagctgagattacaggcgcgcaccaccacgcccagttatttttagtagagatggggtttaaccatattggccaggctggtctcgaactcctggcctcaagtgatctgcccgcctcagcctcccaagcgctgggattacaggtgtgagccaccatgcttggccaagggaatccttgtttaaatttattactgaggctttttttgtctgtttgtttttgagatggagtctcgcttggtagccaggctggagtgcagtggtgccatctcagctcactgcaacctccgcctcccaggttcaagcaattcttctgcctcagcctcctgggtagctggaactacaggcacacaccaccacacccagctaatttttgcatttttagtaaagacggggtttcaccatgttggccaggatggtcttgatctgttgacttcatgatctgcccgccttggcctcccaaagtgctgggattacaggcatgagccactgcgcctggccctgagttggtatttgtatagtaatccagcatttaactgcaaaggttaagtacaatataaatagtaatccacaacttcaacaaattaaaaaggtgatcatgaatcaattgtccccacaattaacaactctcttatcactaagagaagggtagtcactagtttttaatctaatgaaattgtatatttttcttaacctaaaattattcatttttattgtttgaacatattgcctatttaatttttaagtttatgaatgtactgtattatttactgtgtctaagtagctgaatttatcttattaatcatttcttcattttaaccaatttttcatattttttatttgtgtagctctctggatttaacaatcttatccttttttatttattacaactgagatgagcatgctaaacttatttttacataaacttgtatattttactttttctctagttttaaaaataccttttctattttaatcatcttttatatttacttttttattattcagagtattttctacctaaattttctactgcttttgtttttctgtttatatttattttaaaaattttaatatatctgaattaaaaatagacagcagctgcgtgtggtggctcatgcctgtaatcccagaactttgggaggttggggcaggtggattgcttgagctcaggaattcaagaacagcatgggcaacatggtgagaycccatatctactttaacaaaaaaaaaaaaaaaaaaagtcaggcatggtggtgtgcacctgtggtcccagctacttgggaggctgaggtgggaggatcactgaagcctagggagtggaagttgcagtgagccaagactgcactactgcactccagcctgggtgacacagtgacatcctgtgtcaggaaaagaataaacaaataaataaagatggctttcagcacaatgctgagtaagatagagatttttgtcttagaaaaaaaaaagcaagtgattctctaatctctctcacttgtgctgccatgttccaacttatctacttttttttaaacattttgaaataatcacagattcataagaaattgcattaaaaaacaaaatcagggaggcccctgaggacccatcacctggtttcaagatgttatgcaaaggtcacatcttgcatagttacagtataatttcaaaaccaagaaactgacattaagtacaaaccacaaagcttatttccatttcaccagttttacatatactcatttgtgtgcatatgtgtgcrcatggctgtgcagttctatgcaattttgtaatgtgcagattcatttaacatcatgaccacaaccataacagagaattgttccatcatcacaaggatccctattgccttcatttataaaactcttgaaacagagcctaaatttatttacatgagacagaccagaaagctactcttggaagagaaaaaattgagcagtatgtgaaagagggaacaacagtaaaaagctgaggagttggaaaagagaacttttccagtgacagctgtgtgagagttgttcttggttggaaagaaagatatgcaaagatgattttgtagaagttttattctatgatgttttccctagttacttattaaaaaaaaaaaggtaatgtgtgctcakgtgcatttatcttagatcatatacaataatgagatgggcgcccagtgagaaagcaagcaggtccaactttatttggactacacaataatgaggtttcaaggctagctgatttaaagcccaaagaaaccacaatcgagctgaaatagcaggctactgcatcactatttctctaaaataaattcatcttgtgttccaaaattactcatatgttcttcaaataaattatatttaaatgaggacttcttgtagtccaatgwgaggaaaaattaagcataaagaccaattatattacatgaaaaattaaaagatagtgttagggttacacaatctacatagcagcatatggcagtgctacattacagtaacaaaagggattgtaaaagatttaatccagactcatatgtaacacaactacctacatattactgaccaataactacttcatctactacaaagtagaagacaaactttacctacaaacacaacgttatgtctgaatactagatattttctggcattactcactaaaaagtgggagatacagacacatgaaatacaaatatttctaaatctgtaatgatttcttcatcatcaaagaaaggacctccttccttcactctgaaaatgaattactttgagctagtttactccagaccctcactgaagaacaaaaaagacctgagaaagcattctttgattccttgaaatccctagtggaccggaccctcaaggttagcacaagcaccttcgggcttaccagatttaggagatattacaatggtttggactgttatttttcattgttcatccatctgcctttcaactttacaatcataagatatcaaaattgcatttcattcacaaggctgtatatgtatataagttctctatttagtttaaaacaacacttttggtaaatatttatgtttacccagaaagaaggaagcaaagtgaggcagggagtaggaagggaaggcaagtctgagaacatgtaacaatctgttagctaaggatacccctgggaaatacaggaagagaaagagagaacattttcacttttaactttatactattcacaactattcaaacttcaatatacagttgattctgactttagcaagttaattaactaccctatgcctgtttattcatctataaacaagaataatagtgtctacctcaaaagaataatgtaaaacactgagaaaaatatctggaacttggtatgccttcaaaaatgaactagtaataatatattactgacattatatctttttttttttaatggactctcactctgtcgccaggctggagtgcagtggcgcgacctcagctcaccgcaacctctgcctcctgggttccagtgattctcctgcctcagcctccccagtagctgggactatagatgcgtgccaccacgcccatctattttttctatttttagtagagatgggatttcaccatgttggccaggaatagtctcaatctcttgacctcatggtcacacaaatatattttttcaaatggtaaattcagatgtgtttgtttatttgagacagagtctcgctctgttgcccaggctggagtgcaatggcacaatactggctcacagcaacctacgcctcccaggttcaagcgattctcctgactcagcttcctcagtagctgggattacaggtgtgcgccaccacacctggttaatttttgtatttttagtagagacggggtttcaccatgctggccaggctagtctcgaactcccgacctcaggtgatctacccgcctctgcctcccaacgtgctgggattacaggtatgagccaccaagcccggcataaatgtgctttaaaagagtatcaaaagatatttgtatttatttttcataaaactcttcacaattgcagttacctatttgtgtcagacggcagagattcacagtatctacataatgcttagccaacagtaagtattcaaatatatttattgaatgaatgaaattatctcccaacacagataggatgctgtgtttaaaatgtcaaaagacacagacagacagacacacacacacacacacacacacacacacacacagagacaaactccttacataaaaaagcaagcacttttagtacccaaaacagacttcccctgccagcccccaagaactaaataaaaaaaaaaaaacctctcaaattagaacacatgtagacgtggcaactgtatttctggacaggagaaaaatggaatcaacacccttcatatttaaatggcttgctgttcttggctgttttgaattacaataatgaaaaagtgaaaatcccaagtaattccaagtataacaaaagagatgaatagatataggaaatacttataatggaaaggtcaaggaatcaagaaatgattccaaactatcatctattttaggatacgaaaattttttcacagattataaccaaataaaactcactatggcttaagaaataggcaaaaccagaaaagttctacaacatcatagaaatcctgagaaatctaaacattctgttaaattctagtaaatggcaactaattgtcatgtttggataaaacaatgaaatatgacataacaatttaagaaatggggtaaaaaaaaaaaatctgaagatagatacggtggtgtgtacctgtcrtcccagctactcacaaggcagaggccaggagttctagtccagcctgggcaatatagcaagatcctgtctctttaatacgatataattaagatatatcatatattagggttagaataggggaaaaacggaaaaaagaaaaaattatgaaaactcagtaatatggtttttattaggatttagatcctaataaaatcacaacaaaaacaagattttaaaacagaaaaaaagctgtataaaagtttgaacatatggcagtagaagagtggggtggggtccccaggtaagtttcaacgttaatagaagagaatgcaatacctccataacccaggggctgttaaaggcagtctggaaaggcggccagttaaaactatctagttcaaaatactaccttaagttctacaacatacattcacatttaaaacagttttgattagtaacgatcagattgtatcttgtggaccctccgaaaatgaagatgacagaaaatctaaccatgttggaccttcaaaataatgacctccttcaatttccaccgaagcatggtaattgtgtgaatttaagaatattactaccagatagaaatccatttcatattctttgagcagccatactaatgaaaggaacacctgttatactagaatatttgagaacctaaattcccatttaaattggagttgtttcataatcctagtaatgttaattcttagaaagtaacattttgttttagtatcatcttagagattgctattataatttctcactattacctagccattggtataactggcctgggccatattcatggctaccaccatttctacattcacaactatttaacatttttctaagctgttgtgcacatttatcatggtaataaccacatattatgttcatacatttgttctggacgttttacagagaatttatcctactaactttcattttcttaaaacacagcagtttcttcaaaagttaatttttgaaaatgtgatctaatatttttataatgacaaaacatttttgtagaactggttttatttcccttgtttctttctgcattccacataatgtgaccaatttacctgaatatgactatccaatttctaacttcttattacataaaaaattgaattttaatgaatacttttcattacccatgataggaattttgtggtctcagtacaagttttaactttgttttaatctagttgaaatgtttcttttctagctattgagttggtcgtttcctcctgtttcatgaaatcattttatcagagttactaatgtcacagaaatgctaatcaaaatatagttattgaagaaagtactgaaagttgttataactgctcttacaatttagaatttaaactcttttttaaggatggcttggtattgtttccatatggtaacccggtacttttagattcaagagaattaaaaagattggatctgcatattttcctatcagtcagtgtagcatttaaaaataccttttgttccttaaaaaaaaggtatggaagaccttatcttttctaaagatagcagacagaaaacaataaggaataccacagagaaatcttaaaatagggagcagaatggcttgtgtctgtaatcccagctacttgagaggctgaggcaggagaatcaatagaggccaacagttgaagaccagtttgggaaacatagcaagatcccccatctcttaaaaaaattaaagaaaaagatttgccaggcatggtggtggtgcattcttagaagaatgatcctctcacctcagcctccccagtagcccgctaagtcacagctacttgggaggctgaggtagaagcatcacttgagccaaggagtttgaggtaataaggagctataatcatgccactgcatttcagcctgagtgacagtgagaccctgtctccgaataaaagaaatgaaatcttaaaatgtactttgtttaaacatgtattaagcaggtattatatacctaatctactctgtggatatgttttaatccaaccttgtaagtcttatttccagcaccttaattttaaaacttggcttgcaatcttggtaagactaaacttgcagtcatgcagtaatttcctaaaaggatatttgacaataggtatgtttaatttaatgaaaatccaacacaaacatttttgttcataccaaaatgattagaaatcactaattagaattcttaccagataggcaggtagacagtttttggataatgatggcatgcttatattataaaaaaattactgttaataaagataaatattacataccacaaaagttacatgtttcaaatatatttaaacctgattttaaaagtatagtttctttttttatttttgagacagagtctcactctgtcacctaggctagagcacagtggtgagatcttggctcacagcaacctctgcctcctgggatcaagcgattctcctgcctcagcctcccaggtagctgggattacatgcgtgagccaccgagcccggcctaaaaagtatagtttccattaaatactttcaattgttttccattatcttcgtcattacaaatgaacagtttcaaatattaactttggctggtagcttaaaactacaatttttaaatttatttttgaataactaaattttctaattttaaacttaagtgagttattttaatgttttaagaaataaataactaggccaggtgcagtatctcacatctgtaatcccggcactttgggaggacaagctgggcacatyacctgaggtcaggagttcgagaccagcctggccaacatggcgaaaccctgtctctactaaaaatacaaaaattagccagacatggtggcgcatgcccgtaatcccagctacttgggaggctgaggcagaagaatcatttgaacccaggaggcggaggttgcagtgagctgagattgcgccattgcactccagtctggacaaaaagagcaagactccgtctcaataaataagtaagtacataaacaaatgaacaacttgatacttgtatacctagaacttggtatacatcaaatactaaaaagaaagaaaagtcagataaaaagcagaagtgtctctggggtttgacaaatagttcaattgaaagcaattaaaattaaaaatcagcttcctctcaattttatttacagcatgtcttaagttaaggactcagtaagaataacctactccagaggctgcagtgagctgagactgtgccgctggactccagcctgggcaacagaacaatactgtctcaactaaaaaaaaaaaaaaaaaaaaaaaaaaagaaaaagaatatcctactcctcaatttcatacacttaagaaatatggaaagcaaagtccaaaattatagagcagaaaaaatttaaatctacttttaaatgtacttaattttggaaaacaatttaagaggatatttagaataatggttcacttccttttttcatgcaacttcagaaatactggctttttaaaaatcactagtttgggccaagcacagtggttcacacctgtaatcccagcactttgggaggccgaggcgggtggatcacctgaggtcaggagttccgagaccagcctggccaacatggcaaaaccccattgctactaaaaatacaaaaattggccgggcatagtggcacatgtctgtaatcccagctactaggggtgctgaggcaggaggatcactcgaacctgggaggcggaggctacagtgagccaaaatcatgacactgcactccagcacgcgcaacagagtgagactgcatctctaaaaaaaaaaaaaaaaaatcactagtttgaaagaagtgtttaccaataaaatcaagaaattccttttaattcataactaaagtgtcttttattcattatctactcaacagctaatagtatcaggtattcagcctctactgaataactttaagtgcacaattcttgccatcagataggcaaaaacttagttgtaaatcacaatagtttaaatagttcagttacacatatatatatttatttatatttatttattttttaagacagggtctcactcttttgcccaagctggggtgcagtggcacaatgacagctcactgcagccttggcctccaaggctgaaatgatcctcccgcctcagcctcccaagtagctgggactacaggtgggcaccaccacacctggctaatttttgtattttttagtacaggtatggtttcactatgttacttgggctagtctcgaactcctgggctcaagcaatctgcctgccttggactctcaaaatgctgggattacaggcatgagccatcatgcctggcctagtatattgtatttatatataattcctaaaatatgatcagtgcttagaagactgaggatccctgactaagcattcataattaagcatgaggcactaaaaagctattgaaaaacactttgtgagtgagagtggcttggtgagtattactgtagggcacttattaccagtatttattattgttcttttctcagggaccttcactttccctgaggtaacaatcctctaatcatttcaggggggacgtamctggttgacatgaaataaatggggctgaaagaaccacttagaaaaaggattttcatttaatgcacttgtcctatcagaaattctgatgggccaaatgtccttaaagccagaacctctactgttcatattcttgagmgaatgtactgtaagtggtgaagaggttagcttgccaactgtgagaagtatgaagaaagcactgggagtctacttctcttcatacaattctttttttttttttttttttttttcctgatggagtctcgctctgtcgtccaggctggagtgcagcggtacaatcttggctcactgcaacctctgcctcccgggttcaagcaattctcttgcctcagcctcccgagtagctgggattagagatgcatgccgccatgcctggctaattttttgtttttggtaragatggggtttcacaatgttgcccaggctggctgagaactcatgagttcagggaatccgcccaccttggcctcccaaagtgctgggattacaggcgtgagccaccacgcctaacccatacaatttttcgatcaattcctgcattatcagttcccaccatcacttctaccatgcaaagcatctggggctttgattttgaacctttctaaaatctgctagcattcccctctgatgacatttagatttcaggtttttctttttatgagacagggtctcactctgtcacccatgctggagtgcagtgatggctcactgtaatctctacttcccagactcaagtgatcctccccctctggccccagcctctcccgggtagctgggactataggtacacgccaccatgcctggctaattttttttttttttttttttgagacagagtctcactctgttgcccaagctgtagtgcagtggcatgatctcagctcactacagcctccacctcccgggtacaagcaattctcttgcctcagcctcctgagtagctgggattacagtaatgcgccaccattcttggctaatttttgtatatatttttttttacgtagagactgggtttcaccatattagccaggctggtcctcaactcctgaccttaggtgatccgcccaccttggcctcccaaagtgccgggattacaggtgtgagccactgcgcccagactgtctggttaatttttaacttttatgtacagatgaggacttactatgttgcccaggctggtcttcaacttctgggctcaagcggttctcccaccttggcctcccaaagtgctgggattggagtgggcaaggggtcaaaacaaaaacctagtgctgrgattataggcgtgaagcstggcccagttttctttaatcctgttaaattggtcactaattgacacccactccctacattctaaaaatgtatttctatcttgtgaccattatctcttactgttcatcctttttttgttgttgctatcttggtgcgattttggaggaagcaaagataagcaggttttttgtttgttttttgagacaggctctcactctgttgtccaggctggatcacagctcactgcagcctcaaactcttgggctcaagaaatcctcccacctcagccttctaaggagctgggactacaggaaggcaccactacacctggctaattttttgtattttttgtagagatggggtttcaccatattgctcaggctggtctcgaactcttggactcaagtgatttgcctgcctcagcttccctaagtgctgggagtacaggccacctcacacgtggccgagcacatgttttaccagacaaatttatccaagtctcacctagatcaaacaaagggatgaattacaggataatgtgctagctgctctcaaatcccaccatactacagctatagcaacctacttaaaatacaaaattgatgatttaatccagataattttggttccatggctttccattccctacaggaggaatatttccaaaattctattgtaacacaagaccctttatgatttgatcaccgcttactccactccatcacaattattctacctatgccagcttggcacaagaccttgggatttcccaatcaggacctgttttctcatacaacgccttccaacctttttggatcagaaaatgccaattcagcatttaaaatcatagcaagcctcatcctcctctgtatcgcttttccttagccaagccaggcacttcctcttcatttgtcccatttttataaacttttattctataactgaatgtttcattttccacttgtacatctgtctccttactctctatacctcctgaacacaaaaattttagtttattctcatttatatctccaaatcttaaattgtctgatcagaagtaaactaaaataaaaattaggttgttttccttttaagacttttcctgaaactaggttgatcaaaaaatacaaatgtttttccatgattattctcagtaagagtcagtaattcaggccaggtgcagtggctcaagcctgtaatctcagcattttgggaggctgaggcaggtggatcacgaggtcaggagttcaagattcaataattggcaaggtataagctccactagaggagaaaaaaaagtattatgctaaagatggactatttgggttccattttcactctcagttgtgctactaattaaaatgaaaatgtaaacaaatcaattaacatgattatcccagacctttcttttcttactggaaaaaagagggcattaaactggatgatgacaataacaccataactacaagcttttataaaagtcctttatatacagtgttaatacagtgaaagatcaaccttattgaaagaggtctggcttctgccctcagctactgggaaacaatcactaggcctctggcatgtcttggctgatacgagtgtttttgttcgtctgggggctttggccactggactatctaaaaatgtgatttacaatgggaagtacccagaagaattccataatgaaatgggaatggtctgtgcaggaaaatgctaccaaaggaacatatcattataatgagcacatagaccctactatataacagcacacagtatggctttgggccacaaagtaatagctgtgacctccagagaaaggaataactaaaggtaatagtttgacattctggaagcagcaggagactaaaggtcagccatgtgggtggtatgtgatcaaatcccaatacaaacaatgatcaccaaaggctttgctgagattccctgtttgacaatattctgtgagtactgtcatacactgtgattgaaatgagctaatgttgtctatgataccacagagagagggcaatcagaaactctacatttggactcctcctggattctgcaccctatgtctctcttcccttggctgattttaatgtgtatcatttctacgtaacaaactatagccatgaatataatgagttctgtgagttcttctagcaaattatcaaacctgaggttggttttggaatccctcaagcttgcagcaatggtatcggaagtgggcacaagaatgacattaacttgctgaagctgactcactgaatgaagagaaagaatgagggatgacaaacctttgtttcctggatggttacaaggccactcatggtataaaactatagctgtgctataatcatttaatggaggtaaacattaccagtggaatttacaaataatagctccaactacagctgtattacaatcaattagtagaaataaaagttaccagtgggactgagaaatgatggatccaactcctgggtgcctgggtcactggatacataagaaaatgttacataaacaataaataaagttactatataatcccttgattattgttacctggaatagcgaaacagaaacgcaaatcctaatgctgggccaagcctggtttttggccagatccagttatagccagtagtcacagacccactgccatatgtaaaagtcttaccaaaataacaggcaataaagattcataagacaatggagaaaaagaaagaggagattcaagagactagtcccagctgggtgyaaatctttaaacagttattgagaaatgggataaaatattgaagccaaaacaaaggtcacactgcagcactctcagaggttgagtggaccaatgagcccctgctggtctccttccattaaagagccctaaacaaatctgctttattcaccctagtttttttttgtttttgtttttgttttgttgttgtttgttttgagatagagtttcattcttattgcccaggctggggtgcaatggcatatcagttcaccgcaacctccaccttccaggttcgagcaattctcctgcctcagcctcccgagtagctaggattacaggcatgcgccaccatgcctggctaattttgtacttttaggagagatggggtttctccatgttggtcgggctggtctcaaactctcaacctcaggtgatctgccagcctcrgcctcccaaagtgctgggattacaggagtgagctactgtacccggcaattcaccctagtttgaggaaactttaaaaactggaaggcaaaaatgactaagaaaaatctaacttcaacttgcctaagccaatgcttagataaggcctgaagagaagacctagattccttgctagtccctagctggggacccagagtcaaatgcttttaaatggataaaatagttaagcatagagatgtttccacgagagacccatgcacagaacttacaaatctgttggtgaagtcctaacaggagctacagttatactggaaagacataacaacacaagagtttatggatcaaggtaaaactctggattaaaataagaatgtctgaatgtactttatgtacagtagtgtgtctccttcacctgaatgcattatggagatatttattacgtctgactggcgaatgtttcccctacttaaacagaatacatataaatcttcctatcaggcaatatttataggacatgctaattgaaagccagtgaaaatgcctgagcccatccaaattaatttcaaatagtacagaatagaagctgggcaaattctttatacaacagtcctgtgtggagcacaagactggagcttataggaaaaccatcaggattctggacccaaaaatttcaatttgagggacaactagtttactattgggcattaactgacactgcttctctgaatctgaaaacctgaaatatatatactgtcctgggaaatgttggagaaacattctcaggggaaagcagtacccagaagagttccataattaaattggaatgctctgtgcaggaaaatgctaccaaagaaatacatcatattcacgaacatggagaccttactatataacagcacatagggaaaccagtcttagtacaagcctgtgaactgagacaaggtaagtagctttgttcttaaatgacttggaactcagaaataactgagtaagggcccactgtaactatacctatccatgaaaatatccagcatccaggtaagggtcaattctgctgaggcggcatagcaaattcctctgcaattcttactgatttgttctgtaataaaacagcatcacgttgtgacataacacactatggcataacaagtgacactgttgctaagattcatttaccttatgtaaataaatctttttttgttttgttttgagacagagtctcgctcagctgccctggccggagtgtagtctcatgatctcagctcactgcaacctccacctcccaggttcaagcgattttcctgcctcagcctcccaagtagctgggactacagtagagacagggtttagccatgttggccagrctggtctcgaactcctgacctcaggtgatctgcccaccctcgcctcccaaagtgctgggattataggcatgaatcatcacgcccagccccttatagaaatcaatcttataatactgatattgatcatctaatgtatcaggaaatttagttaaagcctcctcagggtgtaataatgatggaaaatgaatagcctaaggaagaattagttaaccatcaactaatttttcttcctctttctttcttttcttctttccttccttccttttcttcctgttttctttctctttctctctctcttttcttctcctcttctcgtctcactctgttgcccaggagtgcaatgatgcaatctcggctcactgcaacctctgccttccaggttcaagcaattctcgcctcagcctcccaagcagctggtattatggaagtgcaccaccacacctggctaatttttgtatttttagcggagatggggtttcaccatgttggccaggctggtctcgaactcctaacctcaagtgataccccccacctcagcctcccaaagtgctgggattacaggcgtttgctaccgtgcccagcccatcaactaatttctatgccaatagtcctgcatgaatttttcataagatacaaaaatagtggtaaatccgggggaaaatgagtaattaaattagtacaagaaaatgatgtacataatggctttataaattagattgactgtttatttaaatgtacacctattcaacactggctcctcccaatattaggcatattcaaaaagttactactgcaatgtctgtcatataaaacctaaatgtagacgttcaaatatattcattttgctttaagagtgtaggccaaaggctagggcatagcctatacaccaaagaagaaaaagatgcctgggcttccaccttggcaactgagagatgatctccagggctctagaatatcttgcttcttaggagtacctgcttgataggagtgtttttgtttgcctggaggctttggccactggacagtttaacaatgtgatttacaatgggggctttcgacattccagtatcaattctgacctccagaagaagtgagaactaaagttattagtctgacctcccagaggccaaagctacacctttcagctagtatgtgattttgagccccagtaaaactggaaaatcaaagactcagatgagtttcttcactgacgaaactcacatactgtggacataaaaagataatgctggacatgactgcacagggagaagagtctggactctaccctaaacatctcytcccctggctgattttaattcgtatactttctctgcaataaactgtaggcatgaatgtaacagctctcaatgagttatatcaatcttccagtgatttatcaaccctgtggatggttttgggaatgcctcaaacttgaaactagtgccagaagtgagggtgttcttacagaggtttctctcaaagtgtacacctatctaaactcactgcagtgctatactgaagttttatttatatactgtcttgcttgatcttcactactctgtgtggtagatattactattatgaacacagtgagacatacagagtataaatgacattaacagtaaatggaagaatcaggatttgaaccaagaaatatgccacaaagtctatgtccttaacatattatgctaccttccttgataactgctattttccccccaattctaacgttcaagccatgcaaatctagaagtaaacaagaaattcagacagacttaaaacaagccttaaataatcttcattatattttactttgttatggtttaagctgtcatttttattaagtgttaattctttgtatattaaggacagttttttaaatgctgcaatagcaaaacacaaataatacctatcaaagtatattaacagaaacataaaacaagtttactaaaataactcatttgaagaagactacctccaaaatataaaatactgaataacatcattatatgaaatttccaatttgctaggaaataatagttgttttttagggaaaagacaattttggtcaggcaaaattctgccataatataaaataatgatctccattactttataatatatatattttccgttgagacagggtcttgctccattgcccaggctggagtgcaatggcataatcatagctcaccatagccttgtactcctggagtcaagcaatcctcccacctcaacctcctgagtagctgggactacaaggcttgcgccactacaataggctaatttttttttttttttggtagggatgagggtatagctatgctgccctggctggtcttgaactcctggactcaagcaattctcccgcctcaacctcccaaagtgctgggattataggcatgagccactgtccctggtctataagactttttaaatacataattctagtgctgatgtaattaattttttttacttaaattttctctacattttcctaaagtatgtacaattatcacttttaaagctgcataatatgccaaaatattaatttaacagcattcacaaattgttgaacatcaaggttgttccatttttcttttcctctttaataagactgcaataaacatctttcttctaataacattaaacctttcatttttttaatctgcagctcccaccacagtgtctaattcgtatgaggtacgtgacaaacattagctaaactgaatacactttttaaaaactgtttttcaagcatcgtttcctaagactagaattaatgaatcaaagagtatgaacttcttatggttcttataacataatactttccaaaagaataatgtcattttataatccacaagatatgagtgtgtgaactcgttcattgcaatacatgccagtattagagtttatcatttaaaaagcttaatattttattatgtataatttgatctcttaaagtgctttaccttgtagagaaataacaatcctgaagttatattgtcattacttccatttcattatttaacaaagtacaaaaagacatgcaactgtttattctaattgtggaaattcaattataaatatgtaaaaactctttaaatgaacatactccaaagtttatttctgacttggaaggtggcatattttcacattttagtaaaatttgcttgaggccataatctaaaccaactttgataactgctggatataaaggtaatcttgtcccaaagagcagtgaactctattctcctttgagggggtttcttttggaacagatagtaagtaaaaagcactctaagagaatattttaaaataaataaattgctaagagtttacgtgtttatgatgtcatcacaattcctggttgaaccagaattgcctatctatgaaggaaaagctacattgagaaaaagtagtctgagtttcctaaaactcaattcagaaattcaagtaaattatcaaagatttgaatatttaagtcaattgtgaggacttctgtttcttcctttaacatctttaaaataacgcatttcaggtaattttacatttttccccttggtgatttcaggaatcaaatttgtacctgatgagaattggcattataagctttttagtattttttattatatattgacatgtttaaaattggtaactcacagttttaccacaattgggtgattctgctttcctgtcctttgatattatcatatgttaatagtcagaaaacttgtgataactcccagtagggttctttttcactagctgggttgcagcacattcatcactttaaaataagaatttactttctgagatgggtaaagcactgtgctagactccaaggaaccatacatagatgactaagacatgactcctgtcctcaaagaacttacaatctattaagggaagacagacatgcaaacaaataggtataatacaaagcagaatgtgctgattgttaaaacagaggtacaaaacaaagttctataggagcacaggatggttatataggagcactggttggggtgatctggaaggctgggccagcggaaaagtagtagaaaactctgccccttagaaaacacagcagtgttacagcccacctgggttagggtcgaagccccactccccacagaaggttttcctaaaggagatggagccagggccctaacccagttaggtaggtgattcgttgatttcaattatgaatgccaacactttctttccctggtgccgataaatgtgctttcacaagtattttactttattaaaaagtaaataaaatttaacaatctattaagtaacttacatgaagacgcaagttacctcagcctacagcattagaatggcctcaagtggtactctgattgtacaggaccaagcaaaaaaagacaccacttcagcatcttacatgtggtgctcccataaatgttttgctactgatatcctagaaagaaagaggaaccagacaattccagagaaggagcctgggtattatactattcatattttgctgaagatgcaattatgttamgttttaaaaaatatactttaaaatatgttaatgagacaacaggatttgtttttgtcttgtcatgatctcaagaaacagcaggtacactgccagtttccactaatttctaggtataagaggtagacaagataacgtaactgatatgtaatattaaacaagtaccacacgaggagtgaaacaactagaaagaagataataaatacaaacatgtttaaatacaaaagaacataaagcaagtatcatgtgcacagaaatagaaacattaaatttgtagaaaattaaagacaaagtattagtttctactgtttcattctattgccatctcatatacagatccctcaaatttctcaaatctgtagatatagtatttcattacgctgtaggaattttaaaacgcttaactttataattgctgtttatagacatccttaaagaagccaaattttaatgaacaaaaaaggaaacaataaaatctcagtcatatcaactgtatataaatgtttgcaaaatgcttatgaaacttaaattgactattttcttaattattacaaacaagcattctcacttcacttgtttattaatttttacaatctcctaaaacaaaagaaaaaaggaaggaaggcaagcacacataacctgactactggaattaatgacaatatcccrttgcatagactttaaaataaacatacaattcaaaaagacttactatcaaacaactggctaagcaaactatgaaatatgacaaaaaggttataatatctgtaataatataaagaaagctcataacaaatataaaaaactcaaaaccctaataagtactaaataacaattcactaaaaatacaagttgctcataaacatgaaaaaaattcaccctattaaaggaatgcaaattgaaacaacgaaatattattttcaaatatccaattagcagagaaagagtaacattcaatgctgcatccccttaggatgtaaaactcctcctgttttggccaaatatttgtgttttaaaacaagataaactgcaaataaataattaatgcttacaagggtgtgatgagtgagataaaaacaccccaacactgactgaggacaatggcagtcagtacaacctttacacaatktgtgaagagtgtcaggagatagatttttgtggctttcaagttcataccctgtgattattaattctactactatgaatatacattttaaaaaatcagagatgcagacaaaggcttgcaatggtatttatcccagttgcttataatgctccctagaactggaaactacaatgtcaaacattaaggaaatgggtcattataagattaaatattatgcagccattaaaaatgatcctaaattactactcatgaagagaaatgtagaggatagatgttaggcaaaaaagcaggatctacaattttaatgcagtgttagctaaaactatgtttaaaagaaggcagagattttgtacttgctaatttgccaaattcatttattagttccagtaggctttgttgtgaagtctttatggttttctaagtataagattatatcatctgtgaacagacacaattttacttctttctttccaatttaaatgctatttgtctttttctrgtctaatttctggactataacttcaaatactatgtkgagtggacatggcaaaagcagggatcccttgtcttattcttgatcttagaggaaaagctttcagtctttcaccattgactaggatattacctaagcaacaggatatgaaatcaacacataaaaattggcttttttttttttttttttttttttgaggcaaggtcttggtttgtcacccaggctggagtgccctggtgcaatcatagctcactgcagccttgaatttctgggctcaagggatcctcccacctcagcttcccaagtagctaggactacaggctcacgctgactagtttctatataacaataatgaataatttgaaaatgaaattaacaaataattccatttgcaagagcatcaaaaaagaataaattacctagaagatgaaataaacaaaactacaaaacataactgagcaaaattaaagaaaacataagtaaaaagacacccctgttcaaagactagaagacttaatatttacacgtgtgtgtgtgtgtgtgtgtgtgtgtgtagttttagagacagggtctcactctgtcacccaggcttgagtgcaatgacacaatcatggctcactgcagccatgaactcctgggcttatgcaatccttcagacttagcctctcaagtagctgagactataggcgtgagccaccacactcggcttattttattttattttttttgcagagaagggggctcgctgcattgttcagcctggtgttgagctcctggcctcaagcaatcctctcgccttagcctcccaaagagctgggatacagcacccagcccttaatattaagatgtctaccacccagatccatctacagattcaattcaatccctatcaaaatccaagtgamctttttctggagaaaaagaaaaatctctcctgaaattcatacagaatctcaagggaccctgaataaccaaaactatcctgagaaagaagaaagttgacggaaaaacatttcctgatttcacaatgtactacaaagcaacagtaatcaaaacagtgagctggtatcagcataagaacatacagaccaatggaatggaatagaaagcccagaaacaaacccttgcatatacagtcaaaatattttctgtaacagtgtcaagaccattcactggggcaaaggcagtctttccaacaaatggtgctggaaaaagtggacatctacacgtaaaaaaaagctggacccttacatgatattccaaacttaaaatcaattaattcaccaaaatttgtgatctaaaactatacaacttttagaagaaaacataaggggaaaagcttcatgacatggatttggcaatttttttttaatacaacaacaaaggcataagcaacaagcggaaacagacaagttgggcttcatcaaaatttaaaacttttgtgcagcacgggccactgctaacacagtaaaaaggcaacctgtaaaatgaaagaaaatgttaccaaatcatgtatctaaaaggggattaatatcaagaatacatagagaaatcctaaaacttaacaccaaaaaaaacaaatgatccaattcaaaaacaggcaaagaactttatgaatagatatttctcaaaagacatacaaatggccaagaagcacatgaaaagatgctcaacatcacattaagcattagaaaaatataaaacaaaaccacaatgacatgccatttcacacctactgagaaagtaaataccaaaaaaatgaaagtaaatgttggtgaggatgtaaagaaactggaacccttacacaatgctggtggaaatgaaaaatggtgcagccacttggaaaacagtatgaaagtgtctcaaaaaattaaaaatgcaattaccatctgatccagcaattctactcctgggtatatacccaaatagttgaacacagaggcttgggcagatatttatacagccatgttcataccagtattattccctatagccaaaagctggaagtgacacaactgtccattaatgggcaaatggatgaaaagaacgtggtgtataaacacaatggaatgttattttgcaataaaaaggaagaaaattgtgacacatggtttaacatgcatgaaccctgaagacattgtcagtgaaatgagcccgttacaaaaggacaaatactgtataattacattcatatgagatactcagagaccgaaagtagaatggtgggccaggaagacgggggaataaggaactgctctttaatgagtacagtttcagttttgcaagacagaaaatgttctgtgtttggatgacaatagtggtaacacacaacacgaatgtacttactaccaatgacccgtgtactcaaaaacagttaaaatggcaaattttatgttaagtacattttaccacaattaaaaatttttattaaaaaatttagcagagggccgggcatggtgactcatgcctgtaatcccagcactttgggaggctgaggcaggcagatcacaaggtcatgagttcaagacctgcctggccaatatgttgaaaaaccctgtctctactaaaaatatgaaaattagccgggcatgatggcaggcacctgtagtcccagctactcgagaggctgaggcaggagaattgcttgaacccgggaggcagaggttgcagtgagacgagattgcaccactgcactccagcctgggcgacagagcaagactccgtctcaaaaaaaaaaatttagctaggcatagtggcacacatctgtagtcctagctactggggaggccaaggtgggaggatcttttttgagcccaggagttcaaggctgcagtgagctgtgatcacaccactgcactccagcctgtgtggaaaagtgagatcttgtctaaataaataaaataaatagtatggcaaaaaaaaaaaggaaccagagcaatatgtttcataagaaaatatatcaaaaattatatatattagtatatatataatatatatgagttatctcttagtaataggactaaaaagataatcctctattactttcataccacagtgttttccaaatttttcatcactttttcttttgtatatgataaagttaaaaagaaaaggttggtgattgtttaagtaggcctaatttcaaggctaagaggttttcaacagaaacaactttgtaaaattatgacaaaattatcattaaacagtattttccaataaaaattctctctaaaatcagtattttatgaatacaacagaaattcatctcaatcttaattgcctttaagaaagggcaaaaattggctgggcacggtggctcagacctgtaatcccagcactttggagggccgaggcgggtggatcacgaggtcaggagatcgagaccatcctggctaacacggtgaaacccagtctctactgaaaatacaaaaaaattaaccgggcgtggtggcaggcgcctgtagtcccagctactccggaggctgaggcaggagaactgcrtgaacccgggaggcagagcttgcagtgagccgagatcatgccactgcactccagcctgggcaacagagtgagactccatctcaaaaaaacaaaaaggcaaagatttttctaaagctttattaattttttaactctgatactgatgtatagtttttcatattattgatgctactgcttcgtgcttttgagaattctcatataaaattcacctatacatctaattattcataatttctcataaattgtatccagtttttgggttaaggtctataaaattaaaatcatgcttttgggttaaggtctrtaaaagtttaaaatggtttaaactttttatatgaacaattcaacatactcattaaatattttttaaaacctactatggataaaattatcttctttagtttgctatgcaaaattttctattgaaactgcaggtcacagacagatattattttcatctttcaatattatattttgtttttaaaaatgccactgattccattcactctcttccctcccttcctatcctgtctttttattcatatctccactgacttcttaaaaaagaataatcaaataaacagatctattaaatttctattctatacagaaaagcatcaggattaactaaaatagaaaagttatatgcattaaaattattagcaagcagaagctatccttgtaattagttaatttgcaggcttaaaaaattgaaaggaactaccctaactcattagttatatcaaatacctgcaataatgtttcagcagcttttaawatatttctttgatagtaacataagaagaaaactttacaaatattgcaaatttgttatatgctagatgttytgccagaaaacagcaataacaatagttaaatgaatgtggctcttttcctaatacaatttaatgaccttgtttacttcctgtttcttttcttaaataaaactcttcaaagtaccagagaatttactgaaaattattatattttcttaaatgaaacatgtcctgataagtaatttaatccattacctgaataattacacattaaacatctatcacccacaatgatttactgattaacaaaccaagaagaattactcgttattaaatgttttaatacaaagtatgttccatctcccacttaacaaagtttcattcagcaaagttgttccacgtggcatacagtcaactatctctcaggtccctttaatccaatttatattttaatttgatagaataaacttattcattaactacatacgctgacagaatactaacaaagagacacctaaagttgttttaacaaaatgaaggcagtgttttaaaatctctgccagattcatcagagactcttcaaaaatattaatttataaatcagtaagatgaatctaaacttctatttaattcttagtcttaaattttcatttattctttttttttttgttaagagatggggtctcactctgttactcaagctggagtgcagcagtgtgacagtaactcacattgacttggattcttgggctcacgtgatcctcccacctcagcctcccaagtagctgggaccacaggtatgtgccaccacatccagctattttttttttttttttttggtagagatggggtctcgcttttttgcccaggctgatctccaactcctggcttcaagcaatcgtcctgcttcagcctctcaaagtgctagttttacaggtgtcagtcaccaaacctggcctttgttttgttgttgttgttctttgttttaaacgaacaaatgaaaatgcttaatgaaacaggaatagatcttaccaatgcaggccactgaatctgtttgctctttgatccctgagtctggctagggtcattccttttggcccagattaagtggtattccaccaagaaagttgaaaaatcttcataaactttaacccactctcgtttatcccattcaagatcatcaaattccacatacacctatgaaaacaaaaacacaaaattcaattagcaaaatagaagagtggtatatctttttttactaatgcataataattgtacatatttatggggtacatatgatatcgtgatacatgcacacaatgtgtaatgatcaaatcasggtaattagaatatccatcacctcaaatatttatcatttgtgttagaaacatttcmaatcctcttctagctattttgaaaaatacaataaattattgctaactatggttaccatactgtgctatcgaacactagcacttactccttctatctaattgtaggaagcagaaaggggaactctagtacactgttggtgggaatgtaaattagtacctccagtatggaaaacagtatggaggttcctcaaaacactataagtagatctatcataggatctggtaatcccactgctgggtaaatgtccaaaagaaaggaaggtatattgaagagacagctgcacatcagtgtttattgcaacactattcctaagagccacgataatggaatcaacctaagtatctgtcaacatatgaatgggtaaagaaaatgtggtatatatacacaatagaatacaattaggccataaaaaagaatgaaatcttgtcttttgcagcagtatgaatagaactggaggtgattatgttatatgaagtaagccaggtacaaaagacagatatcacatgttcacactcatatgtgggagtcaaaaacatggatcttgacccagcatggtggctcatgcctgtaatgccagcactttgggaggaggagatgggaggatcacttgagcccaggacttcaagatcagccttggcaacatagtgagactctgactctcacaaaagagaaaagtaaaaaacttagctggacatggtggcacatgcctttagtcccagctactcaggaagctaagacaggaggatcacttgagcccaggaatttgaggctacagtgagctatgatagctacagtgagctatgatcgcaccactgcactgcagcccaggtgacagaatgagactctgtctattcaaaaaacaaacaaaaagtggatctcatggaggtagagggtagaatgatggttatcagagactaggatgggtgaaggggggagaagaaaagaggttggttaatgagtataacaatatttcaaaatataagccatgaacttgaattagaaaggacattaacaaattcattctttaacttaacatttttcataaaaccatcatttaacttcccttaatcagattataccccttagttatgacagggagataaaccataactatatcaagtaaagcaatttacagagtgttgatcagtaaagattagcccattatcttctaaatgtacactaaataatgatgtctgtactgatgactctagaaggagaggttagaaaatgtttttaaagagtaaatagtagccatacgcgatggctcatgcctgtaattccagcactttgggaagctaaggcgggtggatcacctgaggtcaggagttcgagaccatcctggccacagagtgaaacaccatctctaccaaaaatacaaaaattagctgggtgtggtggcgggtgcctgtagtcccagctactcaggaagctgaggcaggagaatggcttgaatccaggaggcggaggttgcagtgagccaagatcaggccactgcacaccagcctgggtgataagagcaaaactccgtcacacacacacagaagagagtaaatagtaaatacttcatattttgcaaaccagatggtttctgtcataattgtttccttctgtctctgtcacagacagagacaaccacagacaatatgtaaacaattgagcttgactttatgctaataaaacattacttacaaaggtagtcaatggtacaaagatggctcaacatatgacgttcaattaatgtaatatacattaacagaataaaggaaaaaaatcatctttaatgatgcagaaaaagcatctgaccaaattccatggcttttcatgattaaaaacatgcaacaaactaggaacaggatgaaaatatctaaatataaaaaggtctatatgaaaaacccactgctaacatcatacacaacagtaaaaaatcaaaagcatttcctttaagatgggaacaagacaaggatgttataatttggaaaactgaagctgactctatgctcataggacattcaatcattcaacccttcgctcccctactttcattcttttgcgctggaagcagtcttctcatcacttatatttttatcctaattctgccacccatcttctgctcccttacacctgaagagtttccatttccacttatttgaatcatggttgctcttttggcctagctcaagttcttccatgatgtttacatcccccaacttcaactccaacttagctttgaatttctactgcaattactttttttatagcttacactgtattagtatataagcaaataccgtcctatatttttaagtgtaataaaagtatctttaaattatgcatgtaaactcacttaaggtagaactgttctttcatttatttttagtgctcactacagtgctgcatayatataaagtttttaattaacattaaaaatctcctgactcttagactcaatcatggtctttaaaaaataaaagcaacctggtaaaaggttaagtttgatttggtggtgtttatactgctgcccactaggaagcttctttaaaaaaaaaaaaaaagcttatctattagaatatccactaaagatattcattaaagcttatctattagawtgaggaaagagaaatgcactggtcaaggagttaacatctgtttctagttaactatccataccaagtcaaggaagaaatccaagtcaaggaagaagccaacaaaacagctggctatttctaataaaacccatcgttaagggtacctccttgcctgtaatcccaccactttgggagacacaggtgggaggatcacttaaactcaggagttcaagaccagcttaggcaacacagtaagaccttgtctctacaaaaaatgaaaaaaattagccaggcatggtggcatgtgcctatggtcccagagactcgggaggctaaaatgggagggttgcttcagccagggaggttgaggctgcaatgagccatgatcacaccactgcactgcagcctacgtgacagagcaagacccagtctcaaaaaataaaaatcaaaaacaatgtacacactttaacttaaaaatgttcttactgccaaaaaacggtaacaatcatctgagctttcagagagttgtagyatctttttgccgataaagtgccttgcctcaacgtttttggctgctgactgctcagggtggtggtagctcaaggtggggtgtttgtgacaatttcttaaaataagacaacaaaagtttgtcacatctattaattcttcctttcatcaaagatttccctagggcatgcaatattgttggccactttacccacagctgaacctcttttgaaactggagtcaatcctctcacaagctaaggttgcattatcaccaacggttaagtagtattcagttctatttcaaaaaaccatgttctttgcccatccataagaaacaatgcctcatccattcaagttcaaccatgagattacagcagttctctcacatcttcaagctctagttttgattacaaatctcttgatatatctaccacatctgcaatgacttcccccttgaaagtcttaaacacctcaatgttgatattatgacctcctcccatgaatcatgaatgttcttaatggcatctagaatactgaatcctttacaaaaggttttcagtttactttgctcagatccatcagaggaatcactatctctggcagctatagctttacaaaatgtatttcttaaataataagacttgaaaatcaaaattattccttgatctatgggctgcagaatgaaaattgtactagcaggcatgaaaatattaatctccttgagagctcttgggtgaccagatgcactgtcaatgagaagtaatactttgaaaggaatctttttctctgagtagtacatctcaacagtgggcttaaaatatttagaaaaacctactataaacagatgtgttgtcatccaggctttgttgttccatttacagagcacctgcaaagtagatttaaaataattcttaggggccctaggatttatggaatggtcaatgagcaatgacttcaacaaaaagtcaccagttactgtagtccctaacaagagagttggcctgtccataaggcttctccatatcagcaataacaacgtttcactttcttatcatccctgtgtttactggagtagcacttttaatttccttcaaaagctgttccttggcaataacaacttgtctaactgtgtggtgctacaggcctagctttgtgctctgtcttggctttgacatgccttcctcgctaagctagctttctgatttcaagttagagatgtgtgactattcctttcacttgaaaacatacaggcaactataggattattaattggattaatttcaatattattgtgtctcaaggaatagggaggtccggaggttcaagaagagggaaagagacaggggaatggctggttagtggagcagtcagaacacacatagtgttctggattaagtttgccttcttatacgggtgtggcttctggtgcccaaaacaattacaatgctaacatcaaagatcactgatgacacatcaccataagagatgtaatagtaataataataaaagtttgaaatatcgtgataattgaaatgtaacagacccatgaaaatatttttccacgtgcagatggaaaaatgaaaccgacagacttaatagatgcaaagttgtcacaaatcccatgccttccctgcccccgcctttttttttttttttttttttttttttgcttttttttaagagatagggtcttgctctatcacccaggctggagtatagtggtaagatcatagctccctgtagcctccaactcctaggctcaagcaatcctcccaccatggcctcccaagcatctgggactacaggtgcatgttaccatgacccggctaatgtttcttttttaaatttattttagacatggggtcttgctatattgttcaggctggtctcaaactcctggcctcaagcaatcctctcacctcaacctcccgagtaactgggattacaggtgcatgtcatttcacctatcataaaacctcaaatttatttaaaaacattcagcatctgctaagtgcaataaagcaaactaygataaaaaatgtatatttacttatatataggtttgtataacccaggatactccagatcctgatttgaacagtattttaagacaataaaaagtagaaaaaaatgaagaagaaatataacaaaaatgttcagagcatatacggtgaaaactacaatacaccaaacatggaaacttaagtcttaaatagatacactgtgttcacaaatgaaaagattcactattgtaaagaataaactctctttggatgcaggctaaccctaaaaaatgtgaaacatacacacatacacagacacacacacacacacaccccaaaaagagtaagttatctcccaaatcaacagccctgaaggaaaacacaaggtactagccggaccccaccctccctagcagtggggtaactaggcattttcatatgccctaaatacaaacttcacagaccccagaatctgtactgtgggctactgctgccagggtcaacaccctagcaaagtgcacctgcccagttaccagttgcctgcctacagctgctccaacagaaagcaacscaccttccccagtagcagggctgcaacatgatggctggagccctcacctgaccattccactggtagtctggggatcatgccacccctgttgaccacagccagtgcctgcacaaacaatcagggaacctgaggacgggtctgctcatccaagctcagccccctccagtatgtaagcacattgctcagggtctggagattaccttgcttagtctaccaccattggtacctgagcactttttccaggggccagggtccattcaactgaccactatcaccaaagctgacacccacccacatgtgggcacctgcagcaggcctggagactgatttagtcagcctgtcacaacctctgccaacaccaaagtgaaatgcttgggttccagggggttgtcttgccactgctactgacatcaactatgccacgcctaccgcccagggcccagtaacctgcccactcattcaccccactactgccattcctggcacccaagcaagctgcctggaagcccaagaatcgacctgcacagacccactaactctggtggcagcatacgccacactgaagccccaaaacagacatgatcttctgactaccaccaaaggagcccaaagtggcccatgtggcaacccattccctaataaaatgtcaccacagcttccattaagaaccacccactaaaccacagaagaaatcacagacaacactgaccctgtttaatgcctaaaaaaatcacatggagtctacaccactgcatatatccagaatcaaagcaaaagtgccctacccaaccaacaccacagatacatctctaggaaaaattcctcccctatgaaaggaaattcaaactactggaagaagtgactgtcaatacctgatgcatagatatcaatgtagaaataaaagaaacaagaagaagcaagaaaatgtgaatccatgataataaattcaaaggaacacagtaattctccaacaacagattccaatcaaaaagaaatttataaaatcttggaattgaaaatattgatactaaagtattctgttacactgagacacaaagaaaataatacaaagaaaagaaaaacaattcaggatatgaatgaaaaattcaccaaagagacagcataaaaaaggatgaaacaaattcgggacctgatgtattcatcgaatcaaacaaaatacattcaaaccttcaacagactagatcaaatagaagaaaaaatctcagaacttgacagaccttttgaaataacccagtcagaagaaaaaagaaaaaaaaaaattttttttttttttttttttttttgagacggagtctcgctctgtcgcccaggctacagtgcagtggcgtgatctcagctcactgccagctccacctcctgggttcctgccattctcctgcctcagcctccggagtagctgggactacaggtgcccaccaccatgcccggctaattttttgtatttttagtagagacggggtttcaccgtgttagccaggatggtcttgatctcctgaccttgtgatctgcctgtctcagcctcccaaagtgctgggattacaggcgtgagccactgcgcctggccgaaaaaagaaaatttaaatttccttaaagaacgagcaaatcctcatcacatataggacatcataaagctaccaaattttcaaattttttgtgtttgaggaggcaacaagaaaacttgaagggctagaaagtctgtttaacaaaataatagatgaaaacttcgcaaggctggcaaaaagtttagatactcagataaagcacaaagatccccaaaggtatataactcaaaaatatcttttccagagcaccttatagtaaaaatgtcactaagtcaaagacagagaattctttaaaaagcaagacataactatctagtcacttattaatgaaccccaatcagactaacggcagtttctctgcacaatccttacagggcagaagacaatgggataataggttcaaaaagctgaaggagaaaaaaaaaaaagccgaatatactataccaaacaatgttatccttcataaatgatggggaaataaagtctttcctaaacaagtaaaagcaagaaaattcatcatcactagaccaaatctacaagaaatgcttaaaggagtctgatgctgggaaaataaagaatggtatctatcatcatgaaaacacacagaatataaaccccagtggtagagcaaatacaatcaaggaagagaaaagcctcaaacgatagcactacagaaaaccaccaaaccacaatgttaacaagaagagagaaaggaacaatgaatacacaaaacaaccagaaattaagtaatagaataacaggaataagccctcacatgttaataataaaacagattaaagtgtcagactagttgaaatgatttaaaataatggcacaactatatgctgcccaaaagaaactcatctcccctataaaggtacatataaactgaaagtaaaggaatacaaaagacattccatgcaaatagaaaccaaaagtggggagaagtagctacaattaaacagtcaaaagcagtaaaaggagacaaggtaattatataacgataaaagagattgattcatcaagaaaatataacaattctaaacatatatgcaccaaacagcagaggacccagatgtataaagcaaatattattagacctcaatggagaccaggtgtgctggcttacacctgtaatcccagcactttgggaggccaaggtgggcagatcacctgaggtcaggagttcaagacaagcctggccaacatggtgaaaccctatctctactaaaaatacaaaaattggtgacatgcctgtaatcccagctactcaggaggctgaggcaggagaaccgcttgaacctggaaggcagaggttacagtgagctgagatcgtgccaatacagtccagcctgggtgacaaagtgagaccctgtctcaaaaaaaaaaaaaaaaagaaaaagaaaaaagatctaaatggagagaaagagtacaataataattggggtttccaacaacccactcttagcattagggagatcatctagtcatctagacagaattttgtttttcttttttttttccttttttttttttcccaaaaactcactgcatgctaacagacagaaaattagcaaagaaacattagatttaaactgcacattagaccaaatggacctaacaaacatttatagaacatttcatcccacagctaaagaacacatattcttctcaccagcaaatggaagattctcccagatagaccatatttttggacacaaatagagtctcaacaaatttttaaaaattagaattgtatcaaaccctcagaccacaatgaaataaaactagaaatcaacaaagaggaactttgggaagtgtacgaatacatggaaagtgaacaacatgctcctaaatgaccactaggtcaagaaagaaactaaggatgaaatcaaatgtagctttacaataaataaaaatcaattcaaaacataccaaaatctagagaatatttaataaagtagtgctaagatggaagttcataattaatacctataaccaaaaagtaacagaatttcaaatacagtgtcaaaccatacatcccatgaaaacagaatagaacacggcaagcccaaaattaacagaaggaaagaaacaattaagatcaagaagaaacaaatgcaacagatactaacaaaatacaaaggatcaatgaaatgaaaaactgttttttgaagagataaacaaaatcaattaactgcttgttgagaataaacaacaaaaaaggatacccaaataaacaaaatcagaaacgaaaaaagagaaattacaactgataccacagaaatacaaaagatcatcagagaccattatgaacaactatacaaaaacaaactggaaaaccttgaagaaatggataaattcctggacacatacaactaccaagattgaatcaggaagaaatagaaaatctaaacaaactaataacaagtaatgaggtaaaattagtagtaaaaaatctcccaaaaaagaagagttcaggatcagatggccccactgcagaactctatcaaactttgaaacaactaacaccacttctcctcaaactagtccaaaaaactgaagaggagggaattcttcctaatttattctaagaggccagcattatattaccctaataccaaaaccagacaagaatgctacaacaacaacaacaacaaaataaaactacaggccaatatctctgatgaacatacatacaaaaattcttatcaaaatagaaaaccaaattcaacagcacatcaaaaacatcaagatcaagtgaaaattttcccagggatgcaaggatggttcaacatatgtaaatcgacagtcatgaatcatcttaataggcacagaagaagtatttgataaaattcaacatcccttcataataaaaactctcaacattctaagcacagatgaaaaatacctcaacataataaaggccacttgtgacaaacaacagctagcataatattgaatggggaaaactgacaaccttccctttaagaactggaacaaaacaaaaaagccgccactctcttcactcctatccaacataatactgcaagtcctagccagagcaatcaggcaaaataaggaaataaaggcatccaaattgggaaagaagaagtcaatgtgtccctctttgagaataatgtgactgtgtatctaggaaaacctaaagatcccaccaaaaacctcatagaactgatcaattcagtaaagttgcaagataaaaaaatcaacaagcaaaaatcagtagcatttctatataccaataakgcaatagctgagaaacatatcaagaaggtggccaggcgtggtggctgatgcctgtaatcccagcactttgggaggccgaggcgggtggatcatgaggtcaggagatggaaaccatcctggctaacacggtgaaaccccgtctctactaaaaatacaaaaaattagctgggcatggtggcgggtgcctgtagtcccagccacttgggaggctgaggcaggagaatggtgtgaactcgggaggcagagcttgcagtgagccaagattgcgccactgcactccagtctgggcgacagagtgagactccgtctmaacaacaacaacaacaacaacaacaacaacaacaaaaaagacaattccatttataatacctaaagaaaaaacatccatgaataaatgtaccccaaaagggaaaagatgcctacaatgaaaactacaaaacagatgaatgaaactgaagacacaaatagaaagacatcccatgctcaaaagaagaattaacatcattaaaatgatcatattgtctgaagcgatacaaagattcaatgcaatccttatcaaaataccaacatcatttttcacagaaatagagaaaacaatcctaaaattcctatggaagtaaaaaagagcctaaggagccaaagcaatcctgagcaaaaagaacaaaactgaaggaatcacactacactacccgactttaaaatatattacaagcctacagtggccaaaataggatggtattggttaaattaaaatcatgtactaaccaggctttaaaccaaaagtaaaagttgctaacagtgtaacatgtatttaaaaccactgatttctttcactgtcgcaatttcctcagttacaattttgcaaacaccgtctcacagccaacagatttttcactaaggttccaagaacacacaacacattatggaaaaaacaaccattttgataattggtatgtgaaaaactggatatccacatgaaatgaaactggacccctatctctcaccgtatacaaaattcaactcaggatggattaaaaacttaaaacataagacccaaactataaaactactagaagaaaacaaagggagaacactttaggacacagatttatgcaaagattttatggctaagacctgaaactccagaggcgatataaataatgataaatgcgactatattaaactgcacagttctgcacggcaaaggaaacaatcaacagaatgaagagacaacctgttgaatggaagaaagtatttgcaagctactcatcgcacaagtgactaataattcagaatatatgagaaactcaacagtttaaaaaaaaatcccattaaaaagtgggcaaaaggccrggcatggtggctcatgcctgtaatcccagaactttaggaggccgaggtgggtggatcatgaggtcaagaaatcaagaccattctggccaacacggtgaaaccccatctctactaaaaatacaaaaattagctgggcgtggtggcatgcacctgtaatcccagctactcgggaggctgaagcaagagaactgcttgaacacgggaggcagaggttgcagtgagccgagatcacgccactgccctctagcctggtgacagagcgagacttcgtctccaaaaaaaaaaaaaaaaaaaaaaggtgggcaaaaaagtacataaacacacacacacacacacacacacacacacacacacacacacgtgagcaaaggacataaacagacatttctcaaaagacaacatacaaacagccaacaccgtatatgaaaaaaatgagtccaggagcagcggcccatgcctgtaatccaagcacttccagaggccaagttagggagatcacctgcgcccaggagtttgaggccagcctgggcaacatggtgaaaccccgtctctacaaaaaatacaaaaaattagccggatgtggtggtggacaactgtagtcccagctaatcaggagactgaggtgggagaatcacttgagcctgagttgatgaggctgaagtgacctgtgatcgcaccactgtactccagcctgggcaacagagtgagatcctgtctcaaaagtgaaaaagaaaataaaatgctcaacaacatgaatcatcagggaaatgtatatatcttaaccacaacgagatcttactcgagtgagaaaggctactattaaaaagacaaaaaataacagatgctggtgaggatgtagagaaaagggaactctcatatactgttgacgggaatataaattagtacagtcattaggaaaaacagtatggggacttctgaaaacactaaaaatataactaccatatggttcatcaatctcactactgggtatttatccaaggaaaagatatcagcacatcaaagggatacctgcacccccattttattgcagcactattcacaatacccaagatatggaatcaacctgtctattaacagatgaataggtgaagaaaatgtagaatatatacataataaaataccatcaagatttttcttcatctactcaactattggtagatgaataaatggagaaatgtggaatttatatacaaattttgtgtaccttctaaaatttacatgggggagggaaaaggaaatagaattgctaaataattttgaaaaagaacaaagagttgcacagttcacattacctggtttgaagactgcatataaagctatcgtaaaggtgccacgcacagtggctcatgcctgtaatcccagcactttcagaggccaaggcaggcagatcacctgaggtcgagaggagttcgagaccagtctggccaacatggcaaagcctcgtctccattaaaaatacaaaaaattagcagggactggtagtgtgcgcacctgcagtcccagctactcaggaggctgatgaaggacaatcgcttgaatccgggaggtagtggttatagtgagccgagactgcaccactgaactccagccagggagactgagtgagactccgtctccaaaaaaaaaaaaaaaaggctacaataaaggtatatggcatcaaaaaaaactagacacacagatgaataagagaataaagtccagaaacagatccaaacagaactgacaattgaatttttttaaaaaatgtgcaaaggtaattcaaatggaaatggatagtctcttcaacaaatgatacttcgataactgaatgcctgcagggagaaagtaaataaattcaatccatactatatacaaaaattagactgaaataaatcagacttacacgtataaggtaaaactttgtccaagaaaatataatattcgtgaccttggattaagcaaagaattcttagaaatgagatcaaaagcacaatccataaaacaaaaaatgtgggctgggctcagtggctcatgcctgtaatcccagcactttgggaggctgaggcagatagatcacctgaggttgggagttcgagaccagcctaaccaacatggagaaaccctgtgtctactaataatacaaaatcagtcaggcttggtggcgcatgcctgcaatcccagctacttgggaggctgaggcaggagaatcgcttgaacctgggaggtggaggttgcagtgagcggagatcacgccattgcactctagcctgggcaacaagagtgaaactccatcacaaaaaaaaaaaaaagtgatgttagatgccatcaaaattggaaacgttttactctgtgaaaatcaatgttaaaaaaaatgaaaacaagccacagactgtaaggaaatacttacaaatcacgtatttcacaaaagacttgtatcaagaatatataaaacacttttgaaactcaataaaagaaaattaattcaaaaatatgggcaaaagatttgaacatgtacttcactaaagaagacatacaggcagcaagtaagcacatcaaaagatattaaaaatcattartaattagagaaatacaaataaagaccacaatgagctactactacacatctattagaaagactaaaatttttggccaggtgcagcggctcatgcctgtaatcccagcactttgggaggccaaggcaagcagatcaggaggtcaggagattgagaccatcctgactaacatggtgaaaccccgtctctactaaaaatacaaaaaattagccgggtgtggtggcggatgcctgtagtcctagctactcaggaggctgaggcaggagaatggcgtgaacccaggaggcggagtttacagtgagccaagatcgcgccactgaactccagcatgtgcaacagagggagactctgtctcaaaaaaaagaatgactaaaatttttaaaactgcccaaaagaatgggaaggatgcaaagcaactaactctggatgctagtgggaatgcaaaatgataaactacttaagaaaagtaattccatacttagatattcacccatgtgaaataacctatatttacacaaaaacctgtacatgaatgtttaaagcagttttatttttaatagacaaaagctggaaaaaacccagatgtccccaaaatgaagtgggacaaactgtagcagataatataatgaaatacttctcagcaataaacaaactgttgatatatgcaacaataaagatgaatttctaatgttttagtataattaaaagaagcctgactcaactctatacactgtataattctattcatgcgacacccaagaaaaagacaagaaaatctaatgttcagagttgagaaaaaaagacagatgaaggtttcactacaaagaaatggtagcaaaagtaattttataggggagtgattgcactgttctatgtcttaatcgtcgaaatggttacaagactgcatttgtcctaatttataaatttttaaaagtaagtaaattttactctaattaaaaacaaattaaatgcataagtagagaatttatataaaaaagttaaaaagtgggaatcagcatgacttaaaaaaaacccatgccactcccttctcccaaaggcaatgatgatatatatacagagagattatactatacattctaaatctcacgtgccttttatgttaaagggtagaagaatgagacaataatctcgaacagaggctatatcctaacacactgtgggccgaagattactgaacttataccccattatcacagcacaaattagtccctgaacagtatttcctaagagataaaaaagaacagccttgttagttctctgacatattcacctccacctctccttttttattttttgctttaaaaaggcaaatataggagtaaaagtaggggtgagaaagcagctatagaaacgctgccaacttgagattaaagacatgtggtgtgcacacaacaaatcagatgatatacaacgggcaatgtagcgaatttggttgaaagagaaagcattaacagaatagtattccctaaatgaaactgtggtaaatcttgggtcccagaaaagtttaggatatggaatcttatttacaagctcagaaacattcgtttccagggaaatgttagaaagaatatttctattttgtagagaagagaaactaataatacaataggcacagagcattaggtatgtcttgtgatatacttccttagattcagcaaaaaaaaaaagtataaaatttaaaaaaggaaagtaacaactggtatacaaactacatctcagtttcatagaaattttcattttttataccttcatatcacagccacgttcaagaagaactggtttttggtttttttttttttttttgagacagggtctcactctcgttgtctaagctggagttaagtgtcacaatcatgactgaagaaagcttttctaagactatttacatgtatatattttttcagtaacactctattttgacaaattaatggattgaatttttcctatcaaaccctattaataattgttttgatctcttcattcttactggatccactatagtgcttacatttaataaataaccacagtcttcaaacaaaagtaactattatttattgaactgatctttattttattttattttatttgagacagagtttcgctcttgtcgcccaggctggagtgcaatggcacaatctcagctcactacaacctccgcctcccaggttcaagcaattctcctgcctcagccccccgaatagctgggattacaggcatgtgccaccacacccggcttattttgtattttcagtagagacggagtttctccttgttggccaggctggtcttgaactcctgacctcaggtgatctgtctgcctcggcctcccaaagygttgggattacaggtgtgagccactgtgcctggcctatttattttgatctgacctttttatttattgtatttttgaacaggatctcactcttgtcacccaggctggagtacagtggcacaatcacggttcattgcagcctcaaattcctgggctcaaacaatcctcccacctcagctgtccaagtaggtgggatacagtcatgtgccaccacacccaggtaagttttttatttttttctagacacaaggtcctactatgttgcccaagctggtcttcaactctgaggctcaagcaatcctcctgccttggcctcccaaaatgttgggattatacaggcatgaaccacagtgtctggcttgatcttttaaccaatgtttcatcaccataagagagtgaaagttacaaataattaaagttcataaataattattcagcaatttagtctcttaatgtgtaactttggaatatcaaaatgctattttgaaaataacctaattgttctttttaaaatttttaaccttttgttacagagacagtaacagcagatttccaggtactcatcatccagcttcaacaattctcaactcatggcaaaccttgtgttaactgaaagaagtattaattctctaaaactatccattatttaacaggcagtattcaagtttcccaggttgggttgtttgtttttcttgtttttacagtttgttcaagttaagatctaaataaggtccacatattgcaactgtttgatatgactttttttttcttgcttccccaggtcacccaaccatatatgactcttaaatctattatttataggttcctcttgctttttccccttggttaaagaaataaagtcatttctcccatacagccttcaattacctgtattttactattctgkggcattttaaaatatgtttctccattcttgtatttccagtaattgtttaactggagtattaatcaaattcaaggttgataattagaaaagactacctcatacataatacggtattcttcatcaagaggcacatatgtgttgtctgattatatttttatgtaacagcagccaatgataattgtctaaatctagtaattcactgagatttgcaaataatgatattctaactataattgcttcatcatttactatctgaaaaaaaawwwtttttttttttttgagacagactctcactctgtcacccaagctggagggcagtggcgcaatctcggctcactgcaacctccacctcccaggttcgagcgattctcatgcctcagccacctgagtaacctgggattacaggcgtgtgccatcacatccagctaatttttgtatttttagtagagacagggtttcaccatgttggccaggctggtctcgaactcctagcctcaagtgtgattcacatgctttggcctcccaaagtgctggcattacacgtgggagccaccgctcctggccactggaatatattttaagtgagaattccctcatcaaacctttggtttcttggaggttgtttctaaaaagaagaataaatccttgatttttatgagttttgaaatcggttggtatcctgacttccctgaacagtaaacaatagatgttttttagggaaagcatcataaactttccggatttaaataaatgtgatacgtatcaaatcactgcagttgttattcttactgatgtcaaattttccatccttggtcagtgagacaatcttcaaggtagctcctaagtcttttagatacaaccttagtaatctcttaatagcttctttgattctggtattacaaaatatcccaggatcatcttgtccatttcctgccccagacctgaaatcaaccatatatccaaggaaccctggtacttttctgcgggaaacagtgttcagaaacaacaatcagagtgctaggggtgctcattactcctgatttggtcaccttttctaggcctttttacagtggtcagaattagtatactgacactttcaaataaaattctacactgtttttcaacctccttgatcttttatttctcttatactgaaaatcttgttatgcaacaacataaactcatttactttgtcacacaatatatatacaacagtctagaaataataatactaacactatgattaaatggtttttattccattctttttgtacaaaggtataacccccaggcatatataattaaatcactatgttaaaaactcttaaaatagtttcttcctatggttatgccacttaggcttctgtttcattttgcttttccttttaggatttttttttttaatgacaaaaacttcttttgggattatgtaaaataytgacatacttgattcaaagtcacatctagaaaacaaggtatattcggagaattctagctagtccttctatacctgttccctataataaattagttttgggttaattccattttttaaaaaaaaataaaagtagaaacatagatatacacatgaacacatactcaaatatatttacttaaataaaaagcctactttactcactgttctgtatcttattattttacttaacaaaatgtacagtagcaatcacagcttaaaaggtattgtttttgatttttatacctacataatatcccacttggggcatgaaccattttattcaatcagaaccctaacagatggatatttgggttgtttcaatcttttgctactctaaataatgctgcaatgaatatatccttgtgcatatgtcattttgtatttttgccattctatctttaaggcatactcctaaggtaggatttcctagatcaaagatgatgttgacaaaaccccattataggaggttataccactctgcattccaataaacaacatgtgagtgtgtccattcctctcctctagagtctcaccaattgggtgtgttgtccattgagggaagagaagccaagtgagggactaccttataggtgaacattgttaactcagtgtagtttggttcattttttcccgcttattttctagttcattgatttctgctctttatttcctgccttgttcttgagtttactttgttcttttctgcctttcccccggccccgagatggagtcctgctctgtcgctcaaactggagtgccatggcacaaccttggctcactgcaacctctgccttccaggttcaagcaattctcctgcctcagcctcccgagtagctgagattacagatgcaaccaccacacccggctgatttttgtacttttagtagagacggggtttcactatgtttttcaccatgttggccaggctggtctccaactcctgaccttgcaatccacccaccttcgcctcccaaagtgmtgggattaaaggtgtaagccaccacatccagccctttttgttgttgttgtttttgttttgaggcaaagtttcacttttgtcaccaggctggagtgcactgcaacctccgcctcccgggttcaagcagttctcccttcagcctcctgagtagctggatttacaggtgccctccaccacacccggctaatttttgtatttttagtagagacgaagtttcgccatgttggccaggctggtctcaaactcttcacctcaggtgrttcacccgcctcggcctcccaaagtgctgggactacaggcgtgagccactgcacccggcctcgtttcctctcttgcggtagaacttcaggtcaatttttttttaacctctattcttttctattataagcatgtgaagatgcacatttctctctaattccagttgaagatgcactggcatattctaatttgctttattttcattataattcagttcaaaaagacttaatattccttgtgattactttggccaacaggttgtcgaaaattgttgtgtttaatgtaaaaatatttgggtttctttttagatactgtactttttgtttttgcttgtagagcaggatctcacggtattgcccaggctggtctcgaactcttggcttcatgcaatccccccacctaggcctcttgtattgttactgatttcaaatttaattccattttggtccgagaatatacccttgtattaattctgtctgtttcaatgtatttaggattgtttcatggcccagcatatggtctctcctgatgaacataccaccacgtacacttgaaaagagtgtgcattatgaagctttggggattgttttataaatatctcctatattctgaatgtttgtgtcccccactaaaattcgtatgtggaaacctagtcatcattgggatggtatgaagaagtggggcgttcaggagktgactaacacatgaaagcagagccttcatgtatagaattaataccctaataaaagaggacccagcagggcacagtagctcacgcctgtaatcccaacactttgggaggccgaggcaggcagatcacctgaggtcgggagttcgagatcagcctgaccaacatggagaaaccccatctctactaaaaatacaaaattagccaggcgtggtggtgcatgcctgtaatgtcagctactygggaagctgaggaaagagaatcgcttgaacctgggaggcagagtttgcaatgagcccagatagcgccattgcactccagcctgggcaacaagagcaaactccgtctcaaaaaaaaaraaaaaaaaacaaaaaaagtgggcaggggattgttttcaaaagcaaacatacaaagggctaaaaaatggtcaaaattcatgaaaaaaatgctcaatawcacaaatcatcagagaaataaaaaattaaaaccataatttacatataaaatgagaaagtaagtacatttacgaagaatacttgtaacatttcgttaaaataaactttccactttcccttttctttttaaaaattgttagtcctttgtgttgartgaataaatgaaattgtgactgtgtaaatgagcagaagcttaatacctgatgatatgtaacactcatctgaacaggatgtttttaggaatatcataatgccttatccccattcccaaaagctgtgcagtcaagtagctgttttcttcatgccactttgggatagaaaaatgtgataataaaccaacatttctgcactttaattccctatcatgttgcactaaagtataaaatagcctccagagccccagctttaagctaggaagagtccctgtaactacaaccatataataaacatactagaaattagacttctgttagattctcaccactcgatttactttttagcagtttaatgggtatatttttaaatcttcctttttgtgtgtggaataacatgttaaaaacctcaaaaaagatgtcaaatcatgccccttattttaaaatttagcattccagggtactagaataaaatctaaactctttatgctagttaagtccctgaagatctggtttctgcagactcctctgaccttgctaacaaccacttgtcccttactctacggatcagtatggtaatcttcttcctattcctaaaacataccaagctcatttttccatcacggtagaaggaaagcatgattgaaataatgtttgaaaccaaaagaaagttaaggaaaaactgagacggacagaccactctctggatctctgcttttattttcttaagagaaagaggttagtgtcagcaagctggaaatttaagtgtcaccaggaaagccaagggatgcccaaagctagtataagtcatcctaccactcaaatgtacattacttatccaaactgtgtaacttkttaaaacttcagaaacaaacttccaaagtacattccagataagtaccaatttagtaagactgacaatgaataaagagtacttataatatttctaaaatctaataaaggtggtacttaaaatcacttaaggtcttcacatcagatgatcaagttacataggtaataccatataagagcttgtgaaatgacatattcaatgttctttggaattagaaccagagacattgaacacaatgtctttgagccttagttttcaagttagtcaaaattaatagtatttcagagggctgttttaaggattaagcatgacaacaaaaggacttaacaaagtaaccaacagaccttaagtgcgaacgctgtttaagcattggttttcctttcttttttccaacttaaaagaatgatgtacaggccaggcgcagtggctcacacctgtaatcccaccactttgggaggccaaggcaggcggatcacaaggtcaggagtttgagatcaacctggccaatatggtgaaaccccatctctactaaaaaatacaaaaaggccgggcgtggtggctcacgcctgtaattccagcactttgggaagctgaggcaggagaatcatttgaacctaggaggcggaggttgcagtgagccgagattgcgccactgcactccagcctgggcgatagagtgagactcttgtctcaaaaaaaacaacaacaaaaaacacaaaaattagcctggtatggtggcacgcacctgtagtcccagctactcaggagactgaggcaggagaatcgctgtagctcaggaggcagaggttgcagtgagctgaaattgcaccactgcactccagcctgggcaacagagcaagactccatctcaaaaaaaaaaagtgaatgatgtacttcataaagactagagagacaatatttggacagatatttgtcaccatgatcaagactgcactgtaatgaaacgttaaaaagagtaaggacacataaaatgcagttatttagagaaacagcaaatttgattttaggaagaaccaacagataaattggccagtctcatttcaaaacaaacgagaccaaaaaaagcagagagagaaaagatatacgacacactaatatttttaatcttggctttttatattccagtagtggaaccacatgctaatttttttttctttttaaacagatagggccttgctatgttgcccaggcaggccttaaactcctgaactccgggggatccttgtgcctcagcctcctgagtagctgaataactatagctacgtgctagcatacccagtaagtattaagatatatttgagattttaacatgaagaagtaaaaattatctcttaatatgaaaaaagaagaaaaatgaaatttatgattggaatatagtaacacgtctgtataatttatcttttcaaaaacagatctgaacaagaaaggttactgagtagcagagatgtaaaacatctaaaatccataaagccaagggtgacaacatagtaattagggaaggaggataaagagaagcaattattaacttataaatatgtaacaaaaattggtcatataaagaatgttttaacattaaattttaaaatgaaacaaaagcagtacatggggtgaaaagaaatagcaactaccttaacacttgttctaagtccattttctgaagaaattcaatccaaaaagtaggagtctttgctatttaccagctgcaatgtttaaggatcaacatgatacaattagttcttgctcccaaggataactacaattatatttcaaacagagtgcaaggataaatatgtgaatagcaatccttataaaaatactaccatcatataactttttaaatttaagaagtttatacaacacatgtatgtacattctctcacttcatttttagcacctcaattctctcaattaaatcctataaagtaggtattaaatatgtttttcagatgagaactcaagacccaaaaagattaagtgatttatctgttacacagctaatacatgggagagtcagaattcaaacctgagtctactttaataccacatgtagatttttttttttttttttttttgagatggagtcttgctctgttgtccatgctggagtacagtggcatgatctcagctcactgcaacctctgcctccaaagctcaagcgattctcatgcctcagcctcccaagtagctgggattacaggtgtgcgccaccaagctcagctaatttttttgtatttttaatacagacgacgtttcaccacgttggccaggctggtctcaaacttctgggcttgagtgatccacccacctcagtctcccaaagtgcggggattacaggcatgagccacagcgcccagccccacatgtacatttaaaaggaaacagtacttgacaatatggatgggagacaaaaaagcaaaagatgtattttttaattctatagatgtcaataattctaataagaaaatgcagcagacatttcctgtgaaagtagtaactctagtagtaaaaagtaatatcaatatttgatttctcagggcctgacatacattaggaacttactgtcagtggactgaataaatgaaggggatgagtaaaacaatgaggctacatagtttctggtgtccaatttttaaaggacatatatataacaggagagaaacaaatatgcatatatacagattaatatcatcaatcttataagaacgttatcagaacaaactacattttataagtaayacaaaggaaaaccaaacaagcccattgcctgcataaattcaggaggctaaactaagaagaaacaagaatattacatgggaaagatggtgtaatattaacagatgcagacaaaataaacaactactcacacctcctgctttgtatccatcttctccactaaggagaattgaataaaaaactggaaaaggtagaagaaacatagttaaaaagtaaatgaagagcaaataagaagacagagaatatctagtcacttttaaatttagtttttttctgtggagcttaactaatcacaggtcggaattaggcatgtatgcatctccaatgtgtggaaaacaatactggaagagaacagtttctaataagcaattttggacatgaagaaaaacgtttcctagaaaatatgtatcaaacaatcacagaagtttcaagtgtaaaagtttaataatccatcaatatgtgtccatatcaaagtccagaagtttttatttgtaagatggtttaaaggcataaaaaaagaaaaaaggctacaccaagaggtaattttatttccctacaagtgatgttaaatttttattatcaataaatttcttctttttaggtaggctagtataactaatccaacactagatttttttttaagcaaaatagtatgggaaaatatcctgaaaatattcttaggaataaaataaaaaaataaaaactcaataatacagcacaagcaggtactgatagctggaataaacaaccataacttataatattaaccaagaactaaagtaaaattgataaaatgtcttcaaatatattccacagggctctatcattacacttcagtcaagacacttacaaaagtcaaattgtgaaatgaatgtaggactcaaagaataataattaacatgctggatgatgaggattgtaaggtttcaacagattgaaaagatgggtaaaataaactaattttaaaataacagcaaaaccagtggtagctaacttagtggaaaaaaaaasaagcttaatctaaagccaaatattagggaaagctgattaatatgctaaattaccaaagataagctatgccccaaaggttcaaaaattgagtaggggtaaagtagggctaacaggaagactgaccatagtctactgaagcagcagctagactctcagatttctccctgactctagcctagcaactgtctcctttcccattatggtacgaaaaaaaggtttatttcttagaaaaggttatgaaagggtccctggaccaagaagcatattaaaacaggttgagggcagagattaccattgaaacagaagaaggattaagtgaaagctgacataatgaaatatgtctaggactagaccctcctttcatcctcagtcttctttcctcatagggcataactctgaaagccagataaagcactgacagatttctttggaaacctaaccactttaaaaaaatctaaatatacagacattaggtattcccctatggaaatgagcagatctcaaatagataagatgacatccaacaaagtccacccacatgctcagagtttccaatgtacttttttagtgttactctattacatacaagtagtctgaaagaattgtcaggaatttcatttgaagaaaacattagacataaaatacagagactaaaatatacatagggaaaaatgacaggaagaaaatagaccaaagagaagaaaacaaaacattaaaaaaaaaaagaatattctgaatgaggtaagaggaaaataccataatcaaaagcaaaaggatgctatcaaaatacaacaatctggagaaacaaacaaaaaaaaaaacagaaaaaaatctttagcaaattaaattatgatagcagaaataaaaaatacaataggtttagaaaaggaagctgaaaatttttccaagtagaacataaaggatataggagacaaagggaaaaacagaatcagtgtggttcaatatcccaacacaagtttcagaaaagagaaacataacagagaaaaaagagaatcttagaaacaattcagaaaaacttttcagaactaacactcataaatttcaaaactgaaaagcaactcctcaaaagctaagcacaacagataaaaatcacctggtgcagtggctcatgcctgtaatcccagcactatgggaggccgaggcaggtggatcacgaggtcaggagatcaagaccatcctggctaacacggtgaaaccccctctctactaaaaatacaaaaaattagctgggcgtggaggcgggcgcctgtaatcccagttattcggaaggctgaggcaggagaatcgcttgaacctgggaggcgaaggttgcagtaagccgagatcgcgccattgcactccagcctgggccacaggagcaaaactgtctcagaaaaaaaaaacagataaaaatcaatgtacatctaggaaagttattgtgaaatktccaagcagagacacaagaaaagatcccacaagtttcttttatataaaagatcaaaaaccagaacaacatctgactttttaaaagcaaattcagaatctggaagtcactgattaatgcttcccaaattctgaggaaaaatcatttctaatttttcatctagaattctatatccagtcaggtctgagtcaagtttgagagtagaattaagatattttcagatgaacgggccatcaagtatatcctaaatgtagggtggtttttttttttttaaaggagtaagatatactccatcgatacaagagaataaactaagacaagaaatccacgaaaagaatccagcaaaagtgagtcaaggaaatcaccaagatgatagtcacataaaatcaagaggcctggagggccagtacagatataaaggcctgaggaaagatttcataaagaagataaaattgacaggatacctaatatacaaacctgaatgtactgaaatgattttacgtaacttagggagtatctgattaatcagtggcaagtacatatcattaattccaaaaaaatagtattttccaagaaattaaaagtcaacatatactaagtagctaaccaaaaattgtgttgacattttagaaataaaacttttaaatgtttactttaatgttctctcttaagtctcatgcaggttaatttctcaaattactaatgtttaataagtactaccatttcaaaagcacagtcattacaaaccactcgtaattgacatcttactacatacataaaacaacttccatacacagaaaattctgggagggatggaactggcaaccaaaatgagtgactgaggccacagtctcaaccaatcaaggtttattaagccagctttagggcccatccaggaaaaaccaacacatatgtaactgtttttccaaagagattttcaggaggtttcctatttatgtgtttccttaaagcggggcaggcatgtaggaagagggacaggtaggcagtaacgtgaatggttaaattcctgtgagattttaattggtatctagtaaaaactatattttacataatattaggtgaatgaaggaaaaacagagtaaaggaaaaatcaattctgcagacatctctgggtcagtggaagaatgactattcttgtctctgttctgcatctgagaaggtaagattgtaaatgacattatcagtgtggcacagaacagaccttagttttaggagcttcacttagattgtacacctaaagttacaattggcatgtatctgtttgtgggagaccagcgaagcatttgcttttcagtgatctgtaggggaagtctttcatagatgcctgaggtcttttacttttacatgaggatctggttaaggcataatgttagtaacagctactcacttgaaagagtgtgttgcatgactcagactccaggattaactttccttttgcataaggagtctgggggtcctgggatttttaatttcctttacagaatcaagtctaggctgctcagccacacagtacctggcacagaggaagtaataaatatatatttgaataaatgaaaagatcatataaggaagtgtcttctctagatgtattaaaagatctcactgccccttcctaaatgccaggaagcactgtcgaatatctatcacagaaaactaacgacaagcagaccctaggtattcctactttaaaatattgtaaccatttataaatgaccccacaatacatacagtgacatataacatattatttcaccaaggcacaaatttaatcacatatattgcatggcttttgtgtacaggaaatagttggtgaactattcatccacagttcaaaacatctatggatttctcctaaatctcatctttttgtgatctctacttagtctaacatgatctactatttctaaagttaacaaaatgtaacagaaaaggttactgttaatactgtgaaggaaatgaagagtgagtgaggtgaaagaaagtgataatatctataaatgtcaggaccactgctaataccaagctgtcatatgaagaactggaaaaaccttccataagaatccagagacataattattaatgacagagccaggaccagaaatcagtcctaacttctaagcaaataaactttccagcataccttattaccctttccttgagttagcatcttctttttaaagacaaaaaatatactgagcccaaaccagtaattttatgtatgtttttattatatattttattataatactctattttggttttcataataccccacactacactaactgttccaaattacttctttctaggcccaagagaactccagagctctaatggagaaaagtagataagagccgtatcttccaacagcaaacaatcctaagcattttcaggtcttaagcactaatcaactttcagtcaacattaaaactacttttcactgttgaaaccatggagaaagacaagtaaatcttgttactaatcagtctatgtcccatttaatgaagaagttttggacttttggtcctcagagcaatgaaagaataaacttctgttgtttccatccaccaaatttgttgtgatgttatggcagccctaggaatctaatatattaagtttcacagatattatactgagtgtaaaaagccactgaatgattccagttatattaagttcaacaacaggaaaatctcatctttggtgatagaactgagatcagtggaacagaggggcggtatagactgggtagaggtaccaggttaactacagtgagtgagaaacatggtagttacatgagtagatacaaatgtgtcactgatttttttttttttttttttttttgagacggagtctcgctcttgtcacccaggctggagtaggtggcccaatcttggctcactgcaacctccgcctcccggggtcaagcgattctcctgcctcagcctcctgaatagctgggattacaggtgcccaccaccatgtccggctaatttttgtacttttagtagaaacgagttttcaccatgttggtcaggctggtctcgaactcctgacctcaggtgatccgcctgcctgggcctcccagagtgctgggattacaggcgtgagccaccacactcggcctgatttttttttttttttttttgaggcggagtgttactctgttgtccaggctggagtgcagtggcacaactttggctcactgtaacctccaactcctgggttcaagtgattctcctgcctcagcctcctaagtagctgggactacaggtgcgtgccaccatgcccagctaagtttttgtatttttagtagagacagggtttcaccatgttagccagtatggcctcgatctcctgacctcatgatcccacctaccttggcctcccaaagtgctgggattacaggcgtaagccacagcgcctggcccaatttttttttttttttttttttttaaatagagacaagatcttggccatgttgcccagactgctcttgaactcctgagaactcctgagctccagctatttgcccacctcagcctcccaaagtgctgggattacaggcttgaaccaccatgcccagccaaaaatgtgttttttaaaaacatgaagagctatgtacaactgaccctggaacaattcaggggttgggactgaggacagcccgcccagtcgaaaagctgaatgtaatttttgactccccataaaattaactggtaatagcctactgttgaccrgaagtcttaacaatgacataaagtcaattaacaaatattttgtatgtctattatatactgtattcttacagtaaagtaagctagagaagttattatgagcaagagaaaatacatttacagtactgtacttattgattcctaaatttctgttctatggtatcattcgaagtttgcgagattgcactaaacaacattaaaaattatgcaaggactgcgagagatcatttcttattgcaatatggtatttagtggagaggtcaactactcacatggagatgtcagcatcacactgagttttaagcagacattcgcaacatttgagttcaacacagtaaaaacaggaggtggctaaaaayctatcacagcatgtactaaagttaattttatgtagttatgagttaatactgcatctttatgtttgtttatatttctctctactgtaaatagtgccatgtcacgtctctgtgtgggtaaagttctgatattttaactttttaaatagatttgtgtatattttatggtagcaaatgataaaactaagatgtacatatattttatgcatttatgacatacctaasattttctaaatttttaaaaatatttctaggctacatggttcatctatgagttttttcaaattgctgcaaatctctaaaatattttgcaatatatttatttaaaagtatctgcatataaattgactctcaaagttcaaacccacattgttcaagtgtcaactgcacagaagaatagtgtatacgagggatgatattgatttaattaaaataaataagaaaaagccgaaacacaaaaatagagtatatcaaaacaataccacaaagtagttgctaaataaattcctattgaaagactaagcagttcagtgttaccttaagacaagccattttaatcaggcagacaaagatatacaacacaatttataaattttagaatggtctcatctacaaaagcgtatgtatatgtgtgttatctcttaaagaggtaacaggaaaagaggtcaaagacaagcaaccttcattattttgatgagacagaactgtttggactttacctggtctgctgttgagtatcaaaagaggttattactctctttatgttttgctaccttaaatatatggtattcatgataaatttacctctgttaaataacattcttaaaatttatgacatattatagtttaatatgtgtagattttaagacaggttttctgagcagaattacaaaatagagacataatctcatattggaggaaaattgtgggcaactactgggaaggaggaagtcttagatttattcagtaaaatagtttgctaaacttctttctggtgggggaaagattcttcatagctatcttatgctgccaggtaacttttcttccrtttagctgagacaaaaaacggttatcaagcgataagataatgaaaaagtatttttttccttgataagaaatactagaaatctaaataaagcaaatattttaactttaggaagtattttaacttttctccctggatttttctgtcaattcagattataagctgaatgaaagagtcaaaaatgtttgtggtaaaaattagagaatttcaaaattgctaacactgaaaaataccagataaaccaaagataaaaggttccttgattctatttaaatgtgaaaaagaaccatagtgaagagtaactgatactgaaagaatgaaaaatacctacttttacaaagacatttggatttcttaaaagtatgctatcaatactttttttttttttttttttgacacggagtcttgcactgtcgaccaggctggagtgcagtggtgcgatcttggctcactgcaagccccacctcctgggttcatgccattctcctgcctcagcctcccgagtagctgggactgcaggtgtccgccaacacgcccagctaattttttgtatttttagtacagacagggttttactgtgttaaccaggatggtctcgatctcctgacctcgtgatctgcctgcctcggcctcccaaagtgctgggatcacaggcatgagccacgcacccagccaatactgtgtattttctagtattaaacactaagaaaactgaatctactaaacattcttagtaaacagtttctctttttttaaccttaaaatgtatattttagtctgtgtattatatattctcatttaaaaatatcaatttagagatctcaagtctaaccagaatcaccataaggccagagtttgttccccgtaattttctcaactctcataatgtgagcaccgtgctcaaaaggtaactgtgattccagttactgacatacaagaaaaatcgagatgcaagaaaatcagcctatcaaaatatatattaaaaatttattctgctccgggcacagtagatgatgcctgtaatcccaacactttgggaggctgaggagggtgaatcacttgaggtcaggaattcaagaccagcctggccaacatggtgaaacttcatctttctttgctaaaaataacaacaacaacaacaacaaaactcaccgggtgtggtggcaggtgcctgtagacccagctactcgggtggctgagacaggagaatcacttgaacccaggaggcagaggctgcagtgagctgagatcaggccactgcactccagcctgggcgatacagcaagactctatctcaaaaaaaaaaaaaaattattccaacactagagaaaaaaaaaaaaactgtcctggatgaactgacaaacaataggttggtattcccaacaaggccttaaaagtgaactgaatttaagtgcatttttgctttatgtgctgtgccaactttgcaatttaatcctcttcaggatacaactccactgactctggaagtgactaaatgttaacagtatgactttgtgtaaacatatagttacttagaaaaccccacttaagaataaaatttttccttatataaaatgactttactattaatatataatatcacaggtactacgtatcagatatacctcattatgattaaatctttaaattttagtgtcattattcattttttaaaagctgccagtttactaaattatataacccttctccatctaataaaaccttatcagaaagtaccaatatgaaagattaactattatgtgatattaataaacagttatcaattatgcttccttcaaagcttttatatatcaaaatatgaaactagttctcacttgtaatataactggtattacaaaccattagttcaattcatgtggattcagcaaaactttattataggtgtttgatttttaaattttaatttagcatattcttagaactactgatactgaacatgacctttaaaaaaatctttttatttttgtaaggtgataggtacacacagccaaaactttcaatcataatcctctggaagaactaattcagtatataaacctaagacatacaaaacagttacaaaactgtaaaatgaaactatgtaagatcatgttccttaaattttccttaaaatcgtctcataacctaacacaatgaaaaacaactgcaatgccctacagaaaataagcacctgcagaaaaagatacagtctggcaactgctgatactatcaattcatcacttcattcttaaacattaaggcaactccttccccttcctgtacgctcaatccatgaagttgaagaaaacagagcttacagtgtttttgctgaactcccacaactacacagctgaacccccacaactacacagctgaacccatttcattctctaaagaaatactgtccttcagagaagaggctttaaagtggattcatgcagtatcctgcccttagcgagaagttccagataggataacttctctgtgatgcatttaacccctatcaaaaagcctctattaaaaaataaaaaagccaaccaaagacgatacttgcgattaaataacactaaaataagagaaacttataacagtgtttaaattgttatacatgatcatggaaaacatgatcatggaaaaaataacacacatcaaaccctaataacaattaactacatagccgaagacattttaaatctcaaagtaacacataattcacaaaacaatcagcatttatcttagttttttttttttaataataaacatttaaaagtcagctgaattgcaatccgtaattgcaggaaaaatctatctcattttatgcatgtttttcaatgtattcttaatattttagagagcatgtgatattataaaaaaataatttaaacatttctttggcatgttactaaagcatgaaaggcctgtcaagtaacaaggggaaaactgtctttttggctgatcatgctgtgctggcaatttctcaaacatctgctaaaggtcagatttccactgcatggaaccaatcaatggaattatacaattctcctaccactttaagaagctaaacaaagaacactattttacataagtaatgaaatataacttagctttgtaataaattgtagcaaagccacccccttatcacagaattcacacattttaaaaatgcttacaaaattctatttgctaaattttaacctgtttactgtattcatcaaatatgtatacaaaactctaattttcctttggtaaaaactaaacaattgatttttcaatttcacactgcaaaaagtgctgcatgttcaaataaaattttaaggatgattttaacaataaatatttatcatttactagtctgaaaacatctaacagtgggtcactaagaatacagaatcactttgcaactaattcacattactaggtgactgagtttacacaagaagttacattgttaaaactaaacttgtcacaggatcatactgatttctctgtgatcaaagtcactgacggcacctactttgaaaaaattttttacccaaaccatcttgaaaatatttcacagcctacaactcaggaaacttgcccaattatttaaacaagtaattgaatgcaaccggttatcaaagaattggaagttaaatatgttaagaagcatgctcaatgtacatacatagatgacgtactactatattgggtttttaaaagcagaaattaaattaaagctcaacttaaaatgctttttccttcaaagtaccaccctatgtagttaaatactcaaattgctaccaaacttttagtatgtatattatggctataaagtgatgataaagatttaaaatatgcccctttttataagcctgcccaattacaaatgaacaattttaaattctggattaaaacactttgcccaatggccctcataaaattagtgggcaaaatctgaaaaatcaagtgactacacagacttgttaaaaagcttaatgttaacattttgataacacagtaatcttgtgcctcatttaaaaatatggtgaaactgactaggaaatggatggatacaactgtctctgtgattatgctatattctacagaagttccatcatattgtatatgttaaatatttccttccaaacaatgaaaaaatagagaatttacttctaatgaaacttgtattaagaaagttaggtcctaaacaatccactcccttaaggaacactgcaaggcaactggaataagccagttattgtcaacaattagactggtatcattttcctgtgtaacatagacaagtttttatttttcaacgaactcaactatttcaggtcataattttgctctaataaacctaatgactttatagaggcttaaaacttaattctaaagaaagatcaacattgagactrcgttaaatattttccaaaaatattctcatcatagaaagataaataacctttagcttttaaggggcctaaatcaaaatcatattctgttttattgtgttacagcagtagctcaataatttaggtatgcatcagaacctaattgagggcttttaaagcaaactgcttagccatactactatagtttctcattcagaagatctgaggcaggatcagataatttgcatttcaaacaaaatcccaagtaatgccaatgctacctggtctggggaccacactttaaaaattaccatactatagaatacttataaaatgcatcctgacaaaatatctcatctatcctgcatacagttttgaaattaatcttccctttaaccacatttaagaggcactaagtggttattcagaaattatcccatgattttccactgccactaacatccaaatttattatgtctggtactgaaggtacaacaaataaaacaattagatttaatctcaattttcctttatggctcaaaggaaaggataccttcacaattttttcttaaagccatgccaaaaccagttaatattttctatgcacttatgtatcagacattatcaggtgctgagttacaaacaataaaaggcttacagcagagaaatactaaaaataaatttaaaaggccaccctactgaaaggacagacatataaacaaataattaaaatatcatgtggggggggtttctgcttcccgtatatttgagaacagcatcaaacattcccatgaccattaaaaatctagataaggggcctggcatggtggttcatgcctgtaatcccagcattttgggaggccgaggcaggggatcacgaggtcaggagttcgagaccagcctggccaatatagtgaaactctgtctgtaccaaaaatacaaaaattagccaggcatggtggcacgcgcctgtagccccagctactcagaaggctgaggcaggagaatcgcctgaacccaggagacggaggtggcagtgagccgagatcacaccactgcactccaacctgggcaacagagtgagactccatctcaaaaaaaaaaaaaaaaatctagataaggaccagacacagtgactcctgtctgtaatcctagtactttgggaggccgaggagggtcaatcacctgaggtcaggagttcgagaccagcctgaccaacatggtgaaacctcatctctactaaaaaatacaaaaattagctgggcatggtggcaggcgcctgtaattccagctactcgagagtctgaggcaggagaatggcttgaacccaggaggcggaggttgcagtaagccaagatcacaccattgcactccagcctgggcgacagagcaagactctgtctcgaaaamaaaaawatatatagataagatatactttaagtttgggggttttaagccatgtactaataaaacagacaagaactactgagccaagacctgaaaaggtgagaaacccagggagagaaataagcaaagcactgtcagctacttttgtcctggggttgaaaggccaagaaatagacttggtggcttctacagaatagatctaaaaaagtccaaatctagggttccaacaaaggtaaagaccctgattgagttagaattcagaaargctatwtcctgggagcaaaagtaacccagaattaagtcagttcctttatggtctgcagtccagctttgagtaatcaaggtggcttagaaaatctcaaatcacactaagaaaaggatagttaatcagacaatccctatcaccaggcacctggatgaaagaaatacaaatcctccatgaaataaaaaaaaaaaaaaaaaaaaaggccaggcgcggtggctcacacctgtaatcccagcactttgagaggccaaggtgggcagatcacaaggtcaggagtttgagagcagcctggccaatatggtgaaaccccgtctctattaaaaatacaataattagccgggcatgatggcgcgcgcctggagtcccagctactcaagaggctgaggcaggagaattgcttgaacccgggaggcagaagctgcagtgagccgagatcacgccactgcactccagcctgggcaacagaggagacgctgtctcaaaaaaaaaaaaatcaccccagacattaagttatttctacaactaatttttcaaatgaagggcccagcacacaatcacagataaacaagtacatgagaaaataaggtgacatgaagaaaaaccagcagaatcaataaacaacaaaatttgtaagtatttctgtaaaactaaatgccaacaaaagtaccacatatgaaaatttgtgaacacagtgtaagaataaaggggaaaatctaaaggctcaaatgggtctttaaggcccatttaaagactaaaaaagggctgggcatgggggctcacattctgtaatcccagcagtttgggaggcagaggcaggtgtagcatagatcgcttgaactttgtagttcaagaccagcctggacaacatggcaaaaccccgtcttcacataaaatacaaaaattagccaggcatggtggcacacgcctttagtcccagctacatggggggtggggggcgcggggcagggtctgaggcaggaggatcacttgagcccgggaatctgaggaggcaatgagccatctttgccccagcctggrtaacaaaacgagacccagtctcaaaaaaaaaaaaaaaaaaaaaggaggctgggaaagaaagaattagttaagaacacctgacaaaattagaaagagaactgcaaaacagacaaactctaagaaagtaaaaggaaagaaaataaagagcagagcagaaaacaacaaagtacaaaacaaacaaaatcaacaaagtacaaaacaaacattgtataatggagaccaaaaaaccaaaacatgcatttttgaaaatattattgaaactgataactttctggtgagactaaaaaaatcccaacaagacaaaaaaatgaaaaacacactgcagcagatcttagacattgcttataagatgcaaactcaggccaggtgtggtggctcacgcttgtaatcccaacacaatgggaggccaaggcaggtggatcatctgaggtcrggagttcgagaccagcctgactaacatggtgaaaccccatctctactaaaaatacaaaattagccgggcgtggtggctcatgcctgtaatcccaactacgcgggaggctgaggcaggagaattgcttgaatccgggaggcggaggttgaggtgagccgagatcgccccattgcactccagcctgggcaagaagagtgaaactccgtctcaaaaaaaagatgtaaacttaagatggcaaaactatatagagcaaagcaagaaaattattgccataaagttggcaattatctctaggtagaagaagagatttgtgatgattgggaagttgaactggtggaggttctggagtgctggcaatattctagttcttgacctgggggatagttacacaggtgctcttcagaatgattagttgagttgtacatttgtactttgtgtactttttgttattattttgaactgctgtgctccttccccccaattaatatattgaagtcctaacccctgatgtgtctgactatatttgcagataggacctttaaggagataattaagaataaatgagatcatatgggtgagaccctgaagtgaaatctgattaagactggagtacttttaagaggaagaaatatcagagcttcacttcctctttgcttctcttaccctgtcatacacaagagaaggccatgtgaggacatggcaagaaagcagctttctgcaacccaggaagagagcccacactagaaaccaaccctgatgacactgtgatcttgaatttgtggcctccagaactgtgagaaaattaatttctgtttttaagctacctgtctatgatattttgctatagcaaccctagcaaactaatacagtcccgtttcactttttaaaagattaaaaatacaaggtgttaaatttaaagataaaaatacaatgaaacattttttgagatcatagaagagagagacaccatttattataaaaacaatgtgtattttaaaagaaggggctgggcgcagcggctcacacttgtaaacccagcactttggaagatcgaggtgggtggatcacctgaggttggtaattcaagaccagcctggtcaacatggtgaaaccccagttctactaaaaatacaaaaatcagccatgtgtggtggtgtgcgcctgtaatcccagctacttgggaggctgaggcaggagaatcgcttgaacccaggaggcggggttgcagtgagccaactgcactccagcctgggcaacagagcaggactctgtctcatgtctcatttaaaaataaaaaaaagaacacttgccatttgctcatgttaatatggcaaataatagatctattttacctttttcacacttctgctkacaagatttcctccatctggaatatcttatattttctactcagcccaagcacttttcttcagaacattaattctaatcatatatattcaaagcaggagtctctactgtagacccactcaatgaacattaaacgtactggacttccaaactatatgctactttttgcgtagagagcatgagggcaataatatgcttcctgaatttgattaccacaaaaataaatagtggaacttgggaaagtttaaatcatgggcacagaaaatattcaaatggatgatatagcctttgccattccatactaacgagagggcagtttagtgaaaaggtattcacatgtactttttacaaaaattgtgataagatgtataatataaagttaatttaaccatttttaaatgtataatttaagggcactaaaataacttcacaccctatgcaactgtcgccactgttaccaaaactttttttttttctttttttttttgagactgagttttcgctcttgtcacccaggctggagtgcaatggcacgatatcggctcactgcaaactttgcctcctgggttcaagcaattctccagcctcagcctcctgagtagctgggattacaagcatgtgccaccacacccagctaatttttgtatttttcatagaaacggggtttcaccatgttagccaggctgttcttaaactcctgacctctggtgatatgcccacctcagccttccaaactgctgggattacaggcgtgaggcaccgcacctggcccaaaactttttcatcatcccaaataggaactctgcatccattaagcaataactcctcattctcatctccccccatcccctggtaatcactaatttactgtctctatgaatttgcctattctagatttaagtggaataatatatctgtccttttgtgtctggcttacttcacatagtatagtgtttttaaggattatccatatgttgtatcatgcctcagaacttcctttttaggcaccaatgatattccactgtattatatagccacctcactttatttatcaattcctctgttgctggacatttgggttatttctgccttttgtctattttgaataatggtactggcatacaagtatctgtttgagtctttcagttcttttggataaatatgtagaattgaaattgctgagtcatatggtaattccatgtttagcttttcgaggaattgccaagctgctttcaacagtggctaaaccattttacgttcccatcatcaatgtatgaaggttccaatttctccaatcctctccaacacttgatgttttccaggttttgtattttttaaaaaaattatagtcatattagtaagtttgaatctcacagtggttttgatttacatttgcgtaaagatactgacgatcttgccttatgtttaatggccattttcatatctttgtagcaatttctattcaagcccttttcccattttaaaattgggttgttttcctgttgttcaagttttagaagttctttatatattctgcatattaaaccattgtcagacatatgattgtgtgtatttttttaattaaaaaatggatttttagagacaagatcttactgtcagcattatcgtggttcactgtaacctcatggactgaagtgactgaaggtgtaaacctcctgcacctcagcctcctgagtagcagctgggactacaggtacaaatcaccatacccagcttttttttttttttttaagtagagacagtgtctcgccatattgcccacgctggtcttgaactcctgatctcaagcaatacccctgccatggcctcccaaagtgatgggattacaggcatgagccactgcacatggcctgtatttttgaaatgaaaaacaaaatgacacttcttcatataaaactattgtttatatggaaaaatcagtgttgttttaaagtggcttgctcaacatcatctttaacttacacaaaaaccattattatttctttttttttttttttttttttctttttgagaccgggtctcattctgttgcctgtgctggagtacaatgatgcgactgtggctcactgcagcctcgacctcctgggctcaagcaatcctcctacctcagcctcccaagtagctgggattacaggtgtgagccaccatgcttggcccaaaacccattattttaaataatctggatctatcattcagacctgaacatcatgataaaaggtattacaatttcttgagaaaaaagtataaactgctcaatcagcaaaagcaaactctcgacaccagattttctttactcagagaaataaaagtgatgatacatttggggtattataagaccacattcaaatctgcaatgggacatcaagaaaactttttcagaactgaacacaatcaatgagtaagttagaaatcctcccgccactatttctcatgctgaaacaytcaacccttcagcttttaactgtggccgctcaccaacttaccagcttgaaaatatctttccataatttctactctattacacataaacacctagaactacaggacacaggcactaactacttaactgctatttctaattttagaaattcaccttattttctgggaaaaaaataaaagtggaaaagatgggaaccctgaagtaaaatataggtataaatacagataaaattttgaacaactgcaaataatatatttcctttaaactgacatgaagctattaatactatatccttaaattataaaaaattttaaaactgaattttgatatagtcaggcatgcaggggaggccagaaagccaaaatttttaggtgaattttaaaacacagtaaaaaattcagtggtagtttagatcttatgagattaaaagtctctatacaatctacaaagaaataaggagtgatgaaactgctcctgtgaattctctaaaccatgtccaaactgcwtatcacatgacaaataaaatctcagtcaaaactgaaaagtctgggcgcagtggctcatgtctctaatcccaggactttgggaggccaagacaggcagatcgcttgagcccaggagttcaagaccagggtgggtaacatggcgagatcccatctctacaaaaaataaaaaaaattagccaggcatggttgtgcacacctgtatcccagctacttgggaggctaaggtgggaggactgcttaggcccaggaggagaaggtggcagtgagccaagattgcaccactgcactccggcctgggaaacagagcaacaccctgtttcaaaataaaaacacaaaagttgaaacaataattaaacattttatatgaccgaatactctgcaaatacattcccctcaacggaaatatattctatgtgagtgttcttgaatttggagatatgcaaaggccaaggacacagccctactgaatgtcaatgtttactatgtaagttagggaaaacacatacacaggcataagtttaaaaacaaattttaagacatttttgtaggcattatttttctatattgttcttytatatttatttttcggtaagatgtaaaaggatgtgacacaatgcatttaagaatttcttgccaggcctggtggctcacgattgtaattccagcactttgggaggccaaggcagaagaattgcttgaggccagaggtttgagaccagcctgggcaatacagcaacacccaccctctctctacaaaaaaatttaaaaattagccaggtgtggtggtgcatactggtagtcctcacaggatccttggggcccaggagttcaaggctgcagtgagctatgaataccactgcacttaagtctgggctacagagcaaaaccctatctattaaaaaaaaaattcttaaacgtaagagactgtattactactacacagtaaatataaaaagacaatgacactttgggaggccaaggcaggtggatcacgatgtcaggagtttgagactagcctgaccaacatggtgaaaccccgtctctactgaaaatacaaaaattagctgggcgtggtggtgcgcgcctgtaatctcagctacccaggaggctgaggcaggagaatcacctgaacccaggaggcggaagttgcagtgagccaagatcgcgccattgcactccagcctgggagactccgtctcaaaaaaaaaagacaatggaatcatccccaacacataccttagccacaggttacttactatccttatgaaaatctcatttcacaagaaagaaaatgaaatatatgaagttttttccttttcaccactagttttagaagtcttactctgagtatctagtgtaagataatattttctccaaaagagaaaaagatagaaaattagtaatgtacttggcttcatgactccattactgatttagcatagttaaaaatacactttatcatcaagtataaaactaactaatcagatgttttaacattccctttgcttcgattatttccttaaaaagcacagatttaaaaataactttaagacatcctcgttaaaaataagtatcatggtttataatgtggtttgtgtatgtaagtaatgccgtccacacttataacagcatttgctatacacaactcttttaagatatattaagacagcggacaactcatggcggtggcggcagcagctgcttgggcatggtgcagtggtgactgagctacgagcctggcggcgggtgttcgccgagctccggtccccgcgtgtctcccagaaggcggtgaacacctggtcccaggaactctggagcccactccagccgggacgatggtgaagtatttcctgggccagggcgtgctccagagttcctgggaccaagtgttcaccgccttctggcatcagtacccaaatccctatagcaaacatgtcttgacggaagacacagtacaccgggaggtgactgctgaccagaaactgctgtcccagcaactcctgaccaagaccaacaggatgtcccactgggccaagcaactgtttcctgccaatgttcttcattcagtgtacatcctggaggactctattgtggacccacagaatcagaccatgaccaccttcacctggaacatcaaccatgcccggctgatggtggtggagaaacagtgtgtttactgtatgaactctaacaacagtggctggaccgaaatccgcagagaagcctgggtctcctctagcttatttggtgtctccagaagtgtccaggaatttggtcttgcccagttcaaaagcaacgtgaccaagactatgaagggttttgaatatatcttggcaaagatgaaatgcaaggccccttctaaaacacttgttgagacagccaaggaagccaaggagcaggcaaaggagatggcactggcagctacagagaaggcaaggacctcaccagcaaggcagccacctagaagcagcagcagcagcagtttgtgtggccagctcattgccaccacagcatcccagacagtttggcttagccccctctgtgctgtccactgtactttatcattaaaaatcaatttccagccctaaaaatacacacaacacacatatatatatattaagacagctgatcaattactttaccaaacatcatagattttatgaaggaattcatatgagaggaggggactraaaaaacaagtcaccttaaaaacaggaaaacatttttcttttcacagtaaagaaactacatcaatcactttttttaaataaaattctcctttgcaaatgtatatacttaagtttgcatactaagaatattctttgtaactgatttcaattacacagtrccagtaaagaacatttttctctaacttgcattaatattgacaaaagatcaattaacgaaattttacaaattatttcacaaagattacaaaagactcattcattacaaaacattcactacttgaaatgtcagaacagtgttcaacaggtcaaagaaatcaactgaatgtttctgtagttctgatccttaaaattcctttcttgatgtagtaggaactaaatttgcacagaagcagggctttggaatagaygagaaacttttcagtgactataagcagaaacatatactggaacaaaaccattcttcagttcaagttactattgatcgtgattacytcaccagttagactatggaaacaaaacataaaagaaaattaagaacaatgaaaaaaagagaaaaaacaataagggcaagaaagtaaaactcaaaaatgctaattgttcaataccatgtatcttaactttcccttatccttgacttttatctaagtatttctgaaatacccatactattataataataatactcttatctaagtctcagaatctaacaagaaaaaaatactcggtcaaggtaagccaggttatgtagctacacaaagaaccataaaatctctggcttaaaataaaatttacttcttcaggctgtccattccttattgacaggtctttcttttggtgggggggaggggcacggaatttcactcttgttacccaggctggagtgcaatggcacgatctcagcttaccgtaacctctacctcccgggttcaagagagtctcctgcctcggcctcccgggtagctgggattacaaacatgcacaaccacacctgsctaattttatatttttagtagagacagggtttcttcatgatggcaggctggtctcaaactcctgacctcrggtgatccacccacctcagcctcccaaagtgctgggattacaggcatgagctaccgagcccagcctgacaggtcttttttaactcagggggaatagcacctcaaaatgttgcctcaggatctgagaacggaagaagaaaaaaaaaagacagcyttgaagatctcatactggaacttaaatactgcagcaatattaggatgcacaatttcctttcaaacatctgtttttctcacaactcatttattggccagaattagtcacagcccctaacatgaaggatgagaacaaaaactatttggcaaacagcattaatgaccaacacagatgcataaaacgagttgctttgatacaatgttacataggctttgagattcaaggcaaaatttaaagtagcctgcagggaaaatgttgtgagcaaaggttttcctattctaaaacatttgccagttgagaaagcagcaccttggcatctcaaacaagtatgaatactcagcacaatcaaaataaaaaaccaaagcaaaaagaagaatcatcactatgcctcttattatagcactatattactacaaataagaaggtttatgattttagtatctctaactgaatgctccaacagcatttaaattcacccactcaatttcctctcaagacaccatccatatatattcaacaaacctattcagagttcctactgtgagctacttgctatcctagtaattgtaaacagggaagtaagctcttatctaaggactaaaaactctatcccatttctaaatatccagattcaatattaagaataaaaaaatcatgtttatttatgcacaactatttctaaagccactttttaaaaaagttggtatggttccaagacaactcaatgggggaaagaagagtctcttaaatagtactgggacaactgggtttccatatacaaaaaataaagttgggaaattacttcacaccatatacaaaactaactcaaaacaaatcagagaccaatatgtaagacccataactatcaaactcttagaagaaaacatataagaatatctttgtgacattgagttgggcaatggtttcttagatgtgacaccaaaagcacaagtaacaaaagaaaacataaattgggcttcatcaaaatcaagagtgaaaagacaagctaaagaatagaagaaaatatttgcaaatcattatctgataaggaagttgtcttaacaacatgctacaacatgaataaatcttgagagcattaagtgaaagaaagctagatgcaaaagggcacagattatatgatttcatttatatggaatgttcacaacagacatttccatagagacaagagagtagataagcrgttgccaaagggctggaagtggcaggaagaggaacacaagtgactgctaacggatagtgagtttcttttgggggtatactaaaattagataggggtcatggttgcacaactctgtggtatactacaaatcaatgaattttataaggtttaattttatgctatgtaaattatatctcaataaaactatctaatttatttattttagagacaagagctcactcactggagagcagtggcatgatcacaggtcaccgcatcctggaattcctgggctcatgagatcctcgcacctcagcttcccgagtagctgggactacaaggtgtttaacaccataccggctaatttttgttttgttttgtttcgttcgatgaagacgaactcctgggttcatgcaatcctcccacctcgcttcccaaagtgttaggagtatagacgtgatccactgactctggcaaaactatttttttaaaaaagtgacaatggcttaacacctacattagatgacaataaaaccagtgcagatggtcatgaaaagcaaacaaattcagggattatagactttataaccaagtatatctactggtctgtgaaaggaggaaatgacagagtatgaacaataaaatactataacatatattgacttacaaacattaatcacttctgctttcaaaacatttggagggcaaccatctcattcaaaaagaccaacttaattattgaggaagttaagagaataaaagctaagggaaaaaataagattaatgtacagaaatatgtaagaatgacatattgtagttttatgctttcagaagaggcacagttatggaaaatgaggccaacctatgggtataacagaaggctcctaaagtatggtggtttctgaggtagggacttcaagttgtaaatacagtatccatctactcctgctttcttaccaaaagaacactgattttgctaggtgcaataatggactatcctaaaatttttaaggttctggaagacagagacgataatatgacgtaattctggtaaataagatgtaatatttgagatgacttggggtgagttttagaaagctccttgactaggggcaaactaaggtgatattgtaactcagggtccccaggttttggggtatgcactgtgaaaaagtactcacttgcggccgggcgcagtggcgcacgcctgtaatcccagcactttgggaggccgaggcgggcggatcacgaggtccagagatagagaccaccctggccaacaaggtgaaaccccatctctactaaaagtacaaaaattagctgggcatggtggtgcattcctgtagtcccaactaatcgggaggctgaggcaggacaatcgcttgaacccaggggacaggggttgcggtgagccaagatggcgtcactgcactccagcctggcgacagagcaagactccgtctgaaaagaaaaagaaaaagaaaactcacttttgtaactgttgcgccttgagttcttgttgtttcaagaagttccagaaagaagctcagcccagtggttgggtccagagatgactaaactggagatgaacttctggcaaactctcctcactaccatactaaaatccccacccaggaagtagtttatgtgccattttctatacatctgatgtatgtaaaagcatgataaatgtgcctgcactgcctttattccacctctaatacaatgactcagctaactagcccgggtgttcacctttgtttggggaggcactgcctttgggactatccctagtgtcctccttacttggtgcaagtaataaaatccccctgtgaaatcatacttggttgtggtcactggacttgtcatccaccaagcaaatgaacccacccattgtgtgtgtgacactatgagccttcttgcccttttctgcttcctcctccttcctgcctggagctgaactaaggaagacaacaacartatcagctatattgtaactgaccatgaggaaaagaccaagagaacaacagcccagtcttcaacagccctggcatccttaaatgatcacatcaactctggaatgtctacttctggacttagaaggaaaaccttatctattttgcttaaccactgttaattggcattgaggaaaaaataccatgagacaaaaacttgaaaagatcagatacaagttcataataaaaacacagagacctagaacagccataagmagcatacaacattgttgatgtttattttacagaacttttagattacacctaaaaacagaaattcaccgactgaatacctaagatgatgatcacaatgctatgaacatttcttaatctttcatgacaattctaagactaactgaatgatttccttacacaggagatctcagtaaagaaaaggtgatgctttcattaactgtcctgagttcttctcttcactgtcaacctaccataggttataaacacaaaataaaaataatctgttttcctatatacatggatctcaaacaagggatttatttattttattattatcattttttttttttgagacagagttttgctcttgttgcccaggctggagtgcaatgccgcgatctgggctcaccacaacctctgccccccgaccccagttcaagcgattctcctgcctcagcctcccgagtagctgggattacaggaaagcgctaccatgcccggctaattctgtatttttagtagagatggtgtttcttcatgttggtcaggctggtctcgaactcctaacctcaggtgatccgctcgccttggcctcccaaagtgctgggattacaggcttgtgccaccgcgcccggcctaagggagttatttatttatttagatactgagaatttaaaaaatagcagcaatggcttaactgtaacatcaggaataactcataattcaattacgtcattcacaaaccatgatgataatattcatatctcctcaatgacaattttcaaactctactgggcaagaaacaatgtacycttttcttttctttttttttttttttttgagacagggtctcgctttgatgctgaggctggagtgcaagggtgagatcatggctcactgcagtttcgacctctggcactcaagtgatcctcccacctcagcctcccaagtagctgatactacacacgtgtaccaccacatgcagttaattattttttgtacatatggggtcccactatgttacccaggctgatcttgaactcttggcctcaagcaatcctcccacctcagtctcccaaagtgctgggattacgggtctgagtcactgtacctggcccatacgatataaattgagttccaaaaaaaaaaaaaagggaaaattaagctaacaatttagagagggtatgctgtgactaaactaggaatcatttcagttacagctaaatgctgaaatgcaaacaaaatattacagtataaacgtatcaagagaaatcccaaatccagtttttatgtttaatgtcccaaaatctaaattgtcatataaaccaacaaaacacttctacaagccagtattttgcagctttggggctaacatctattgggtacccaacatgtacattttatttaaattttaataacaaaaagctaaaatttaataagcagacttctgttttcagtgagatgaattagcagagttggcatttatgtttctgcctgaaacaacaaaaaacctggaaaaacagatgaaacaattaagatgcaacatacgttacaaacggcaatggactaggttatgggaaacaaattatgtaagctttctgatcaaaccagtttaactgactgaagtttccaaactatcctgcaaagaagggggaaatcacatgggattcaggagcctttgtaagtcaaggagataaggctagaaagaagtccagggaggctaagactctggagttctcaggacacaatactagagaggaataagctaccgagagaggaagatttccagaggaggttctctctaagcaatgagataaagattgaccaacctgggccaggcacagtggctcacgcagtaaaccctagcactttgggaggccaaggcgggaaggatcacttgagcccaggagttcaagatcagcctgggcaacaaagtcagagcgcatctattaagaaaaacaaacaaaaaaaaaagattgaccaagcctatgtgcttttaagaagctacacaaaggtggatgaaacaaactgaaagaatgagagagtgaaattctctaagttcacctgagtttggaatagttcctgttcccaacagttggagtgattaacttcgtaatttacagggcactgaaaaaactcacaaagatttgtaatggacaaaaaaattgccctagaataatatctgctgtaaaatgccctcctcacaacacttcctcataccaatagcatatctttagaacaccaattaaaatctcacattgtctgcgaaatagcctacacaaaaatgttgtctctactgaacaatgcgctcaagtatttgcatttggaataaatcatttcctgacctgtaatcttctcatataaatcaccttttatcattcagctgagattataacttgcactcctttactacaacagtgccttacagatcaatttgctgttttctgtatacatgccagtccaggatgtaacacactgctattttagtgaggttcactttcactccacaaacaaaatctcctgcttgaacaatttctagctttggcttattttttccagaaaagaaacagttgtacttttaacaggctgaataattgaaaagtgggagggaatgactgaataaatcaaataagtagaacagagacaaaactaatatttaatttggaaagattatagtaaacacagattgtaacagcaaatagtccaagaaatggaaaatgaaaaacttggaaaagaaatttctaatttctgaggattaatatgtatttctgagttttagaatattctaccggctcacagtgtcccacatagtgactcctgaattccagttgaaaatgacttaagagggtgacaatgccgggcgcagtggcttacatctgtaatcccagcactttgggaggctgaggcgcgtggactggctgaggtcaggagttcgacacgaatctggccaacatggtaaaacaccatctctattaaaagtacaaaaattagctggcatggtggcatgcgcctataatcccagctacgcaggaggctgagatatgagaactgctagaacccaggaggcagaagttgcagtgagccaagatcgcaccactgcactccaacctgggaaacagagcaagacgctgtctcaaacaaacaaactaaaaaagagtgtggcaaaatacttgagtaccctctctaaataaatacccaatatggtggaaaggttagattctatattcaaagaaaggcaaaaccctgagatatttttacctcatagttttatattctatcaacaacagtgcattggaaggcattaatatctatgaaagagaaaaaagaagtgacttcaatatgcaatatgtaatcacaggccttgagagattatatgaggagggaggaggtgttaaagagtattaaaaatgcatatttaagtagtagccgaattcaacacaagtttctgttctgtttcacaactgcaaatttctgtaagctaaccataaatattcagttgaatacaagaggaataacaattcttcaattaccttatgttaatgtaacagtttcaaaggtgccacagtgaagtaaacaatgactccagctcttaaattccccaagttaaaatcactcttaaaatctcctttgaagctacttactagctctcttgtatggtggtgtagctgtttcctctaccatgattttcagacttctatcctctcatctctaaaaatcagtaccttgaaatctgaacagcacattatactaacctactaccatcaaccagtcatccaccacactcatgcgtaccctaaaatgttattcatcatgccattcaatattatttctgtcctagtttctgtccaataatcatttctggtgatttcagtatccacagtgatgactgttttaattgttccatttctcatttctttgatttcctcttctttaatgattttgtcctcaaccttatctcaaccactgacttaccatggcatactctagaccagaggatctttaactttactcaggcaatataaacctatggattatcctttcagacataagaaatcctatcttagacccttatcatggccccaaacagcaatccctcaaaaatctcgatttcaagcatctttctctctctcatgccactacctcctatttttctttttcacattcaagttcccctggacctaagattcactgatctcaacaccatttcattgctattcatctctcattttctcacttttttgctcaccaaatgtaaaatcctaggtctatcattagagtaattcatttgcccatctctgaatgcatcttagttttccagccaaaccccaatcatcattaaatccaactctccacctactttgtttctgtatctaatcaatcagctgaacatagctggagatgagtgactgtagggaaatgaatgatgaattcatcaaagattaacgatgtcagttaaaaaatcatgaccaatgtcaagtcagtctttgctgtacataatttccttatttcattcaatctttactcccctagatgactatttcataacttctcttctcaaatcctatcagctgctatttcactaaaaagcagaagcaatcagatttccacaagctcttacctctctctcactacctagctacctacagctattctcaaatacagtatctctttcttctcttctattactagggattaagtttatggtactatctaaggccaattctactactacctaaagacagggttctagtaattcctccttagttgcatcatcaacttaatcctatctctgaattgttttcatcaacatacaaatatggtatattgtcttccattttacaaaatcttatcttcctcctaaagctctgctccatttctctttttcccaaatgccttgtcaataatctctgtctccaatctactacctccagttctctagtaaactcactttatcaggcttttgttcccactattacactgaaactgctgatcaaggttaccaatgactcattagctaaaactgaattgtagattctcagcctttatcttacttcactaagcagcatttgacacaaccagtaatccctcctcttcgaaacactttttccactaagctttctgaacatcacttctggatttcatacctccctgtcccttctttctcatatatctaatctttaaaaactgctccagggtttaacacttaggtatgttctatattcactctctacatcaactcattcagtctgatagctttaaatgccatttatatactgactactcccagattctccagcctagacctctccctttaactaacaaacatgatactttaagtaactgcctgtctaaataagcatctcaaatttaacacatctaaaagacagattcccaatccccagtattattaccgctatcaccaccactctccaaaatgtctgctcctccagtcaattctcatctgaaaaaaaatggtaactctatgttttgcaggagccaaaaccttagaacccatcttaaaccctgtctctcacatcagatgcaattcagcaacccactcttatcaattctgtgttggaaataaatatgaatctgagcatttttcaccacctctaccattgctatcaccatgatctaatgctaccacagaatcgttacaattgcctcctaaccgctctccctgcatctgcctcaccccacaccccaagagtctactatcaacaaagaaagtagagggatccttttaaaaccacctcgttcatgccttcccatctcatccagaatgaaagcttaatccttaaaatgttctataaggtccttcacaaactatcccctgccatcctgttccccttctgatcttttccttctcctctcccacttttcactgctctctgaccataccacattcactgctcctcaaatacgctaggctcattcccaatctcaggggctgtgtattttgctcttccttaggcctggtacttactccagacatctacgtgactagcttccttgtttccttcaggtcttcactcaaaagtcacctactcggagaggcattctctggctcccttatctaaaatgtcacctccgccccctcaacattcatgcttttattttctttcctggtactttatcttacataccattcatcatactcatttatcttcttatcttttgtctctccttccataaactgatttccataagggcagcaatttgatccacttcctttcacaactttattcccagtgcctgatatgtacaaggcatgcaataagtatctgctgaatggataaatctaggattgccccctcatacttcaatctttaactgctatccaacacctgtcaaagactaaataacactgatatttgaagatgcttgtgtgaaaacggtcttcaaataccacaggataaagtattaatgcccattagtacatactcaaaattctatcattttataaagctgtatttttagacctcagtagctttcttctctgtagaaacaacagtaagttattgtgtaatgttctgttcctggctttcactgagaattattattttttaacagccacatgaagaacctccacgcaaaccacaaaactattataaacatcactattaattacaacatttaatattacttaaagagaaatgcgttctttttaaactcagccaggaaaaacaatctcttaaaaatttatttatttcattacttaccaaatatatccctgactctcaacaactccacacaagtaacaaatttcagaattaaacacttaccatttgttcatacatttaagttgaggaggatatttctattgaaccacctcagtttacacggatggtttttaaggccttatttctattttatcaatcttattcatagttatccttaacaaaagtcacctcaaattattttatttaggtaaataattgaaaaacagaccgtataattctctaatactatcatatataaaaacaacatgtagatcataaaaaagtcacttatatgtcatgaagtcacttcactgacatatatactgcagtccttctagtctacagtttatttttttaagtaatttgacataacaaagttaactaggaacttatttctctatcagctacaaggatgacaatacctaccaattagagaacagtgcgtatgcagcaagggaatgagatacaatgatgcctaaggtgacagtgagatatgaaagcaaccttaatctacagacagtgtaaagacactgagaaacataggcacattacagaaaactaaccaggattactgatggatattttttcagtaactattgcccactttgggaggccaaggtgggcggatcacctgaggtgaagagtttgagatcagcctgaccaacatagtgaaaccccatctccactaaaaatacaaaaattagctaagcatggtggcaggcgactttaatctcagctactcaggaggctgaggcaggagaatcgcttgaacctgggagatggaggttgcagtgagccaagactgcaccactgcactccagcttgggtgacaagagcaacactctgtctcaaaagaaaaaaaaaaaatatatatatatatatakakagagagagagagagagagagcgcaagcgtgcgagcacacgaaggagagtcgattaaggaagtattactcaaatcaataagaaaattctgcaatttcagtaaacatccagacattcacatctgcctttataatacctcaaatgattctaattacattgtttttcattcagaagtttctaatcaacaaaattcaaacacattctctgagcatccaccaaataatggtagcctttataaaaagtttctatgatctacctcttagaaccccaggagacaactgagtctcagaaggaagagaaccaccagactgttgctggatattttaattcaaaatatcttccttgaagactgagccttgaggttactgacctttattactgtactgtctactgaagtctccctaacactaagtgtgcacaaccaggtttagtaaaagaaacataaaayggcactgtggtaactgcttcatacaatttcactcaattcatataacaacccttttaggtaaaatagtacctatcttatagatcaaaaaagccatggttcagagaggttaaatcatacaagttaacagttatgaagacaacctactatgaagtcactaacacaaacaagtaggaggaaaagtgcttgaggtcagggaaaacttcctggaagaactgtgctttaaaaggacagtaggaattaaccaggcacagagtaggtgtaaaggcaaagggattgtaggaaaaaggcacaaacagaaaaaggccgtgtgtaaaacagtattgcatatacaaaagaactgaaagctctctttaatccatttatttagaagactctcccttttttacacggtttagactgaatcttgacagtcacttaattctgtaactcctaaaggtgtccttggattctattactgggacctagtataacacaaaagaaagtggactctggagtcataggacctgggttcaaatactagttatcagttataatatgcatgagctggagaaattcttctagtctctttattcctcagtttccagacctataaaatggaaataatagtagtaatgaacttacaaagtttccatggggacgaagtaagctaatacatataaagtgctcaagattaagacaatacgtagcacacaggaagtactatattaatgggaactaataccaatcactcctcccttcctcctgcattagatcataagtccttctcaaaattatctcattttgagttcctcaactttacttaacgccctcttctcagttttccttttccaagcatcacccagttttcaacaaaatcacatcataatcagctgctgacttaaagggttaactccaacatatggtgggagtgaaaaaaaccctgactttgatccctttgtactgccacactcaaccctcttcctttgtttttattctcattattcaatcactttcagttctctggcctgttattctacggctattataatcaccttaataaatacctttgtattctgctcctctcaatcctcttctcaatgttaacagcgttaggtgtttttgaagcatgggagacccaagtgaataacatgtactagacatttaaatattcaagaatatttatatagcacctgttatttgtaaagcactgttctgtggactacacatctaaggtattaaatgtacatactgatgactggttgaggtaactggtgagatcttcagcaagaaaattagacctggtaaaatgatgtacagacaagcaaccaaaaatactgtccaaagattcaggaagactgatctaatcaagagttgagttttgccattacagggtaaagagtatagtgaacaagcccagagtaggatgtcctagactgccagggagaaaaaacgccaacaatttttaaacctgggtatatatcaatttgaaatcagttattcttaataaatctaggataccagagaacttacaatgcagtttaaagtatatsacacgcacacacaaaatacattaagacaatgttgaatatatatgaagaaagtatgtgtattcatatttgtttcagatttgactcaagaacgattaaacttataaacttctaaaaagaagagacttaggtcattatatcatctgtaacttctagcaatgcagcagaatgttatgtatttaatgtgcataaaataaatgcattataattcaaaatgtaaccaaccagaaaacgaagagaaagttttcaagatggcataaaaatgtggcaagtgtttctgtttccatgccatacatttcttgcctccaagcaaatattcacattattctcctctctggaatacagtctcttcatcaaacacaactcttacccatcctttatataatccagcttctccattaagccttcctgtcatagaaagtataacaatgccacattttcatattgttccttctcttaatatctacagcacttattactacataatccaatccttaagtattgagttttttttcctcctaacaccaaatacatgatgtcttttccaataccacttctccgactctctgacatcaactaggtgccctacaattcaattctgacactacccagagttagcatcagactccacagatttaagtctcacaagactgccattacttcatacaccagtcacaagcatggggttccccaatcctctgattgatcaactgaccagcaataattgggggctcccaggccccctcctccagttaggtaatttggtgcaataactcacagaactcaggaaagcattttcttactagattattattataaaggatacaacccaagaaccaccaaacagaagaaatgcatggggtgaggtaggaagtaagggagcttccagcttccacaccctctctcagggtgtcaccctctcagctctccaaatcccatcatttacagggttttgttttttttgttttgttttgctttttcttcttttgacacagggtctgactctgtcacccacgctgggatgcagtggcagcatcttggctcactgcaacctcttcttcctgagtcaagtgattctccagcctcagcctcccgagtagctgggactacaggtgtgagccaccgcaccccgctaatttttgtaatggttgtagaaacagggttttgctatgttgcccaggctggtctcaaactcctgagctcaaaggcacccacccaacttggcctcccaaagtactgggattacaggcgtgagccactgctcccagccttttgacaggtttttatagaggtctggttacatatgcaaaccttttatagaggtttggttacatatgccactggtaatttactctatctccagtcactccccactccccagaggttaggkcatggagatgagagtgttccaagcttctattcaaggtctggtctttytggtgaccagaccataccctgaagttatctagaagtccaccaagggttgcctcatagaagaaatgacacttctatcacccctatcactcgggagagtccaagggtatcagaagctctgtgccaggaactgggaacaaataacaaacatgtttctaaatatacaactgtatacagtagtatgaatcaaccgctgaatattcatcaactctctccactagaagtagaaatttcttgagaacgggtttacttcttaaatgctatgttagcctrcaacactgaccacatacataatcaatacttgatatttatacattcaaaacatttactgagagtcaattcataacagtaagtgactgaggagttttctgatttcatatatgcatattacagagttttattttattggttttactaggattttttcaaaataaaaagtgatgcatctcaaagaattaaagataaatttcaaaaaattctaggacatttctatttatttatttatttatttattttgagatagagtctcactctgtcacctaggctggagtgcagtggcacaatctcgactcaccgcaacctccgcctcccaggttcaagagattctcctgcctcagcctcccgagtagctaggattacaggcgcatgccaccacacccatctaatttttgtatttttagtagagaccgggtttcaccatgttggccaggctggtcctgaactcctgaactcaagtgatccacctgcctcggcctcccaaagtgctgggattacaggcgtgcgcctccgtacccggtggacatttctatttaattaattaaacaaacaattactgaatacctactatcttttttttttttttttttggagacagagtttcactcttgctgcccgggctggagtgcaataacacgatctcagctcactgcaacctccgcctcctgagttcaagtgattctcctgcctcagcctcctgagaagctggcattacaggtgcccaccaccacgcccagctaatttttttgtgaatacctactatcyactaagcaatgttctcaatgctgggaatacagtttatcaaagctgataaaagtccatttaatggagcaatttaattctaatgcagaaaaagaagtacaatgtttagtatgacagaaataagagacaagggccagatgcagtggctcccacctgtaatcccatcactttgggaagctgaggtgaaaggatcgcttgaggccaggagttcaagaccagcctgggcaacatagtgatacccagtctctacaaaaaaacaattaaaaaaaattagctgggtgtggtggtacacatctgtagtcccagctacttgggtggatcacctgagcccaggaatttgagattgcagtaagctatgaccacgccatcgtactccaacctgggtgacagaacaagagccagtctttaaatgatttttattttaaaaaagaaataagagacaaagcaagtagagtgatatttggtgatagatgatagaaaatgttgacagaggagggaagaggtcaattttagataaggtagtcttcaaagaagaccaaaatgagcaagcatgttaacatttgaacatacttaccagaaagaagtgatggagtcatgtgggtatctttggggaaaaaattctagacagagaaacaagtgcaaaggccataaggggagaccagacctgacatgttcaaggaacagcaaaaaggccaagtaagagggtaatagaagataatgtcgatgtggaatgactggaaagcaggatatcatgtagagtctctcagcccattataaggccttcatcttttattcttaatcagtttagaagcctttggaggcatctgaccataaaagtaacataatctgactgtttgctataggcactatagacttttatgggtaagaactagttaggaggcagttagatatctagttacaagtaactagttaagtgactactagaaatagactcaacagactcttaagaggaaaatctaggcaaaagataatgtaggtttgaactagtataatgctaatagaaaaaatgacatgtgctgggatctgaattttttttttttttttttttttttttttyccagacagagtctcactctggttacctaggctggagtgcagtggtgtgatctgggctcactgcagcctcaacctcccaggctcaggcgattctcccacctcagcctcccaagtagctgggtctacaggtgcgtgccaccacgcctagctaattttttgtatttttagtagacagagttttgccatgttgcccaggctggtcttgaactcctagactcaagcaatgtaccygccttggcctccccgagtgctgagattacaggcgttgagccaccacgccccgcctgggatctgaatatgttttatagatagaaccaacaagactttcttgacagtttggatatgggatgtgagagaaaggagtccaggatgactgcaagggacctaaactagaaggatggagttgctatttactggataatgaagactcaaggcagaacaggttagtatcaggaactcagctgcggacatattaagtctgagatgcctattagacatccaaatagagacaatgaataagctgtttcaacaagagtctgagatttaggggagagatccaaacaaggacatagatatagaagtctccagcatatagatggtattaaaggttataggaatagatgtgaccaagaacaagagcgtagctagaaaagacgtccaagaaattagcccttaaaggattgtagatatgaggaaaaccttccaaggagaggcaagaaagacagatacgagaaaaaccaagtgagcataatgtcctaggatgcaaaataaacaaagkacttgaaggaaaagaaggtgattaaccatattaaatgctgctgataagcccagtaaaatgaagactggaaaatgatgcttgattttaaaaagacgaggtaatttgcaaccttgatcactgcagtttccttggagtaatgggggcaaaagcctttctagagcaggttcaagtcataataggagtcaacaaactggggacaatctgtataataccaagcactttacaagccaaagaagccaaagatagagactattttccttacaaactagagattccagtttctctggaatcaccaggaatttcctatctttgtgacatactctgttattatatttatgtttcaggttatttgtgagggataggtataactctaaggacaaaatatctgtaagcattttataaccaggaaaaaaaaaaaaagacaaaacagtatttaaataaaaattcatcttctcaagagactcttaacaagaggaaggaacagtaagtgttaatagtcacatttttatcaagcaagtttctcaagcttgaactcatacacagcctcccatagagcacatcacatcacaaaagcactcaaaggtttatagyttccctgacctcaattcagttcttctccatgttcccacattatttctacaaagcttctcagacacctcctctttatcaacatagtaaaaagcaggctacagtatctggaaaactttggaacagaggaagaaaaaaactataatattaaaaggtacaaaatgttaatgcatttagattccccttcatttttatttttgtctgtaataaacttcaacatattctagacctctttcatttcccaatgaacaattaagtgaccagtcaaaatttcactaagcttatatattttccttcacatctgctgggtactctaacatgaatcataatattccaaattacttagatggacagaaataataaaggtaacagtttataacctgaagtgatcaaatcttattttctatggttttgtggcatcaatatcacaactaaaaggaatcagcagtataagtgcattgtccatctagttgcagtatgtcaaccataggggaaggtaggtggtgaaccccatctctactaaaaataaaaaaatcagctgggtatggtggcacacacctgtactcccagctacttgggaggctsaggcaggagaatcacttgaacccaggaggcaaaggttgcagtgagctgagaccacgccactgcactccagcctgggtgatggagcaagactctgtctccaaaaataaaaataaaaagagagagagaaagaaaaaatttccttgaaacaaagtctaataaagtattgtgaaaaccaaggttattgcttttgtcctatgtaaaaataaaaaaagacattaayagaccataaatacctaaagcgcctatcctcttttcatcctttgtgcattactgaatttagtaaaactaaacattttcccaatacattttatttwattttaattttattttatttgagatggagtcttgctctgtcacctaggctggagtgtagcggtacaatctcccctcactgcaacctccacctcccaggttcatgggattctcttgcctcagcctctcaagtagctgggattacagatgcatgccaccatgcccagctcatttttgtatttttaatagaggcgaggtttcatcatgttggccaggctgctctcgaactcctgacctcaagtgatccacctgcctcggcctcccaaagtgctggaattacaggtgtgagcctccacacccagccctaatacattttaaaatatcacaagtacctcagccaagaattcagagtataaccatttgttgtttgaagtggatacattctgatctgttatttcctcaaccctaycaatgtttaaaaacattagaacctgaaggaaatacatgagaaagtcagtttgctattctccaaattttaacccttgctaaagtatagtgttctagagaaatagaaataaagcagttctctaaaacttgacagaggtgagaaatcatttgaagtctattgcagagaattaaaagaactctataaaaggtctacatatatatcatgctaaacacattgggattgtattgaatagataacagcattttgaaaaagtagtgtttaagatacttcaggaggtcgggcgcggtggctcacacctgtaatcccagcactttggaggcagaggtgggcgaatcacctgaagtcaggagttcgagmccagcctggccaacatggtgaaaccccttctctactaaaaatacaaaaattagccaggtgcggtggcgtgtgcctgtaattccagctactcaggaggctgagacgggagaatcacttgaacccaggaggcagaggctgcagtgagccaagatctcaccactgcactccagccttgatgacagagcaagactccgtctcaaaaataaaataaaataaaataaaataaaatgtaaaggattctaatatatacttgctttgtatagtaaataatcatcactaaaatgtttttaaatctgtattttgaatgagaaattttttgttacagtttcacttgaagatgaactggtacacaatctaaaagtgaaattctgtaaaataaatattatatttccattgatcataatgataaaacaaaagacatgataaggaaataacatcttgaacagtttattaaaactttaggcaagatttaagaagctagtaacattatttcactttttctttataacacttttcatatatataaagtctactgtaactttattaagcctatgaatgaaaaaagctaccaagctattatatgagctaaaaatatatactgggaaaagaaagatcacattatttttattccaaaagttgtgtctgaagaaacaaatgagtaaaagatatgtattaatgattcaggcatatatcaatatacatctaagtgtcaaaatatatagtgtctaagaataagcctaacaaacacaggacgtatatgaagaaaatcatatccactggagaatatttaaaaaaatcaaacatgaatagctggagggatactacatgttatttgaagtgcagactcagtaatgaaaagatattcatacttcctaaattagtctataaaactgtacacaattccaagcaaagttaggccaggtgtgacggytcttgcctgtaatcccagcattttgggaggccgaggtgggaagatcacttgaggccagtttgagaccagcctgggcaacaaagggacactccatcttcaaaaaaaatttaaaaattaggcaggcatggtggcacatacctgtggacccagtaacttgggaggctgagataggaggctcacttgggcccaggaggtccgggctacaatgagctgtgattgtgccactgcactccagtatgggtgacagagtgagaccctgtctcaaaaaacaaaaaacaaaaaaagaggaaaagaaaagcaaaattagaccagggtattagtgtgagaaaggcaaagaaacaatgaaaggcatcacaaaataattttttttttttagttaaatgcaattaaagccaggtgcagaggtacccatctgtagttcctgctaattggaaggctgtggcaggaggatcatttgaggccaggggtgtaaaaaaggatattcatacactgatgttcacagcagcattattaccatagcagcattattaccattattaccatgactctgcctgtgaacagccataggactactgcctgggtaaaagagtgagatcatgtctcttaaaaagagaaattaaaaaaaaattatataccataactgagatttattgctggaatgcgaggatggttcaacacacaaaastcaataaatacaatacattcacataatgaagggaaaaaaaattttatgatcatctcaattgatgcagataaagcatgtgacaaagtcaacattttttcataaaacactctaccaactaggaaaagaaggaaaatacagcataatgaaggccaggtatgaacattccacagctaacatcatactcaatggtgaaacactaaaagctttttctctaagatcaagagcaagacaaggatacctgctgttgccacttctatycaacgcagcattggactagtcagaaacttagataagacattcaaattggaaaagaagaagtaaaattacctctgttcaaatgacataatttgttatgtacaaaaccctaacaatttcacacacacacagaaaaaaaaaaaaaactcttagagctaacagattcggcaatgttgcagtatacaaaaatcaacacagataaatcagttgtgtttctataaatcaacaatggacaatctgaaaaggaaattattaaagcaattccatttacagtaacatcaaaaaaataatacrtaagaaaccaaggagacaaatgactggtacatatcaaaggaaattaaacacacaaataaatggaaagacatctgtgtttgtggatcagaaratccgatattaagatatcagcactacccaaagccatctacagattcaatacatacaaaccctattaatatccccatgttttctacagaaatagaaaaatcaattctgaaatccacatggaatcgcaggggacccttaacagccaaaacaatcttgaaaaagaacagagttgaataactcacacttcctgatttcaaacttactacaaacccacagtaatcaaaaacgctgcaggactgggataaagacagctatactgtcggtcctctgtactgcattcatgagttcaaccaatgatagatcaaaaatattcagaaaaaaattwaaaaaatatgaatttgaaaaatacagtataacaactatttacagagcatttacactgcattaggtattataagtactatatagcactgacattgtattaggaattttaagtattctagagatgactgaacatatacagaaagaagtatgtaggttacatgcaaatactatgccaccttaaggctgataaagcacttgaccatccatggatttgggggctctaatcaatcccccacgatactgagagacaactgtacagatgaagacagagaccagagataaacccctgcatatatggccaaataatttttgaaaaaggtgccaaaactattcaatggaaaaaggacagtcttttcaataaatggagctgagaaaatgagattaacagatgtaagaaaataaagctggacccttattttacaccatacacaaaagtcaactaaaaatggatagaagaactaaatcaagagctgaaactatagaagacttagaagcaaatgaagacaggaaagcttcaataayattagatttggcagcaacttctgggaaatgacaccaaaagcaccaacaacaaaataaaaratggatacaytgaactacattaaaatttataattttcctatgcatcaaaagacattatcaagaatgtgaaaaggcaacccacagaatagagaatatatctctaatcatttagctgataaggtactaataaccagaatatgtaaagaactcctataacaaagcaaaacaaaacaaaacatgctgaatcaaaactgggtgaacaacttaaaacatttctccaaaggagatacacaaattgtgaacatgcacatgaaaagatgctcaaaaatcactaatcattgggaaaattatcataatgaaatgccatttcacactcactaggatggctattttcaaacaacacccaggaaatagtaagtgttgactaggatgtagagaaactggaatccatcttcattgctgttgagaacatataatggtgcagccactgtggaaaactgtgcagtggttcctcacaaaacataaaattaccatatgatccagcaattccaattctgggtacataccccaaggaagtaaaaagcagggacttaaatagatatgctgatattcatggcagcattattcacaatagccaaaaggtagaagcaatccttctaccctttggtagataaataaaatgtggtatatatatgcaatggaatattactcagccataaaaaagaagtgaagttatgatacttgctacaacacagataaaccttgacattatgctaagttaaaataagccagacacaaaagtacaaatattgtatgattccacttttatgaaggacaggcaaattcacagagacattagatagagagtttctgtttgggatgataaacttctgacaatggatagtactgataatttcaaaatattgttaatatacttaatgttactaaactgtacacttaaaaatggttaaaatgagctgtgcgtggctcacacctgtaatcccagcactttgggaggctgaggcaggcggatcacttgaggtcaggagtttgagactagcctggcaaacagagcaaaaccccatctctaccaaaagtgcaaaaactggccgggtgtggtggcaggtgcctgtaaccacagctactcgggaggctgaggcatgagaatcgcttgaacccaggaggcggagggtgcagtgagccgagatggcgccactgcactccagcctgggtgacagagcaagaccctgtctcaaacaaaccaaaacaaaaatagttaaaattgtaagttttgttacatatattttacaataagaaaaattttttaaagaatgtccattattgaaaatgaagagtaatgaacagatttgcttacctattaagattctataaaactgcaatcattaaaacactctgatcttgcggtacaagaaacagaaagatatatggaatataacagatagtccacaaatattcctaaaatatagcaaaagacacagacattttatattactggagaaaaagtgaatgttttaaaatataatttcaaattagaaagmatttcttaagctgaaacaaaggcctgatgccaaaggaaaaatttttactgatcctttgcgtctgtcaagcaaagccatacagaataatgtactataagtagttaaaaacggcaagagactaggaaaaaacttgcatgtgaaaaagcaatagtttttttttgttttttgttttgttttgagatagagtctcgctctgttgcccaggttgaaggacagtagcgctactttggctcactgcaacctccgcctcctaggttcaagcgattctcctgcctcagcctcctgagtagctggaactacacccggctaatttttgtatttttagtagagactgggtttcaccatgttggccaggctggtcttgaactcctgacctcaggtgatccgctcgcctcagcctcccagagtgctgggattacaggcttgagccactgcacccggcctccaattctgtttgtatcatcccaatttttttcyactagtcagaaaattacatgttttaatttttaactttttaatggttactacagaatagctgtatccaattgaatagccacatctacactttttgcaatgatggaaattttctatatttgtactatctgagactgtggatattaaccatatgtgtcaaccaagcgtacaaaatgtgatcggagctctaaaaggagaaattgattttttttttttttctttttcagactgagtctccctctgtcacccaggctggagtgcagtggcatgatctcagctcactgcaagctccaccaccctggttcaagattctcatgcctcagcctccagagtagccgggattacaggcttgcaccaccacacccagctaatttttttgttgttttttgaaatggaatctcactctgttgcccaagctggagtgtagtggtacgatctcagctcacggcaacctccacctcctggtttcaagcaattctcatgtctcatgcctcagcccccctagtagctgggattacaggcctgcaccaccacacccagttaatttttgcatttttagtagagacagggtttcaccatgttgcccaggctggtcttgaactcctgacctcaagtgatccacccaccttggcctcccaaagtgctgagattacaggcatgagctactgcacctagcctgatttttcattttattgaagtgccacacattagtggctaccatactgaaaagcacagctctgtaattccccacataatgaatatggctgactgtatcctcatggtgtagtttcacatgttcctctacctccatatgtcctgtaaactgctgtcagaatctagaagcttcattatattcaggttcagttcttcttggcaaaaatacttcataagttgaattgtgtagttcctgttgtattgtatcgcaacacctataaygtggttattttcctttaggttatgctcagcttgattacatatgcctgggaggaataagactacgtgcatccgttcacatctttatttttaacaaaaaactctggaagaaaacataagaaattaacaaaaatggttatttaaaagagatgcagattaaactaggctgatcggggcaggtgtgggagtgagattattcaaaatatacttctttatgtttctgtggtacccagtcaaaaaagttaataaattttagtacagatttttgtcctatactccatatctaagatcacagtatctgggtatgaggtctagaaaaaaaccattcaaacatgtttcctccacaattctgcacgttaaagcttaaccctatccactgggacactggaatacaagaaataaaaggttgacaatcatgaactttagtcatatttattattagtttcttctcctttaggttccactgatcattatacagttacatatctcaatattattttaatctcttgcaggaatatcctcatgaagtgatacttcataatgacacactggattcttatttaccaagaaacagctcttcatttgctatttcccttgtattaagctaccagattcagatttttttttcaagaaaagtttctctctttaaaaatggcttatttccttctctctgaaaaaagaactgtgtaatctaattttctggcctatgaaatcattattaaataaaactgataaaatcagtggtgttctaattgaaaggggtaagaatgagaattcagtactctcaggtttcttgtctcctataccctctggtcacttagttttccaagacaccaaagaaagcaattcaaaaaggcagtagaacctagtgaaaaaacactgaaaataaatgatattttaattaatcacaattcttattttgctcttaagactgagaaaatcgaggcaaatttaatgcaatattatattaactgtaagcatatttgcttttttccttgttatacttagtagttcaaagggtcttaataattatttctattatataactatgtgtatatgtttgtatagttcaaaaccgttacggaaaggtgaaatacatatagtctatattcatattcacaacttactctcttaattcacatgaacaatgtaaagtaaaatggtttccctcaaaatgattcactttggtattaaaatatgatcagagattttgaaaattatggcaataaaatgttctagcgaacagtggaaacgctctaaaataggctctacatagttttatcaatgtgattttaaagaagaaaaagaacatagaccaaataatagtataatgttattcaacacattggaatagttcatcaactttaaattcttatacaaatatttctcctagtcctgtattgcatcaagattccatctatagaatcacaatatagagaggaaataaattctgttaaatatacagtcattttatattaaataacacataattttaaccaaacattaacatactgcttccttctttgatattcctctgagcctaaagatttttgaatcttaaaactcctaactttaacagatggatcagatgtttcagctcctaagtgtcagtctttcacaagaaatgaattagtcacacagacctcttctagctttgaaaaaatctgaaatctattctaggaatgctgactattcctactgccatgttaacattttctggcatgttacatgcaaccttctacgttcaaaatacataattttcataagcaatatagccacacagaaaatactggaagaaacctgaaataatgaagaagccaaattcaacttaaaatttaactatttagtgatactaatgtaaataattctactaaagagaattagatgaacagataccttcaccaaatgtttccagggcaacaaaatctattcaagggattagtaagataaaaacttctcaaaatactactaagacattatttgccttttccattcattctttcatcagtgttcagagcagcagactacttgtgttttgtctggtaaaacaaaactatgtctgcatagtgctgacttatgaaaaactgctcttgtgttttaaaaatttcagcttagtttttaatacagtaagtatcaatagatataacccaaataaatcaagtaaggaaggttttgagcaagtggtagtacaaattgaaaagaatggagacgggaaagcaggttccaatttaaaggaagaaatctgcagaactaagttaatgccaacgttcaaggtggaaaaacatttaagatgaaggtgttttcaagcccaggtgaaacttcaaattaaatctcaaaatggcagctggtttcacatgaagataataaattatactttaaacactatttcraacccacacacgggacattcatgtaaagcttccaaacagtagagacggtggatcaaactgaaaaaaggccaaactttaattgcagatttgtgagtaattatgcaacatagtacaagtaaattctacaaaggaaataacaagattaaaacaacaacaacaaacagtaagcaaaggactgaatttgaaataccaaattaagaagatgaaaggaactgcagacaggaaggaaggagaaataaaagtccaagaggacttaaaccatagggctatagaaatgaagaaagagaaagggctcagaaagaatatataacattacagttaaagggaatttcgggtttttactttgagagtctgtgaatcacaaaccattggcagaagcaatatggcagagtacagagataacagatttgaaatcagaaatctgcattcaaattcctgccctgacacttactgattgtgtgatttcaaaaactcttttcagtttttcgtaagtcagcagtatgcatagttttgttttgccagacaaaacagtaaacagattgtgagctgctgtttttctacttagccatgtattctataattaaatcaatagttctacaatataagataaatcaacattttcatcaatgggtttaagataataatttcgtaaactagctagaatataaaatataaattctacacaaagggattttatccaattcgataatttcagacaatgtttcaacattaacaatttagtaaagaccagttgtaaaactaaaagtacgtaatccctaaatctttctttgtcagattaagaattttatatctaataaaagtgtgaagctggatgccatggctcacacctctaatcccaacactttgggagtctgaaggcaggaggattgcttgagcccagatgtttgagaccagcctgggcaacacagtcagactccatctctacaaagagtaaaaaaaaattagccaggcatggtggctcattcctgtagtaccagctacttgtagggctgaggtgggaggatctcttgaacccagaaagtgactgccatgacctgtaattatgccactgtactccgcctgggcaacagagcgagaccctgtctttaaaaaaaaaaaaaagtctgctaaaatccacactggaaaaactatctgaaattaggcagacatatgatcactatcaaatctcctaacaaataaaattagcagtatttgttgccattaaatctacaccaccaaaaatcgtattagtattcaaataacaatccctcatccaaactctttcaacctattttggtattaaaagtttattggatttttataaagttaaatatagctttttttttattttatttattttttttttgaggaacagtctcactttgtcacccaggctagagtgcagtggcatgatcatggctcaatgcagccttgacctctcaggctcaagccatcctcccacctcagtacccaaaggagctgggaccacaggcacacaccaccacgcctggctactttttgtattttcagtagacaggatttcaccatgttgcccaggctggtcttgaactcctgagctcaagtgatctccctgccttggcctcccaaagtgctgagattacagatgtgagccaccgcgcttggcctatagcatacattacrgtagttgattatggtaatatagtacaagtccttacgttatggtagttaactatggtaatatagcacagttcctaggcaacatgtaacatctctgaaggatttagaacagaaccctaaaagtggagcacattaatatttctcctataagaaatactcaattcctattaagctctacttaaaaaatgagtttagtcaatcaggttttgcttccaaatgaatcattaaaaaatgtagttgctacagctatttgaatttcagaattgcagataaagaatagtggacctacagttatttatctgaccaacactgacagagtataaactagggtttatgatatatgtgacctaaaaagccaagcttgccctctcttgctaatttctgaaatattaacgatgtatctctcctgaaatttctatttaactgtgaggagttatggcacacttcctaatataaaaactcaatgctatttcttatttgtaaaaatttagaaagttagatatttatacttcatacacattaaaacaaattaatttttacaaagctttgggatacacctggacacataaaagcagaacatatcaccctttttgaaaatcatcagagttatacaaaaatcagtatgacaagactctaacgtctgaacaccaaataacaaatttaaaagtttcaagaaaatgctgctttcattattcaaaaagagtggaatgaaatattaccatgtatatcagttaacatacttttgcttccaaggcaaagaaaaaggaaccaaaacagacttaaaccttaagtaaatttactctcccaaaatgaaaactccataagagaaaaatccacagtagtatgtaggattcagaaaaagtttggtcagtcacattttttcctgctaccgtgtcaatactattaacctctctatgtcagctttgccttcaaattggtttaccttaaagtagaaaaatggctgcagcagttccagactcatacccacacaatgctatccttggaatccctccgactggatccatttatggcctgtaccaatcaatggagttctattctgtaagttagcttagaaaaatcatggcccatcctgtagtcaaaccacacaattggataaaagatagaatggatactggggaggggaaggtacacagtgccataasagaaacaaaaaatttacaattaagagtaaatagtaaggtcaggtgtaggtggcacacacctgtaatcccagcattttgggaggccaaggtgggaggctcacttgaggccaggagtccaagaccagcctgggcaacaaagtgagacctcatctctacaaaaaaaaatttaaaaattagttgggtatagtggcacatgcctgtagtcccagctattcaggaggtgaggtgggaggattgcctgagttgaggagttccaggcggcagtgagcaatgatcacaccactgcactccagcctgggtaacagagcaagaccctgtctcaaaaaagagtaaatagtaatagaaacttgagatggttagtatgaattaaaatattcaagtaacttatgacattcctttattattccataagcatttatggacacctaagtaaatgctaggtacggtactaaatatgtgaagatgacagaaaatgaattttagacttaaagacatttcttgtatataatttgaaattgtctaaaaataatatataaaatctataaatacaggaaaatagcctgtatgctttcaattacattgaaatatctagttaacatttttactttcacatgcaataatatccctatacgaagacgataaggtttcacatggtaaaatttctatagttcaattattctaatgaatgaaaacattccctatttaaaattactggaacttactgaattccctatttaaaattattggaaattattggaataccctatttaaaatatgtgccagaacatatagatgatgggtcaaaagatcatataaaacaacagcccctttaattttacacagaaacacaattaacaacatttactgggcgatcatcaccttcttttaaaactagctagtggtagtaactgcacgagtttatgtcccaccattggggcaatttcgtcattttcctatattcaagtctttatcagcaatagcaataacaaattcgagtgtgaaaaatagttggcatacttacatcagacatagaagtctttctacctaccaaaaaaaccaattttgctatagtaaacctatcaagatcgtattgaccaatgaagtaaaaatcattcattcattcatacattcaacattttgtaaacagaccagaaatcagcatttttaataatgatgcaagacaatataaatgtcagactgacataaagaaacatacaaggaaatgtaatgctaccaactaaataagaaacttaaatgagaaaactaagcagaaatgtgtagacccaaaaacaaaaaggggttttatttatatgcgaaatcataaatcactttaaatttcctaaacatgaatattattcatatttaagacagaagttttgcaaaataacatcagctgatacacatttcaacagtttaaactcttcattcccaggatatcccctaaatacaagcaaatttatgggtttggcctttaatacacagtatgattttttattgtccttttctctattgaaaaaaccagacatattttattaaatacttacactttagacagaactggcttgaaaacagaaatacaatcaacctaagcatcaaagaaaggtagatagatgggtgtatggatgaatggatggatagataagcaaataaataaatcactgagatcataaatggaagcgaagttaaacaagaggagagtaaattgatgtctgctatttaattaatattacaatattattcaaggagacaaatattatgcaacagtacttctcaactgccagttttccttaaactatcaattttctagaaaaattcctcaaaaagtagaacagcagtaatgtcaaaaatgtatcccaagacaaaactcagtaatggggctaaaaaagaaactcaaaatgaaaaaggttcacaatgtgctgtatatatttcaacttcttcaacaacttggtcctcctgcataaaaaaggcttagatattttgttagcaaagataattccaatacagataacccaaaaggttctcacgccatatttttaaaagttgacaaactatttgaaattatccaacataacctaatgaaaactctattaattaaacttattacttaaaagattagaaagtaatatcactataacccctggctgaaaaaataaaattttaatcttactttatttgtattaaattatatatgttcatattgtacaagaaatatgtttgctaccacggtgtggtaaaaaataatttaatcccaaagatatccatgtcctaatcccaggaacctgtaactgttacattacatggcaaaggagaattaaagtttacaaggaattatggttgttaatagatggcaagattatcctggattatgtcaattggcccaaagtaatcaacagggcacttagaagtgtaatggggaagcaggagagttagaaggagatgactagggaaaaacggtcagagagatacaacttggttggcttttaagatggaggaagggggccatgagccaaggaatgtggacagcttctaaaaactagaaaaggaaagaaaatggatctctcctagaataaacagtcttgccacactttgattttagcccagcaagatccaggtcttatttgtgatctccagaactacaaaataataagcgtataacatttaaaccaccaagattacgttaattaaacaattatagaaatttaattcacgtggcaattcctcatacataagacccaaaataagaataactgattatctttgagacacaatattccctcaactactttgaagttcttatcattatccttccaaatcatgtgccacaggtttgtggcacatgtcctgcctggtgtatccagccaggacttctagtagacttaacaggtttttaattatacatatttgtagctttaaaaaaaaaatcacaaactagcctattcaacattttccatatactttctttttacatatttatttatttatttagagacaggatctcactctgtcgcccaggctagagtgcagtggcataatcttggctcactgcagtctcaacctcactgagctcaggtgatcctcccacctcagccgccccagtagatggaaccacaggcattgtactactatgcccggctaatttctgtattttttgtagggacagggtttcgccatgttgcccaggctagtctcaaaactcctgcgctcaagtatcttcccatctcagtctcccaaagtgttgggtttacaggcgtgagccactgtgcctagcctaatttcatgtaacttaaaatctactctgcagtaatcaaagtcgaacaggaatattacattatgttaatgctaaactgttccaagtttcgtttaagaaatgtgaatgtaagaaaatctgggaataaatctaaaatggtagattctaggctaaaaaaactaaattaatattcaaattttcaaataaagacagattaaaaaaactcatcaagggttcacataggtatggttcaacatacatttttctttttttggtaaaatttagatatggtgaaacgcaaagatagtatcaattcaacgagttttgacaaatatatatatctgtgtaaccaacaatcaggataggaaacatttctatcacctgaagaaactcctattctttccagtcaatctctaccatccatagataatttattttttaatatccagcttaataccttactaacatatgcaaacttaactctttaatcacttaaattcccaactaagagagcaattaagttatttatatatacaaattttttttttccttttttacagatgagggggtctcacctatgttgcccaggctggactcttaataagtcctgggctctagcaatcctcttacctcagccttttacacaaacaaaaatagttactgaattgaactgccataatttttagaaccactaacatcaccaatactttttaaggaagattatacatttctatacgaaaataaccagccaaaaccttcaaaactacctctattttctgttagaaatacctatcagcaaaacacacctattttgcgatatcgagtcaatattaatacatgccgcattaaccatatcattgactacagtgaggaaaacccgagtttacaaaaacacactcagaaactattaaaataggtaggtaaaaaatattaggtagatacctgtacaaatattacaatgaatttggaattgtaagctttcatgcacacaaagggaaaaaaatttcctaaatttgaagttttcattgaaaaagtaaatggctcagggcattacaaataaatttcacagattacgtattcataaatcaacctttggaagtctagtccatgtcttgtctctactccgccccttaccttcaagctgtccctcagtgagaatgtacttggaacacaacagagcatattacagctcaatatcatgcacatacctacgctactcaaagaaagcactggcagcgtcacatgtaagaaaccaaaaaaaaaaaaagataatcaattctgcatggcatttaacattttaattgasaacatttttcgtcttatttaaaatcgtataaaacccagaaacagcttgactccaaagaactatacctttctaacaagaaaagcacattggggacagaaagagagattaccctccataccaaaatttttcacttttatcctttacggttagaaagccaagcatctattaaggagaggatgaatccgggcacagccaccaccacggcctctgcctctaaaacacataggaatccccggactgtgtgggaaggtctcttttcttttctccctccccttcagcaaccttacaggataagttttaagtctcgagctacagcactatgaagacttttccaagaaaagagataccagggaagctggccgcctgtcgccatgagtggtccgccccctacccccacctgcccgcgcggcrccggactcgcggctccgcctttcggggaggtctccgtggccgcccaggcgccacagcggggagccgcggtcgacccctccgggakgggggccagggcagcctccgcggctatcccgggagtcctgctccgacaccacctccacaggggaagccgctcggagagacgcagggacccaggcaagggatgcgggcaaacgcgccaagggttcrgcagaggggcgtgaccgccagttggccgggctgagcgaggcgccagagggaagcctgcaaggtacgtctgcgagagccgggtgcgggcgcggcaggggaaaaggggggcgctsrctctcttaccgccaggtccggattgcggctgtccctgtgtgacacggctcggatgacccccgctcgccagcttcgccagccgcgtccgctctcccagcgctccgaacgtgcctcgtcgccgaccgccacacacaggaaccgcttacccaccagctctgcccgcgtctctaccgccatagctgtcgctgccgaagcggccgctgcytcctccagtgcgagggaaccgatgaaacctcactcctaccggccgctcatgctgaggagagcggaccgggacacagcagcggacccgaaagagcgcagactcgggacgaaccggccgctctgccccggacacagcgacctcgggccctccccgcaaacactcctttggactcccagattcgcagccttgtgctgcagcgccacacaagaaaactgaaacaaaacccaacgcggccgtcgaagaccccgaggcagcccagccgccgccaccgcgccgcggccagtactgctccgtctccctccccgggcagcggcggcgcgcagcgcgtctccttccgccggcgcgggcggggcagcagccgcgggagggtcggcggaaccaccgcagacggaaagtagtgcccggccctgcggaggcggcagcggccactgggtccgtccagatccagaggcggcggcggcggcggcagcgggagacgaaaaaatgaagagggccgcgggaaagtaggcgacagctattcaaagcttttgggggtctacctttgtattcgttgctccctcagaggtggaggtgaggggaaagtgaagtgtagtggttccactctgatcacaaaataaactcctgggttgacgcctcacccgcggtttgatgttcagagcacacagcgcccgccgcctgagttagcctgaattagcagtcccgcagtaacagcagcagagcaggacaacacttctactgaaaastaagccccaaagtcacagcagaaccaaccgttcatgacttcaagggaaaacgagggggaaaatgtgatcctttcattcttctcatttgtggtgatactaattacatgtttaagctattcacagatttaaattcgtcactgctttattataagaacagcaaatgctccgtggcgggcccttgtcaacgtcctgaaatttcacaaaccgtgtctgcgacagtcttagtacttttagtactggtacacagctcaaacacactggtcagataataaaagcagagaaaatccccagattcagttattagaaaataccatggaaagaaaaggattttagccaatcacaattcaagaaaaaaaatatttatttcccatccaattacaatcggactccctaacccacacaaagatctctaacttggaacaatcactcttctttgatcaacttatttgttataaatcaaacctccctacaaatgtcagtgagcagttcgatttcaggcaccctttatactgcttttttataggtagtccaatattctaaatttcagtttcttgagattttcctgaacctctatttaaaaaaaaaaagttaacagagtttacagtagtaatctgaatgtttaaaataactataaggcttttatctgttttctctagaacactcaagctgggcaatttgaagtggagaaacacaaccactgctaataggttagaaaccaaaattataaggaagatggattttaataatcatggtcaaattttgccaaagaccaaacatagaactgtaataaataggctgggcacggtgcctcacgcctgtaatccctgcactttaggaggcagatcacctgaggtcgggagttcgagaccagcctggccaacatgatgaaactaaatgtatttttagtctctactaaaaatacaaaaaattagctgggcatggtggagcatgcctgtaatcccagctactcaggaggcagcaggagaatcacttgaacctgggagctggaggttgcagtgagccgggatcgtgccactgcactccaacctggtcaacaagagcaaaactcagtccccccgaaaacaaacaaacaaacaaaaaacctgtaataaattaaaacagcaaaacatacccaaaaatgcatatcggcaagttgagagaaaaaattttgcttgggcaattttatttccaagtccactttttcagtgtacactgtataatacttagcaaattatcttaagaattacagatgaagatttctaaaatcagtgtagattaaggaaccagtaaagtgacttggtgacaataattcaacatatgtaaggataaaagagtagggagatcaacatccagataccaagtcatcaatgatctgctttgtgaccatgggcatgatgcaattgtaaaaatgcaaaaatgcctgaatcctaattttcagtgatatcctaggagcaaacgaaaaatacaaataaagtcatttgagaaaaacatgcaaattcatcagttattacataaatcccactcaccaaattacattcttaagagtataggttgctagttgccttatataaaactgccagctgttttcaattttgtaggcaaactgctctaaatgggcccctgggaactcccactacatgttgaattccatccttttcagtcctctgaaaagcatgtaatccaacaaatcaatcaaaatatttcatgtatagaaacaaagtttttcaggagggcatatatccccaaaatatttttaatcaagtatcttaatattcttagaactctggtccaaattctcttctactaatcccttgactacagccaatgcctagagtttacactaatttgtggatattttgctgttggaaaaatttaaaagtacatttttttaaatgtagaataaaaagtccttaaagattttttgtttgtttgctggcattttttgcttcgttttgtattaaggggtatttttattattttatttttgccagcaaatcataactttgtaaataacaaggaatttaaaaaatttttcaagttggttttgaaacttcagaatatttgtttcttaacttgtttccttacattctttacttccataaagatactcggaaacagaagagtaatggtatttgttttcattatacaggtaaaaagaatgacagtgaattacttaaaataactaagtttacttatagaagctgaaaattagacatataaattagattttctagtctttccatccccacgtgtaaatatgtccattaaatatgcctatgcacacatcaattcaagcaaacctcctacatcaaatatcttaatctacaccaaagactgggagattatttgattttttccctttttagaagttcacaaaaatttattcataaaaacagcttgggctggatgatggcatgtgtctgttgtcccagcttctctggaggctgcaactggaggatctcttgagcccaggacttctgttcaggctgggcaacatcacaagaccctgtctctaaaaaacatttttaaaatacaaaaaaaacccacaaactattttgtttttttaaaaaactgacttataaaggaagaaaatgtattcactgcaataagaaccataattatctacttagtttagtctgaataagcaaaagcctagtagttatagatttttcactttttgacttggtatgtaactgtggaaagtgtcaatcatctgctctcatacatactaatattttatgtcactatacatgtctactttaaatatcacagatattatctaacacagacaaaaagtttaacacatctttttagccaccacttatagaacacttactatgtgtcagacagtatactaagtactttacacacgtaatctcattttgaggataaagaaaatgaggtttagagaagtttagtaacttgcstaagaatacacattaagaaactggttttcaaaaccagatcttgtgataacaaaggctccctgctattaactattatactaaaaagtcacttaaaagaaacgtgaaggtcagttatcaagttgtttcatccttatttacagtttactcataattgctgtgttcagtatttatttagcacttactatgtgggtcacatcctgcaaggttctggagataggacctttatccttgagaagctcacagtctatctggaaagatagacaatagaaatgctttggtttatttaattaaggaactatcaatagaatttcatccaaatttaatgcattttaacaaatatttttcaaacctattataacttgaaggcttttattaattgtcaaatgtaaataatggactgcgtttatgaagtcttagattatatatatagatagggctaagaatcgtgcaagccactatttaaatgagggaaaccaagagtttcaactgaattatgcaagtggaagaccaagaataaatggaatataaatttatgttaccatttttttattaaaccttaaataatttgtatttggggtttgtataccctaagcacttatttaaaatgaattcctcaatcacatttatgataatgataaattaactcaaatatcaaaatatcacttcctcaaggaaaccatccctgattctcagactatgtaggattccccaataacagattttcaaaacatgccttatttgtcttagtactaccacaactgtatttacaccatttattgtgtaattgatcatttatattttttccctttataggatatataagctccataaggcatctttgtcttgttcataactatactcccagcagctaccaggccttgctaagagatgataaaacatgttatagcatgaatgaatgaatgaatgaatatagcaaaatgtacctttttctaaatctaactcaactaagaggaacttagaatctcggacataaatgagagttcctgttcttcctacagggttattcatcaccttcaaaataatgtcttatgtacattatctcttttcatcatggaggtacaatgttaagccttcgaaaacatgcttcagtagaaaagcaaggtttttcctgggaaaatttctaaagaacagatacagaaggaagagttacaattctcaagaaaaaacattcatttcattaccaaactaccaatttaatacaaacccaaaaatgatcctatgagtgtatatccaaaacactagtctattcttagtcttctaaaaagaacagtctcaaataacatccttgatggagccaatatacaaacataactttctgactatcttcttgatgccatggaaggagggaaagagaagaaaaaaaggaagatagaaaagaaatgaaggaggaagtgaagcaatctctattgggccttctaattgtactttctatccatctgttatccagtttccagtttaaattctggctgcacaggaatgtaccacttcttttcaacattctcttctctattaaaaacaaggttgatttttaatgataaaaaattaaaaatttagaaagaatacacaaagcatcagaaaattcctaatctgctgagtgaggaactacaagaaataaagaaatggaaagttgccattgagcacacagtaagagtcttgccagcgtgtcccactgcactttttctctgttcatcatccctatcataaacgctccaactattaactaccattaaaatatgcaagtctgcactttgcaaacaggttaggttccaaaagggtcgtgttcttattaatcttacaagctttcactattgttacaagttaatagcagcagggtaaaagtcttctgtttatatccatgaaagttcattaagtaaaggaggttctaaacttgtattaaaactataaatgaaggaaagccaatgtaaaatctaaactaaaaagtaataccaactcaaaatctctgcatgctaaccatatactccatctatgttcttcctcaccaatgaagctaggtattatataatgaaggaaatttataatcaagaacacacgtaattcagcaaggagcaaagtatgctttcctgtcacgtggtaggttcaaacccccaaaatgttaaaggactgacaaaagtaatcttgcttagcaaaacaaatattgttagaaagacttcagcatatgctatttctcaaaggtctcaaagaagatatacatatgattaatactaatattactacatactaattactaatattaatacatactaatataatacaaaccaaagtactaaataacagtttttaaacatcattgtaaaactgcttctttcctctgctttccaagtttggtcataaaaccattatattaaaacaaataggtcaggcatggtagctctcacctgtaatcccagcacactgggaggctgagtggggcggatcacctgaggtcgggaatttgagatcagcctgaccaatacagtaaaatgccttctctactaaaaatacaaaaattagctgggcatggtggcacatggctgtagtgccaactactcgggaggctaagggaggggaatcacttgaacgcgggaagcaagagacttcagtgggctgagattgcaccactgcactgaagcctgggcgacagagtgagactcagtctcaaaacaaacaaacaaacaaacaaacagtctatcaaaactaacttgaaatggaagaatttttgcaatgttctacattacaaataaacttttgaattgacactttttaaccttatataccttcttcatctataatagataaaaatcctatctcaactattatatattatatataataatttcttaataatttcaactattctagctacaaaaattatcttaaaagcaattgcttcatttgcttttatatctaaatttgcatggatgcttctttcccccacttgcaatttcttttttatttaattatttatttttttgagtcagagtctccctgttgcccaggttggagtgcaacggcgtaatctcagctactgcaacctccacctcctgagttcaagcaattctcgtgcctcagtctcccaagtagctggaattaaaggcatgtgccaccacgcctggctaatttttgtatttttagtagagacggggtttcactgtgttggccaggctggtctctaactcctgacctcaagtgatccacctgcctctgcctcccaaagtgctgggattgcaggcatgagccactgcgccccgccctgcaatttctttttatattcacaagttttaaaatttcatatatagccaaatatgctaatatatttatgttgcagccttaaggcatgctttaaaaatactctatgtaggtattctttggtattttcttttaggaattttataattcartttttatttatttatttatttttgagatggagtcttgctctgttgccaggctggagtgcagtggcgcgatcataggatcaccgcaaccgccttctctcaggttcaagcaattctcctgcctcagcctcccgagtaggtgggactacaggcgagcgccaccacgcccagctaatttttgtatttttagtagagacagggtctcatcatgttggccaggatggtctcgatctcttgacctcatgatctgccctcctcggcctcccaaagtgctgggattacgggcgtaagccactgcccccagcctaattcaaattttaaatctgttaatgtatcccttaattacaaaagacctacagaatagagatataatactttctataaaactaataaagatgaaaaaaacattaagtaggacaaggatatggtaaaacaaatgctctgttgtagaagtaatacacatttggttaaaaaaacttttttttttgagacacggtctcactctgtcatccaggctggagtgcagtggcacaatcttggctcactgcaacctctgcctcggaagttcaagcagttctcctgcctcagcctcctgagtagctgggattacaggcacacagcaccacacctggctaatttttgcatttttgagtagagacggggtttcactatgttggccaggctagtctcgaactcctgacctcaagtgatcctcccaccttggcctcccaaagtgctgggatttcaggcatgagccactgtgcctggccaggtaaaaagaacttctaggaattacagktcacttattgcatcgaaactggacttgcctttacattcttaatgtacttttacttttcctcaagatatgaacttattgttgtaaagctgaattttctttcgctacttaaatcatttatgtatatctggtaaattatgactaaatttttgttaaattgcataaagtaaactgaaatacatacttggggccaggcacagtggctcacacctgtaattccagcactttgggaggccaaggcgggcggatcacctgaggtcaggagtttgagaccagcctggccaacatggtgaaacctcgtctctactaaaaatacaaaaattagttgggcatggtgatgggcacctgtaatcccagctactcaggaggctgagacaggagaatccctagatcccgggaggcgaacgttgcagtgagccgagattgcgctattgcactccagcctaggtgacaagagtgaaactctgtctcaaaaaaaagaaaagaaaaaaagaaataaatacacacttggtacactaaaaaaaataataataataaataaataaataaataaataacttctgggaagcaatctgaccatctttactgataacagccttaaacaaatcataccatttgactcagtaattcgactccttggaaatcaccctcagtgaacagactaaggatatagaaatatggaaaaagtatgttagatgctttggtcaactgattgctgagtctctcctcaatcgctaaaatgagtgggagtgtaagagtgcttataaagcgggcagccgtgaagaaaagtgttttaggatgagagagatacatacttgaatcctgaagaaaatttatcaaaggatggggatgaaatagaaataaaaacaccttttttttttgtttttttttgagacagggtctcactcttgtcacccatgctggagtgcagtggtacaatcatggctcactgcagccttgacccacctcccgggctcaagcaatcctcctgcctcagcctcccaagtagctgggaccaccggcatgtaccaccacgtccagctcattttttatttttttgtagagacgacggtctcactattttgctaggcttgtctcaaattctggcgttacgcaatcctctcaccttagcctcccaaagtgctgggactgcaggcatgagccaccgtgctcagcccaraacaatttgttaaacagagcaaaataaaatcaaagagaagactgaaggtaatggggtcaaaagttccaaattatgtagtccagtcagcctactctcaaattattaaaaaaaaaaaagaatgagtaataatgtaatacggaaaatgtgacaaattgttaaatgaacaaattacagcaaatctaatgaatgctgatagaagttggaatagtgcttacccatgggggtgggtagtattgactgtgaagtggcatgaaggtgctggaaatgccctatatcttcatcatatagtgatggttaagcgagtataaaatgtaaagataaatcatgaaaatttgcagatgttcatgattctaaacataattatcctttcctttacagttataataaataattacatcattattacttgcaacatatgtagagtcattatgtctctctcaaatgctcagttcgattaggactgcatttatgaaccctggacagctaaggatactccccattttacaattttgttttatgcttttaaaaaaataatccatctgaatacatacttcctagagggaatagaaatagccttcaatttggtctacattatcaccactgaaaactatgttttacttagtaaggaagatctaattccatgaaaatagttagcgctaccttaaaaagttcgggtacttgtcaaaaatggcttccaaatatattccttttaatacaggatgtgaaaacacttcctaataaattcctgcaaaattagatgatactgtatgtacttctgaaggacagacaagaaagtaacctaagaccaaaacaatagaggtctcctactactggggagaaggaggattatcaagaatagaggaaaacagagcctgcctaagactaatactggtctagaacaaaagagaaagctcaattcctaccaccacaaagctaaacagcatccaaggccccatgcccaccacaacaacacaaactagctccaagtaacacctaagtaagagcattcgactactagagaagtagcaaaagaacagagagagaccctctctgaagttcaggtgcgcagataaggctaacaggtaaacatgaagtaaaaacattggtcaaaactttgcagcaaatcaatccccatcttaagtactaggtgataatagatttaaagttgataatgggctggtagcagtggctcacacctgtaatcccagcactttgggaggctgaagtgggtggatcatttaaggtcaggaatttgagaccagcctggccaacatggtgaaaccctgtatctactaaaaatacaaaaaattagccagtcatggtggcaggtgcctgtaatcccagctactcgagaggctgaggcaggagaattccttgagcctgggaggaagaggttgcagtgagccgagattgcaccaccgcactccagcctgggcgacagaatgagattttgtctaaaaataaacaaatatatacatatatttatttattatatatatataaataattatatatataaagttgataatgcactgaaggtaatcagagcaataaaaggcaaattctcatcaactccaagcaagactaattcaaccctccacgctaacaccttagcagaacaagagtcatgacaaattctcagcataaatacgatttaccataaaatgatgactggcattcaatcaaaaattataggctggacagagtagctcatacctgtaatccccacattttgggagacaagaggatcagctgaggccaagagttcaagaccagcctgggcaacacagtgagaccctgtctccacaaaaaatttttaaaaattagccaggcctggtggtgtgcacatgcagcccaagctacttgggagggaggctgaggcaagaggattgcttatgtccagaagatcaacgctgcagtgagtcatgatcacaccactgcactccagcctggatgacagagcaaaaccttgtttctaaaataagtagacaaacaaaattttaaaattaaattaaaaacattttttaaaagaccaggcatggtggctcacacctgtaatcccagcactttgggagggtgaggcaagaggaccacttgaggccagcagatcaaagctgcagaaagaaatctctagacaaggaagaggggaaaatatgcaaactaaaaggaatgagaggggtgacatcactacagattctacaaatattagaaggataaaagagaaagtataaaaaactttatacaaaaaattcatcaatttacatgaaacagaaattgctaagagacacaaactgtagacctctctcaaaaagatatagactgaagatctaaataagtggagagatataccatgtccatgcatcagtattaataatattctaataagactcaataagattctaattctctccaaattgatctgcaaatttaaagcaatcccaatcaaaatgatggtattaattttttttttgacaccgacaagttgattctaaacccaaataagttaagatgaagaaactggaacagccaaaacaatttcagaatgaaaaaattggaagactctttatataaaatatgctatcttatattaagtcttactatatagctgcagtaatcaactcaccataatgttggcaaaaagatagatatacatagatgaacagaacaaaataagagagtccagaaatagacccatacttatatggtcaattgatttttcaataaaggtaaaaatgcaattcaacagagaaaggatgatctcttcaacaaatggtgccggaacaatttgtcatccatatgtcaaaaaaaaaaaaaaaacaacgaaccttgacccatactttgcagcatatactgaaactaacttaaaatggagcatagatctcaacgtaaaatataaagctaaaaaactttcagaagaaaacaggaggaaacattttgtgacactgggataggcaaaaatttctcacctgcaacaccaaaagcaagattcataaaactaaaaattaaacatagttaaaattaaaaacttctgctctccaaaggtcacagggtgaggtaaaatattggcaaaatgcatatctgatagaggattaatatctagaatatttaaagaactttcaaaactcaataataaaaaaaacaaatttttaaaaattgggcaaaatatttcaacaaatacatcaccaaataagatatgcaagtggcaaataagcacaagaaaagacactcaacatcattaattatcagggaaatgcaaattaaaaccacaatgagataccaagtgtaaaggaagataaggaacaatcagaactctcatacagtgctgactggaagtgattgccactttgcaaaagagtttctaataaagttaaacgtatacttttcatatgacccagtaaaggaagatgaggaacaatcagaactctcatacagtgctgactggaagtgactgccactttgcaaaagagtttctaataaagttaaacatatacttttcatatgacccagcaatcccacttttaggtatttacccaagtgaaataaaaacctatgttcataaaaaaacctacctctacacccaaatgtacatagccgctttatttgtaattgccaaacactgcaaacaaccaaaaatgtccctcaaatgggaaacaggcaaactatggagtgctactcaacaataaatgaaatattatacatgcaacaatatagatatggatgaagctctgcgtttggcgaatcctcaaaaccaccctcagaactcactagagagactcataaaactcaaaagaaacattatacttttgcttactgttaattacactaaaatgacaacattaaaatcagcaaagggaagaggggcataggagacagcaagcacaagcttccagttgtcctctcccggtgtagtcatgcaggcagggcttatttctcccagcaacaacatatgcacaacatgcaggaaatactggcaaccgggaagctcacctgaggcttagtatttagggtttttactggggctatttgcatggctgaccttagtctccagaccccccagaggtcaagctgataaccacatggtgcatacctacagtcctagctagttgtgaagctgaggctggaggatcacttgagcccaagtgttcaaggttacagcgagctatggatcctgccactgcactccaacctccaacagaatgagaccctgtctcaaaaacaaatgaacaaaaaccactaataaagaaaactttttggtcttaatataagcaagaattgttctattccctagcaggtgttttgtttttatcatatagacactgaattatatcactgacccaattttctttctatgtaggctgttagaacattttatgctatacactttttacgtattatataattttttcagctttttgtttcaaaaattttcaaacttaatgagagagagaaaaagaagaatgaatacccacatacccttcatgcaacaataccaacaaattgccaatcttatttcttctctttttttttttttttggctggaatgttttaaagcaaatcccagatgtcgtatcatctcacccaggaatagtaaagaaagtatcattatccattaaagacttttctttaaagtaaccctacaataccattatcacattttacaaaataagcaataattcttcagtatcatctaataagtagtccatactcaaatgtcctcaattacctcaaaaatgaaatttttgccattagtttgtgtaaaccagaaacaaaacaagaaccacacattgcatctgattgataagtctctttaaatctcatttaatctcatttaagtcatttgtcctggagaatttcccatatcctaaattcagctaactgttccctcatggtattaatttactattctattccccatatttcctgtaaagtggtagtaagatctagatctagagacatgattcagtttcaattttttggcaaaaatagtccataatagtccataggtgatacatgtactttcctaatccattacaytaggacacacataatgtcttgttgtcccactgagagtgacacagaaatagcagaacttcttaaatttaatgacatatgagacccagatttctactttgaaagattcagacaataatgatcccagtaaccaaaaacagggaagagatttttgagaagactaaatattatcagtggatttctttgggtgatagatttgccaaatatatattttttaatttgttccagttttctgattttctaaatatggtactctagaataccattacaaaaaagaatgaatatctattactttgacaatttttttaaatctttaaagaattacactatatagttagttgtagtccagagtttgtcaaatgagacaacaatgttctgtggccaatataaaaggttttgatcctgttggaaagggtcccatttcaccaagatgcaaatgacctacaaagcccatcttttgcaaccctgtgcgggtctcctaaatacattcgatgggagcactaatgaatcctccagaaacagcctaaactatagtttsatttttttttttttttgaggcagtctcattttgctacccaggcttgagtgcagtggtacaatcatagctcactgtacttcgaactccttggctcaggtgatcctcccacactggcctcgcaaagcactgggatcataagaatgacacaccacacctggcctaaactatagttttataaagccaacacaactccagggactggcaccctagaatggcagcaatgaaagctgtgagcacaatggttacaggaccaacgcatttaaagcttccttcagtggatgttattgacaatttaaaagtactattgtaaaaaaaaaaaaaaactattattcatcacagccagtttgaatgcctatagatagaggcaccatttctgacagaaagcactgtggatgcaaacttatttttgctacattgctgttatatcactcagttaaaaaaaaaatggaaatggcaaatgagaaagcccaggactctggctataactacaaaggaagaaaaagttcctttttgtgactaccaacaacagtcctttccttactttcattctatatcacaggatattaactttctggagaagaaatggtaagcattttcatcgcctaccatataattcatatttatatgtaagagaaattatgtttaacataaccacattatagactcatcagaactaagtatcattatttgtaaattttacaaatgccactcatgtgttgacattataaaattaggctaatcatatcatagactgaatcctcaaatgtttttactaaattcaacttctacctgctgagaaactataagtatttttcttcaggaactaaataggatttccttgtattataggtactgctaataaatgaagttctcttctttagctgataaatagctgtagaatgaaatagtttttaaactttagataaaattttcagatttgaaaaataattgatcccttatagttttttaaagttcacttggaaattacggtgatattaacagaatatgacaatatgtacaaacacatttattgcagataccatatctactagacagaatatttatatctttaaaatagtggacacatttccttttatgaaaaactgatttttttttttgcttttttttccttttaaaaatatgagcagtaatcacattgactaaacaaacagcctttcttaattctgtggctttgagacttcacttagaagctttatttaacaaaagacatttctgaataaactacagtcaattatagattatctaaatgtggcttattaactgtgtattttaaatgtcttctcctgccacccagaacatttttggatctcttccataacctcacttagtagatacaaacacttctttcaaaaataaattaatctccagtttattcagaccattttgaggactgaaagaggtaaaaatcaggagagaaaacaaacccccaaaacaaggtagtaagacacacagggaggaagagacaaacaggagctggaggaagtggaagagaggagaagagaacctacggcagagaaagaactgtaggtttcccttggattaaagactcttcaaagctgcatggagagggagggaaattccaagtttttgttcttttacatcctcatctagatgtatgacgaactcactgtacagtrcattccaaagctacaagtacatttcaaaattatatgcctttcattttatttttggctatatagtaagtmcccacttaatgttgtggataggttcttggaaaccgcaactaaatgaaaggagtacagaaggttctccaaagttgtttcaatcaacctcatttccttacgacattgatgaggaaaaaaaaattggtttcattatacattgtttcactttttaagtagacgtttccaagaacttaccaagacattaaggacttaactattcactgatgtgttctagagacaagtaaataatcagaaagtacttaaacattcttggttaaatgtcagtataatattttaataatattgtggttaagacagcaaatgagccaggcatggtggctgacacctgtaatcccagcactttgggaagctgaggcaggcggatcacctgaagtcaggagttcargaccagcctggacaacatggcgaaacctagtctgtactaaaaatacaaaacttagctggacacagtggcatacacctgtagtcctagctactcaggaggctgaggcaggagaatcgcttgaactcaggaggccaaggtagcagtgagctgacatcgcgccactgcactccagcctgggtgatagagcaagacttcatctcaaaaaaaagaaaaaaaaragagagagagagaccccaaacttgagctacattgcctgacttctaatcctagctccaccatttactagctgtgttaccatgcaaatcacttgatctctctgtgctttcttatctatgaaatgggaataattcctatataaagaagctgctgtgcgtggggatcacataatgaacacataatatatgcatagaacatagttgagcaaaggaagcactcaattaactattgctaagaaaggtcagtaacagcccgtttgcttttttaagaaatcaatgaaatgcttcctaatttttgaaaaattaaatctgtaattactatgtatggttaatctaatcaatcatgaccattttgaaaaatctccaaataactctagtctaaataattatcatcataaaggaactcatctcaaattataactataaaatctaatgtaaagtaactatatgtcaatcaaaatagtctttaaaattggtcaactggattgttcattattcatcatgaaaacaagtaattatctgagaaatttactaattttagttcctccatgaaaaccaatagaatttcaagaggataaaacaccattgtcagttacagataaagtatgatagattaaaacaatccagacatttctacaaagtatttaccacaaaacataccataacattagtttccaagtgagcggttgcataagtctagatcagaaagtcttagccttcgcactagtaacattttaggaaacataagttttggagggggaggctatcctctgtgcattttaggaagctgagcagcacccctgcctctgcgcattagatttcagcagtacctacctccccaactctcaccctccatgtgacaaccaaatgtgtctccagacattgtcaaatgacaattgctctactttgtgagaaaatttttgtttataacaaagtagcattataataacaaccaactttctcccatccctcccccttttgccattttttgaaaacttcacaaaaagatggattatcttccccaaatgcattttagtatcttgattatacttgcaaatgatattgctgctggcatctattttatacttacctgattctctgcagaacccaaaataatgtaattcatttctcaataatgtatgtatacattttaactgtgattcatttttaatttgtcctttcttcattaggwttaaaaattttaatatcttaaaccagacacattatgttgccaatcactagcacagtacttcagtaaatgcactaatacttctcagcatgtcataactactaagcctctaataagcatttagcatgaattatatcatttagtcctaacaataatctgaatacatattatctctactttttcaggtgaggaaactgaagctaagaaagaataacatgcctaagttatgaacatgacttcacagtgataggaagtgacagaaccaggactggattgcaagcttccaaaggcagtgtttatattcactagctgggcatggtggctcactcctgtaatcccagcaccttgggatggatggatggatggatggatggatggatggatggatggatggatagatagatagatagataagatagatagataagacagacagataaaaataaaaaaattcacaacaccagaatgatcctaagaaccaccatttcaaaaactcataatggacttcgtattttttgagatcatactgctttcctcattgaataattttcagtatgtaacttctagtgtatgtaacttttccaaatatatcccttttcacgctatttataccctcccacttcagagcaagcacagcacttatttgaacttcaatagtggcctttgtgataggataatttgtagttgaacttgagattttgttaaaaaaatggagttgaaaacataagatcttgatgatcaaaccaataaaagcagtgacaaccctacttttactgtctcttaacttaaaaaaaaaggcaagaatagatgttttactgtctcttaacttaaaaaaaattggcactatccatgccaatttatatatctatctaaaattgattataataagtactgtacatttaatttctattgagctttgattatgagatattaatgacatatttctgacaatggccagactcaaatagaaaatagagggggggaataaaaggaaggaaggaaacactcacctttcctcagttttcccgattccactactgcaaggccctagaggctccaaaggacactagagcaagctagggttcatgctgctctcccctcccctaattcactggaggagtgaattaggatttggcattatgggtttaaaaaaaaaagaaatccagaaatagatgtaaacccactaaagggatggtaacaacactagcctcataaagattaaaataaataatttatttataaattaaattataaatttaattaaatatttaaaatgattaaataaaaaattcaaaacaactagcacagtgccaggcatataagtgcagagtaaatgctaagtgttcattgctttttgtttgtctgtttttgaaatgaaacgctactagaaaaacttttaaaacacagatgagagtatctatggctcttcctgaaatacttactgtgctctcctctttctatacctattctttcaaaatccccttgctatcaggttgtgctcagagaatgcaagcctttcttacagtctccatttctacctcacaagtctttattcagacaaaacagcagcagggagaaaaaaaagaaaagaaagagaaaagatcccctctccccttcaatgctttgtttctttttttctaagcatgtgtgacagtttgatgtagaataatgagtgacatcgtatcctagaaataaaattctcaaaattaacaaagaggtattaaaaataaatccaaatttactccattttgagttaggagaactcatatttggaaaagcatcactgtgcatgtttcatttccaggactgggatttgaaagcagtgcctggggacctttggcacaacatccagcacagggtaattttaaataacagtgctatatgaatgaactaatattttcctttatctaaccagcaattaaatctattaacttacttagtaaatacttgcaaagggcctactgtatgccaggtactgttgccttgtacagggatccaaaagtgaacaggacatatatggcctctgttcccaccaagttgacagcacagtagggacaagacaaataaaacggcctatataatttagtatcacaaagtgagaagtccaacagaagatattaaatggatggatggcagcacacagaaggggcaactaatccaggattggggtcagggaagtagtcagaaaataagtgatagacgtgacaargcctgaagaatgaatgaaagtcagccaaagacgtggagaaggggaaagtaaagggcttcaagcaattgtaaaaaaaaaaaaaaaaaaaaaaaaaaaaaaacaaaaaacagaaaacttgagagagcatgccacatgtgaggaagtttgagaaattcattagagtatgactgaagcttagcacgtttaagggacagcaggggcaggggagattgggagacagaagaagcatggatagagcgagtgctgagagctgaaggtggatatgttagcagggaccaactgaccatgacctggtaaaaagcactttgtgaagctgtattttagactaaaggaaactgaaggcatttaaggactttaagcaaggaagcaaaggaatcagcatttagaataactaatctacctgtggcacggaaaatggatagaaataattcagtctattgaaataagcttaatttatctcttcctgtaactttaatccttcctcctctaatggtaccttactatgggcaattaaaaatgtttatatctctctcatctaaaaaaacaacaaacccacccactcccttaactgcatatcaccctgcagttaccattctgtctcttaacttacagtacatttcttgaaaagtgaactgcatgactttctccaaataactccaaataactctgcatggcttactcctcactttcctcagaaatctactctaatattaccctaaaatggggctctctgagcactttacataaaatagcaccaccttccacacctgtggcattccctaccccttatcatcatcagacactatggccaaggcgctacactaagtaccttacatgatttctatcattaacagtaatgatacggatgaataaagtgaggcttaaaagctaacttgccaaaggtcacaacatttgctaaatgctgaagccagaactcagatttaggtaagttcatggttggcatcacaaaattgaaggaggacaaagataatagcttctattttactttctgtttgaaaagaagacaaggtcatctgttaagaataagaggaaggtatgatataggaagtctgaagagaataaaggagatctaaaatagccccatgaaaaatgggagaatggactaggaagtattaaaggactaccaggcaaaattaaggacccagttgaaattacaaaatatggatttakagtgacaatgacctgtgtcatttttcatcaggaccaaagatgaaggggcaagtaaagcatatagacagtgattctcaacacaggagggctggggtgaacaattttctccccttgggacatttggcaatgtctggaaacaattttgtttgtcacaatctgcaggaaaagagttgctactggcatgcagtggatagaggctaggatgctgctaaacatcctataatgccaaggacagcactctagaacaaagaattatttggatccaaaatgtcaatagtgctgatgctgagaaacactgactgatccaggttggcagatttcctaggcacatcaatgggaagacaaagggacaagaaagttaaaagacactgatcagagttaaggtgatagaccacgaaggtgggtaaggcaaagatttagtatgtgagaggcctgacagatcaatgagggggacaaagtggcctctgtgtttgaaatgttcaaatggctgacatgtcatcaatgagtgatcactcttaggacattactacattcatcgggaataatgtgatagactttgcagttttcaactctgagtgacagagaagaamctatcgtttactgtgaagttgtatgaaccaaccaggatgctagttcacatttgttatttcatttattcctcatgtaatacttctaagaaaggtatattattccaatttcataaatgaagacactgcgacacagagaggtgaaagttaagtgtatatggtcatacgatgtggatgacagagctgggattcaccccagaatgagtgaatctccaaattcacactttctgaaccaaaacgcaggagccatgacttacaaaaaaatggggtgggagaagagactggcccatatgtttacagacatctgtttgcacacaaagtacacacagcctcagtactttatagtcacggcatagatttatgtatgcaaatacctctacttcaaaggaaggccctcctaatatgtgcccttatttcaaacaaagtggtgatccatcagaccagaagactttaaccatgtggagcctccctacaactgggaaaatagtatttgtaaatatttttaaaatatcaatgttctaaagctacctttcttagattaagaccagtgtgggaaaaaaatatggtgcttctttttcttaggtaaaatataaaacatacattagagaaaaagaaaaatcaacaaggctttcctaacgtttcttgaaaaaccattaagcccaggttcttttcaaaatgagttgaaaatgaatgttaaaaaaaaaaactgtactatatttaaagataacactactgacactacacagcagggacatgctctcagcactcattatatccatttaattaaaaagacagcaataaagagaaaataaaaatagtgttttatatgacttatatacgagtaagctgagattaactctatctttcccattatttggcaactgaagatatgttatagtrtggcataaaacagcctaattttgctaagggaaattgataacctgcagtgggtgttgagaggagcctgagggtgctggtaatgtgctgtttcttattctgggtgctgtttatatgagtgtgttcagtttttaaaaattcattgagatatatccttatcacagtcatgtgtcacatgacattttttggtcaatgacagatggcatataggacgatggtcccataagattatgctggagctgaaaaattcctatcacctcatgatgtcatagctggcattacatcctagcaaaacacattactcatatgtttgtggtggtgctggggtaaacaaacctactgtgttgctagtcatttaaaaagtaaaaaatgaggccgggcgcagtggctcacgcctgtaatcccagcactttgggaggctgaggcaggcggatcacctgaggtcaggagtttgagacctgcctggccaaaatggcgataccctgtctctactaaaagtacaaaaattagctgggcatggtggcgggcgcctgtaatctcagctactcaggaggctaaggcaggagaatcacttgaacccaggaggcagaggttgcagtgagccgagatcgcactaccgcactgcagcctgggcaaaatgagtgaaactctgtctcaaaaataaataaataaataaataaataatatgagtataagctacagcagcaggagtcatggcaggtcaagtgtttagaaagcttcttccactctttcaccgagtactggctgaaaggagtggagctgaaactgtaactaaaggacgcattatgctttcagaaaaatctcaaggaaaagtactgcaagcaagaggagtaactgttggatgggggtctaaaaggaatgagtgaagagattcaacactgggattacaggcatgcactaccacacctggctaatttttatatttttaatagagacatatttcaccatattggccaggctggtcttgaacttctaacctcaagtgattcacccacctcagtctcccaaagtgctgggattacaggcgtgagccactgggtctggcccacttttccaggttctataccaggggtccccatcccccggaccatggaccagtaccagtccatggcttgttaggaactgggctgcaaagcaggaggtgagctgcctgtgagggcgcattatctagcctgagctctgcctcctgtcaaatcagcagctgcattagattctcacaggaggacactgtgaactgagcacacgaaggatctaggttgcatgttccttatgagaatctaatgcctgatgatctggggtggaagagtttcatcccaaaactattcacccaccccagtccttggaaacattgtcttccatgaaactggcccctggtgccaaaaaggctggggaccactgttctacacctcagatgtacaagctgtctccaacctgagccttgcacatgctgcttcctttatgggaatgcactttcccagactcttgacctactgagctcattctcaatttttaggcctcagctcaactgccacctcttcatgaagcccttcatggacaccctcacagaaagtgactcctcagttattctttctttcttgtccctctatttatttccttcacagcacttagcacaatctataattatttatttatttatttttttttttgagacaaagtctcactctattgccaggctggagtgcagtggtgcaatcttggctccccgcaacctccgcctcctaggttcaaatgattcttctgcctcagcctgacaagtagctgggactacagatacgcgccaccatgcccagcttatttttgtatttttaatagagacggggtttcrccatgttgttcaggctggtctcaatctgttgacctcgtgatccacccacctcggcttcccaaagtgctgggattacaggcgtgagccaccgcacccagcctaattatttatttgcttgcttattaactgtcttgttcacaagagtgaatgaaagcttcttgagggcagggactcaagaagggcaggaactttgttttgtttaatcaccaacttccaatataagcattcaataaacatctgttgaatgcatgaataaataaaggaggcattaataacaatagtgatgacaaaaataacagttaacatttactgagcacctaccatgcacgaagcacgctaatgagcaatctatagatagctcatttaatccatgcaacaactctatgtgctaagtactagtttactaaccttagaaataagaaaactgagatgacraattgttgtatcttgccctgtggtcacacaatttagtgtgtgggcaagataatcaaggtaatctcttcaaggtggcctaaaagttggcaaagaatgaagatggcagatggagaaaacagaaatagttattttacttaacttctctgcttccaacttttctattaccttyctcatctcattttactattataacttttctttttcatcaccccctcccccagttattcttaactactgactcttttctccttgccacttgatctgattcaaaataatttcatggggtatcttaatatttacatgtaatattttaatataaaacaattagtattcaataagatattacataaagacccacaattttattttatagtaagatggaatctgcaccagtaactcttgatcccccttcctttcttgcataatgactcgcataaggcagtcagcttacttgtggactgttttaaataaaaagaaaatgaagaaaaggaaaatcttcctcctctttcctttctatctcctaagaaggtggataagagtataaaatactacccaagcctatctttaagagcccttctttattgtgtctgaaaatttgctttggagtatgaaattttaattatgccttggtattgctcaatttcatactgttatgacacaatccctcctagttcttcccataacagcttatagctacaacccccctccagggaaaaagcaggtttgggctcctcactctttccagacaaacaaggcaactttcagagagctttctaagcagttgaatcagatagctactacaacacttctagtggagtcccaagaggaaattttcttgccaacttcagaaacagctatttgtcagcacaaaacagaattcattctaaactaagaggggcagagcggggggaatgcaacctagcagaaattccttttccttacagagaaacttttcctttaaacaacatatagagtaaattataactttttctttcttctttctctctctctctttcgagactttgtcacccaggctggagtaaagcgtgatctcggctctctgcaccctcgacctcctgggctcaagggatcctcccgcctcagccccggaagcagctgggactacaggcccatgccaccatgcctggataattttttgtattttttgtagagacagtgtttcaccatgttgcccaggctggcactttttctttcaaagtcaagcggaaactccaaataaaaagattccttctgatatgaacaaagtttgatgaaattaatcatgggaagaaaaattttagcctacaataaagatttaaaagattataaagaaatggccaggcacagtgactcacgcctgtaatcccagcactttgggaggccaaggttggtggatcacttgaggtcaggggtttaagaccagcctggccaacatgacaaaaccctgtctctaataaaaatacaaaaattagctgggcgtggtggcgtggtggcgtgggcctgtagtcacagctactcgggactctgaggcatgagaaccacctgaacccaggagacagaggtggcagtaagccaagattgcgaacactgcactccagcctggctgacagagtgaggctctgtctcaaaacaatataaaataaaataaaataaaaataaaagattatttttaaaaagcacattaataaaaataatcactaaaaatataagaaaaagggaaaagaaaacaaattacactttttaatatgccaatctcaaagtggcaagttcaaagtgtggatgcaggtcaaagcaactgaacataattcagacaaataacccactacagttttgtctgaataaccccaacatgaacttaaagtctacactcttagctgtgaggtactaactgaaatatgagtctagataactgtcacatatatcttcaaggtaagtatcaggtgaaagtgttagcttaagggggagaaatagaaggatgattttcaattgcctgaatttctttctttctttccgtttctctcctatgttaacctttccattatcttttttcaacaccattcgtaattcaagcaaaatcactgagtatggagacttaacaaaataatgtattcatagcaaaaagatattcctacaatctaaatcaacatatatgtaagaatcacaggctatttttaagtagatgggaacaaaactgttatttctttttttttttttttttttttttttttttgagatggagtttcactcttgttgcccaggctggagtgcagtggcatgatctaggctcactgaaacctccacctccttggttcaagcgattctcctgcctctgcctcatgactcctgcctccgcctcatgagtagctgcgattataggcgtcagccaccacgccctgctaatttttgtatttttaatagagacagggtttcaccatgttggctaggctagtctcaaactcctgacctcaggtgaaccgcctgacttggcctcccaaagtgctgggattacaggcgtgagccaccacccccagcctaattcatatttttataataaaattttaaatctgttaattacaggcgtgagccaccacacccggctaattcctaatttttgaaagtacatattattasataataaattcaacagcacctaaaacagaagcataaatgttctctttttgaacataaattaatttagggattagccattttcacagagcagatgagtagccactttacaaatggagggaataaactcatataaagttagaaaggaactgggaaaataacaaagctctcaaataactctaagaatgttttctttccaatccagatctctgatcacattttttaaaaagaaggaaaaaaataaaaacaaagagagagagaaaycatggagtcttttcttcccgtagctggcaggaagtagggtatatgatttctatgtagcctgactcagaatacttttcaaagtttggaaagttgggcctggtggctcatgcctataatcccagcactttggaaggccgaggcgggcggatcacctgaggtcaggagatcgagaccagcctgaccaacacgaagaaaccccatctctactaaaaatacaaaagttagccgggcaaggtggcacatgcctgtaatcccagctacttgggaagctgaggcaggagaatcacttgaacccgggaggcagaggttgcggtgagctgagattgcgccactgcactccagcctgggcaacataaacgaaactccgtctcaaaaaaaaaaaaaagtttggaaagttattaatctatagcaaagagttataaagcttcattattaaataagtttctaggttcaaaaagtgctgcatatcatttaagttaaaaatgtcatcatattgtgtatattagaaagcaaagatatttaaattaacttctttttatattatgggaagaaattagaacatggtaataaataagtaaaaaaaatatttttaagatttcactagccaatcatgagtaaaagttttaaattgtcttctttgattgtgatttggcagtatccataagaaaaacttaatgcatatatactctttaagcaatttcccttttagaaatcttgtcctatcaaaatacatggacaaatgcacaaaagtacacacatagtaatattccttgcagtattgttattgtattattactgacagagaaaaacctaaagagaagcaaaatgtacgctgacaaatatcataaatttattgatgaggaaactgaggctcacactggtcaggtcactaatacagagagaaaggcataccacaatatgatctgaataggctcctctcaaaagtaccttcactttattcctcaaagctgaggtcaagtaccttgaggaagccctccttgatgtcccacttccctctgtatgtgagaagaccctcctataagcttccatacaaaagtcaaacaatttagtatttataatgctgtactttaattaacaaagacagtgactatgttttatatctattcctccaagtgctaagcacagtgttagcgcattttttttttttaacttctttcttcattgaaaagctaagcaacaatgaatgcctcgggcacaaagaatgtggtctctacataccatttctcactcaaaggaaccaatgttctttgtgaaaacagttgattccaggtctgggtcaggacatatatgagataatcctgggattatctcaaaaaaaaaaggaagctagcaaagactgctaaggtaagatataggagccaatctggagactttcactggccaatgtatcaataaggagactaacgaactgaaatatcaaatattttttaaacccaagaattcataaaaaaataaaaagactaaaaacaattcattcatcaactttggaagactctaaggaaacagttcattagtttgaaaattgataggctgcgagtggtggctcacgcctgtaatcccagcactttgggaagccgaggcgggcagatcacctgaggtcaggagttcgagaccagcctggccaacatggtgaaacccccgtctctactaaaaatacaaaaattactggggtgtggtggcaggcacctgtaatcccagctacgtgggaggctgagacaggtgggaggcggaggttgcagtgagccgagatcgcaccattgcactccagcctcaaaaaaaacaactcctaactcaaaaaaaaaaaaaaagaagaagaaaattgagaaagggaaagaatgaagcatttatccttcctttactatttaaagtatacctcagtgtaacaaaaagtgagcagaggaaaagttctttatttcaaaatattttagcaattaaagaagaaattatatttttaaaaaaggatatcaacatctttcaacccttaatggatctaagcaatgaccaccaattgctactaacagacattatgttcctctgatggatatacacaatatcacttgtgaggcaattgcactaaaaaaaaaaaaaattaaaaaaaaaaaaacctcaaacctaaatatgatcaagcctctaaatccaaccactcatttgtaggaaacataggaaaagaagaacatgtcaaatgacaccacaggtatgtaatcagcaaaatcaagactgaggaaaactacaggataaataacttatttttttcagccaaaaaagtacaagaaaataagagaaagagaacagaggacagagaagggggagaagacagaagaaactttagaaacttaaaaaatttaagaccagcatactatgcagactttattttgatctcaacttgaactatttttaaaaagagaaaaaaaaataagataattggggaaatatagaaactacctaggggtagctctcctcttccaagtcatcccccacaataacacacataatatgatctctgccttgttccccactctcttcttcttccaaaggtctctggtttatttctaaatatttgcagactgtgggagagtcccttgaattcagagacatggagctccactaacctcactccatgccacttgagtcttcttcagctttcctccacaagtttcattacttcttctgagctgtgatagcctcagtttctgtcccaaatcatttgtgtctccttctacaaatgaagactatatatgaccccacctaatgccatgtgattttcagtgcctacctatagtcagtttatatttccctgctcaattcttaggtttggtcatatcacttgcctagaccagtgaaatgtgaccagaaacgtgacatatgtcagttctgagcaaaggctttaaatgcatgtttccactagttctgttgctttttcctttggttataataagaacaagatgtcccaaagaagggtgtttccttagtctgaatactggatgaaaagagaggtaagacagagccccagccaattataacatgtaacatatgaaagaaacaaacctttgttattgtacatgttatccgaacatgttagtgcagcataacctggcaaaaatacatgaggataaaaagagaatgagagaaatgttatattattcacagaagattttttccaaaagtagcacccaacttcttttcctttagaacttgattaatcttagtttacttaaaaaaaaaacacccaaaagaaatgaaaacatatggctacaaatatttgtacatatatgttcayagcagcattattcgtaacagccaaaaagtggaaacaacccaaatatccatcaactgatgatataaaatgtttatgtatacaatggactattattcagtaataaaatgaagtaccaataaatgctacaactttttgcaatgtgaaagaagccagtcacaaaagaccacatattatatgattccatttatatgaaatgtccagaacaggcaaatctatagagacagaaggatattagcgtttgcctcagccagatgggttgaaggaaatgggaagtgactgctaaaagacagtttctttcagggctgatgaagaatttcaaattgtggtaatggttgcacagctctgtgaacatgctaaaaaccatayaactgtgtactttaattgggtgaattacayggtatgtgaattatgcctcaataaagctattattttaaaagtctatgaatgaatggttttagaaagttaagaaaactgtaaaggaagtaacaagtcaattttctgctctaaagttgttcaagctttctttgcaaactgggagtaacgacctccctaaaaaaccctaagtacctgggaaagtggaggcgcaagtagcaaactttagagaaaacatcagaataaaagctcagataaattttgcttgaaaacggattccaaacataaccttcagatgaggtggaataaaaaaatcaaatccttcagaaaacaaagaaaagataatgcaaaaacctttgttaaatgtcaaagcaaccaatcactatgagttgtgcagtgaagttatacttcatggagagatgaagaagatacctatcaaagagtgatacggtctctgtaataaaaatatcacgagcatatactacagcaatgaaatcaagagtcagatactgacagtttttcctcaataagtaaataacatgactaaaaaatagcaagtcactgatctaatgaaaacaaagaatggagaccaaagggcagtaagtttgaggatgggagcaaatcatgtagtctgcataagaagatgaattatcaacatgctgtacagttgtaaaagtgaccattctctgcctttaatattctattctcatcagcaagaaacaaggggcttcagataagctttacatatttgaaaacaatcccttatctgattactattaaaatgttttatttttgcccctagtgaaaaaaagcttctactttcacattttccacttccaaaacatgtaacattttttaaccttcctgaagaatgttaaattatatttaattttgtctttccttaactaaacaatgtcatcactttaaatatcattactatatagcaaggccctcaggagttaatgaggtaaaagtgtggggccccgaccctacaccccctaccaaaaaacctggaaaatgtagtgccaaattatgaaacctgaataaaaacagactaaaaagagatatatcactcaagttttctaggactcctattttttttttattgtggtaagaccacttaatatgagatctaccttcttaacaaatgtttaagtatacagtacagtgttattgttaactaactataacacagtgttacacagatctctagaacttgtttatcttgcataactgaatctttacgtccattgagcaacaactctctgaaattccacctcccatgagcccctgggaactaccattctaccctctgctactatgactttgattattgtagattcttcttatcactaaaatcatacagtatttgaccttgtaattagcttatttcactgacacagtgtcctcaaagttcatccatgttgtcatacatgacagtatttccttctttttctaagtctaaataatattccattgtatgtatataccacatttcctttattcatcaatgggacatctaggttgattccacatcttggttattctgaatagtgctgcaatgaacacaggagtgctaatgtctcttcaagatgctgatttcaattcttttggataaatactcagaagcaggattgctggatcatatggtagttctctttttaattctctgaggaaccttcatactattttccatagcagctgcaccattttgcattcccaacaccagtaggcagacaagggttccgatttctccacagtctcacacttgttatattttcttttctgataatagctgttagtctggctttgcctttggtgacctgcctttagtggatgcactaaaaagtagacaacaaaacttctaaacttgtgtaaaatgtataggcaagactgactagagaccaacatactaatgtagatcatggccttcgtgtcaagtgaaaaaaatttacattctagtccccatagcaaagatataatgaaaaacaacagtttagagaatactgaagggtatcctttcagccatgtctgaaaggctatacacccaaatactaagaaaaaaagaaaaatcaaacaattaaaaaacaaattcagaattgaatctcattacctcaagccctgttcattaaggatttataaattcaaatgtctgaactttattttatgcaaatatttaaaaagcaaatttataaacatacacaatatcaaagaagacgttaaaatatttcagaagaaaatcattattgaataaatccttttgttttaggtgaagctatgtactttaaaatgctttacatgatatttataaatcatttttacctattataatgctactgcctcaaaaaactctactaacacttagtagtctactttgtacctaaacatattcatattaggtagatcagccttgaattagtcatattttaaggtcttactaggggtaaatgtaaataacaaactgagaggcctggcatgtaattcatgtgttatttagaacagtccataataaatacatgtttaactgtaaggccaggcatggtcgctcatgcctataatcccagcactgtgggaggccgaggcgggagaactgcttgagcccagaagttcgagaccagcttgggtaacatggtgataccccatctctacaaaaaaatacaaaaattggccaggtgtggttgtgcacacttgtagtcccagccacttgggaggctgagatgggaggattgcttgagcccaggaagcagaggttgcaatgagccaataccatgccaccttattccagcctgggyaacagggtgagaccctgtctccaaaggaaaaaaaaaaaaaaaagaactgtggcagggcatggtggctcacgcctgtaatcctagcactttgggaggccaaggtgggtggatcacttgaggtcaggagttcgagaccagcctgtccaacatggcaaaaccctgtctctactaaaaatacaaaaatcagccaagtcatggcacacgcctgtaatcccagctacttgagaggcagaggcaggagaatcgcttggacctgggaggcagaggttgcagtgagctgagatcgggccactgagcctgggcaacagagcaagactgtctcgatggatggatggatggatggaaggatggatggatggatggatggatggatggatggatggatggatggatgcacggatgcatggatgcacagatggatgcatggatgcacagatggatggatggatggatggatagatagataaatgtatgtttaactatagaaggtagcttggttaaaaaacaaaaacaacataaaacagttaatacatttttcaaataatatgtttttcctctgtatatcactttaaaattataacacgaactactacattcatataagatagacttcataattcccattttatggatgaggacacgaagacataaaaactgagtaaagtgcccaagattcccagtccttaagaggtatgaccacagcttgaacccaggcctctggctcttgaacctgccagacgcggtagctgaatcaggacacatgaatgtccatattatcagctcattttagtgccattttattcaatgctatgaatagagtttacaatactttagttatatgaattttaaaggcatggaatttcacagtcatgtaaattttacagtagctacaaaggtgttgaagaagacaaagtgattcattgaaaaagactgtgaaaaagatactgatgttaatcgtgcttttatttcacagttaaaaacttcattgctaattgtgtcacatttttcagccctttccccyatacttttcaaaggtactaactctattattctgtccacatttttaaaaattgttttagtaagaataataccggctagacacggtggctcacgcctgtaatcccagcactttgggaggccgaggagggtgattcacgaggtcaggagatcgagaccatcctggctaacacrgtgaaaccccrtctctactaaaaatacaaaaattagccaggcatggtggcgggtgcctatagtcccagctactagggaggctgaggcaggagaatggtgtgaacccaggaggcggtgcttgcagtgagccaaggtcgcgccactgcactccagcctggacaacagagtgagtctccatctcaaaaaaaaagaacaaaacaaaacaaaaaaagaatactactactatttctgccacatgattgctttattaattctccagcaaaatcatcacctatgaacaaactgataatggtcctaagaaagaaaaagaaggcgagaagaaaggaggcagggacagggtaaagacttcattttggtatttaaaatacggccaaatttatcatttttctaaaggtagtaaataagactgataatttataagggaaatattttccttcctgtgttgaaataatatgccaaatggctaccaaggaaatatacttatttatgtacattcatttctatattgattcctattgtgaaacatgttgcaagaaaatggaatgcatgagagacaattaaggtcagaatcagttttacaaattttgccagtttgcagatttcacttctatctcctttctcccaagtaaggttacccctaaaacatcaccagcagctgcacatcagtaacccacttaccactgaagttaaagcttgtttgtgctcactgaaactagaaaagctgttttttgtataaaatgttagctttaaaaacctgccggcggccaggcaccgtggctcatgcctgtaatcccagcactttgggaggccgaggcaggtggatcaagaggtcaggagttcaagaccagcctgaccaacatagtgaaacccccgtctctaataaaaatacaaaaattagccgggcatggtggcgggcatctacagtcccagctactcgggaggctgaggcaggagcatggtgtgaacccgcgaggcggagcttgmagtgagccaagttgcgccactgcactccagcctgggtgacagagcgagactttgtctcaaaaaaaaaaaaaaaaaaaaaacctgccagctgccagctcttcaactctccttccacccacaactgccaatataatatattctttgttcaactctgtatttcttggagctaaaagaaagggaatcaattatttttattttatttttttgatacagggtctcactctaacttggaatcaattcttacggataaaaagatcaaactttgaatccaaaatctacaagactattccgagaaacatgagctgcacagctgtagataacagcaataaaaacagaataatgggtracaattactgagcacatactatgtatcacccaatatgccaagtgcttcaaatgatcttcaaaataactcctggaagtagatactattattatacccattttgcagatggggaaactgagtcttaaagctaaatgatccatgtaaaaaagcttagcccttaagtgacacacaaagatatatttraagacaaagggcctgagaaatatgcttaggcctttaatgaccaagttccaaaagctctcaacytaaaggccacaggccatttttaatacttccaaaatctaaatgaaacaatcatttaaatgtgaaattccctaactaaaattgtaggttttttaggggtttttgggggggcttttagttcaacttaggtcaattcagtatagatactaatatgttgccctaattagaatcttttgctaaaaactgggagacaaattattaataattaagcgttctgagcaaaaacattttcgtagtgtgaaattaatagtggaaaaaacaatttaagagatcctttctatgaaaagtttgggagacaatggactaaaagacctgcatgatctatgatggatctaacatgtgagtttctgctaaaggtttctataccagtaatgtgcctgccccacccttactcctgtcccttactccctccctctgaataccacactcacaaccgaccagctgctttttattcctacgggcaagcctaataaactgagattggctctcaccagcacgagctgaaaaagctaaagttgactcaacattattctttgctgtgaatccagagcaatttttcttcccatttatctggtttcttcccattactttcagattctcctggatacttgttgattaatttgcctttgacaactttcgtagttctgccccttcaactcctaaaatctcctggtgactgcttagagtatgatcattgagtctccatcctagcctcctctgggatgtggatcattttgatagattaagcagtatctccaaccaccagggtccacatgcttgtgtttcatgggcagttttccctattctgcttccttgctcattccacttgagctgctacaagccacactctgccatgacacccttaaactgatcattctgttatggctgattttggttgaggtatactacataaaatgttatgggtgccctatggacaaaaagtataataaacctaatgtataaagtcattacttgtttctgtacttttctggctatagataaccacccaaattcctagaggatgttatataggagatatataggtactgagactactacaataaaacagggcagacaacattcctgctctaacagagctcacattctaattggaggaggaaacagaaaacaacaacagcagccagtggttaagtacaatgcagagaactgcaacaggatgacccaggagtgattaggyggttaggtgagattgggtaataaatgaaggagtcaccacggaatctgaatagcattaagaagccaatgcaggtgagacagttgctcattctgaagcagggaacagcagaatcaacgaccctaaggaaaaaggaggctgayatgtttacagaaacagaagaaaggccaataggamtgaagcttagtgggccaggaggataatgataataagatgaatttggaaaggcaagcagggaccagctcacacaaggctttgtgggcaaacatgaaatttaatccaagtgcaaggaaagccactggagggagttttaagaggttctctcatttgtgcactaaaaaggccactctgcttgctatgcagattgaaacaggtcaataatagaaatagggggccagacacagaggtggctcacatctataatcccagcacacttgaggccaggagttcaacaccaccccaggcaacaaaacaagaccctgtctctacaaaaaataaaaataaaatgttagccgagcttggtggcacaagcctgcagtcccagctactcgggaggctgagacaggatcaactgagcccaggagtttgaggtgagctatgatcataccactgtactccagcatgagtgacacagcaaggtcttatctccatttaaaaaagcttcctcagctgggcacagtggctcacgcctataaccccagcactttgggaggcctaggcaggcggatcacgaggtcaggagatcgagaccatcctggctaacacggtgaaaccccgtctctattaaaaatattttttaaaaaattagctgggaatggtggcgggcgcctgtagtcccagctactaaggaggctgaggcaggagaatggcatgaaccagggaggcggagcttgaagtgagccgagatcgcgccactgcactccagcctgggtgacagtaggagagtccgtctcaaaaaaaaaaaaaaaaaagcttcctcgagtgttttttagcaaggcatacatgttcctccttagaaccagacataaaaagaagggaggatgctaagtaacacaaaggaatttcacggtaagatgattgaaaattcaagattttagagatggacaagtattttcagggtttcagctgaatgggattggaagcttcatagcagagcagaagttcacaactttagagtctgttataatggctctgattatttaaccatatagctaattatatatttaattatggtgggcttttaaaaaaattactgggtcctacccagagattctgatttagttggtctggggtaggaactgagaatgtttgttcaagaagcatcacagaagatttgagcataggctgtacaaacaatttcaagataaatagtgtagagtcacttttgagaatgtaaaacaaacagggatgcaaatagagcttttaaacacatactagatagccctcctccccccacagtacccaccccccatcaacacacacataacctgaaacaggcctgagataaagtcttacaggtgggattcagaatcgaagcctgacatccatgagaaggcaaacgtgtacaatttctccccctgccaaaatttagtctttcttctctccaataagaacttactggtatccacacattctcaacaatacagcagtatccttctatttaatagctgctaatttggcaggtaagaaaatttttatctggatttctttaataatcagtgagaccaaaaayactttcttagtgtgacatgccaaaatttattaacatgtgagtgtactcagtcttcctcctctactcattctgcccttcctaaaaaggaagatttgctggaactaagttgatcaatataataaaggaataaagaaggaaatgttgatgagaagaaaccttgttggttgggatttaggaagaaagctttagagtttgaccagtgagaagttcctgggcagcaggaagcaaggaaaagagaaaaggaacttgtaaaaaatattaatgtggttatgaattaagttccctttaatacactctttgaagacaaatagaattcctttttaattccttctggttttaaactatgcttcttgaacaagccccagttctgaacttgcaccatgtacttttctgaattagctgggattatatccaggccattttcctggccacctggaaaagcctagctgcttttgtaaactttctgcagatatcctttgcatattttttcttctgagacttattttttaataaaatttgtttcttaagactgttttagggtcacagccaaactgagtggaaagtacagagttcccatttaccgcctgtccctacacagacacaacctcctccaatatcaacatcccacagaagaatggtacatttgttaccatcaatgaacctacagtgacccagtattatcaaccaaagtccatagttaacattagggttcactcttgatgttgtgcattctaccatctttgacatatgtataatgacatgtatgcactattatagtactgtacataatagtttcattgccctaaaaaccctgttctctgattattcacccctctctcccctgtaacccataataatggctaatctttttacagtctccatggtttttgccttttctagatgtcatgcagtcataatcatacactgtgcagccttttcaggttggcttcacttactaatatgaatttcaggttcctccatgtctcttcaaggcctgatagctcatttttttctagtgctaatatttcattgtcaaaatgtaccttaactcatttatgcatttacctactaaaaggcatcttggttatttccaagttttggtgattatgaatacagctgctataaacatttgcgtgcaggtttttgcgtgaacatatttcaattcatttgggaaaatacggagaagcatgattgctgggttaaatggttaagagtatgtttagttttgttagaaactgccaaaccgtctttaaaagtggctgtgccagccgggtacgatggctcatgcctgtaatcccagcactttgggaggctgaggcggggggatcaccggaagtcaggagatcgagaccagcctggccaacatggtgaaagcctgtctctactaaaaatacaaaaaattagccaggagtggtggcagatgcctggaatcctagctactcgggagactgaggcaggagaatcacttgaacccggaaggtggaggttgtagtgagctgagattgcaccactgcactcctgcctgggcaacagagtaagactctgtctcaaaaaaaaaaaaaaaaaaacagtggctgtgccactttgcattcccaccagcaatggatgagttcctattgtttcatatgctagtcagcattttgtgtcatcggtgttctgaattttgggcattctaataggtacatggtggtatctcacattttaatttgcattttcctgacaacatatgatgtggtacatcttttcacgtgtttacctgccatctacaaatcttctttggtgaggcgtctgttaaggtctttagctcattttttaatcaggttgtttatattcttactgttgacgttgaagaattatttgtatattttaagtagtcgtcgtttatcaaatatatcttttgcaaatattttcctcccagcctgtggcttgtcctttaattctcttcacagtgtcttttgcagagaaaaaaaaaattaactttaatgaaattccagcttatcaagtcttatcaatgactttctagatactacaccaaagacacaatcttggattgtaatctgcctggtgtaaggtctgtgtcttgattgatttcttttgcatgtgaatgtcaggttattccaacattattttttgaaaatattatatcttttttccattgtattgcctttattcctttgccaacgatcatttgactatatttacaagggtctgtgtctgggctctattgtgttccactgatctattggtctattctttcactagtgccatactgtcttgataactgcagtcttacagtaagtcttgaacttgggcagtgtcaattctccaactttgttcttttcccttaatattgtgttgactgttctggatcttctgcctctccatataaactttaggatcagtttcttgatagccacaaagtaacttagtgggattttgactgtgattgtattgaatctatagatcaagttgggaagaactgacattctgatgatgctgtgtcttcctatccatgaacatagaatacttctatatttatttagttcttctgttttctttcatcagttttgtaggtttctttacatagatcttgtatatattttgttagatttatacctataaatttcattctgggggttgctaatgtaaatggtattgtgtttttaatttcaaattccacttgttcactgctggcaataagagaaagtgatagtggtttacaagttccagaagtaattttcttgattcttttgaattttcttcataatcttgtcatctgtgaacaatgacagtttacttcttccttttcaatctatataccttttatttccattttttgtcttactgcatcagctagaacagaatgatgctgaaaagcaatgattagaggggacattcttgccttgtgcttaatctttgcaggaaaggttccagtttcttaacatcaactatgatattagctgtagggttttttagatgttctttatcaggtaagaaagttcctctctcttcctaatttactgaaagtcttcataatgaattagtgttggattttatcaaatgctttttctgaatctattgacacaaccctgtgattttccttctttagcctgttaatgtgctagattacactaactgattatccaatattaagccagccttgcatacctgggataaatcccacttggttgtggtatataatttttcatacatttttggatcaaatttgctaattttgtggaggatttttgcattatgtttgtaagagatgttagtatgtacttggcttttcttgcaatatgtgttttttgaattaggataatggcagaatgaattaagatgtatttcccctacttctgtcttctggaaaagattgtgaataactggcttaagtttttccttaaatatttggtagactcactagtgaacccatctggacctggtactttctgtttgggaagattattaattgtagattcagcttctttgctagatacaggcctattcagattgtctatttcttcttgtgtgacttttggcagattgtacctttcaaataactggtccatttcatctaggttatgaaattcataagcacagggtcagtgataatattcctttatyatctttttaatgtcaatgggatctgtaaagatgctgctctttcatttttgatattagtaatttgtatcctttctttttagctggtctagctaaaagattacctattttactaatcttattaaagaaccagcttttgattttattgattttctctaggtgtttactgattttcatttcactgattcctgctctaacttttattatatttcttttcttctacttactttggatttgatgtgttctttttctgtttcctaatgtggaactttagattactgattttagatctttttttttttttgagatggagtctcactctgtcgcccaggctagagtgcagtggcgtgatctcggctcactgcaagctccgcctcctaggttcacaaaattctcctgcctcggcacccccaagtagctgggactacaggcacccaccaccacgcccggataattttttgtatttttagtagagagagggtttcaccatgttagccaggatggtctcaatctcctgacctcgtgatccacccccctcggcctcccaaagtgctgggactacaggcatgagccaccgcgctcggccaattttggatctttcatcttttctaataaatgcattcaatccaataaattcccctctaagctctggtttcactacatctcacaaattttgataaactgtattttcattttgatttatttcaaaatatttttaagtgtttttgagattccttctttgaactatgtattatttagaagttgtttaatcttccacatattttgggattttctagctatctttcagttactggtttctatttaattttattgtgctttgagaacagatatggcatgatctctagtttgttaaggtttgttttatggcctagaatgaagtttatcttggtgaatgttccrtgtaagcttgagaagaatgtgtaatctgctgttatttgaagtagtctatagatgtcaattatacccagttgattgatactgctatcaacttcaactatgtctttattgattttttgtctactggagttgtcaatttctgatacaggagtgttaaagtgtccaattataatagtacattcatatatttctcattgtagttctatcagtttttgcctcacatattctgatgctttgttgttaggcatatagatattaagaattgttgtatcttcttcgattacttaccctttgtcattacgtcctatttatccctgataacgtacagtgctctgaagtctactattaatatagctaccctcagtttattttggttaatgttagcatgatatatctttctccattcctttacttttaatctttgtgtctttaaacttaaagtgggtttctagttgataacatatagttgggtcttgctttttaattcactctactaatctctgtcttttaattggtatatttaaccacagtgattattgatatagtctggactagtatctatcatatttattacaggtttctgtgtgtggcccctgttctttgttcctatttccgtcttttacactttttctgccttttgtggttttaactgagcacattatatgatttcattttctcccttttcttggcatattgattatacagttgacccttaaacaacatgggtttgaactgcatgggtcctcttatatgcagatgtctttttactaaaagcagatagaaaatacagtatttggctaggcgtggtggctcacgtctgtaatcccagcactttgggaggccaaggctggtggatcacgaggtcaggagtttgagaccagccaggccaacatgctgaaatcccgtctctactaaaaatacaaaaattagccgggcgcagtggcaggcgcctgtaatcccagtgactccggaggctgaggcaggagaattgagttgcttgaaccaaggaggcagaagatgcagtgagtgctgagatcgcaccactgcactccagcctgggtgacagagcaagactccatctcaaaaaaaaaaawatatatacagtatttgtgggatgtgaaaactacatatatgtagcaccaacgttttgtatacacaagttcaacagggccatctgcatgacttgagtaagtgaggattttggtatactcaaggagccctggaaccaattgcccatgtatactgaggaataactgttctcatctttcccttccttctccttccccttcttctttttcaatttttacttctctcagcggtttccctggagtttgcaataaacacttacaactcattcaagtccactctcaaacaatgctataccacttcataagcagtccaagtaccttataataaccaaatattcctaaattcactctttcatctgttgcatcattgctgtcattcatttcacttatacctaagtaccatgtatagatacacacacatatacaaacccacagaagcataatcgaatacatggtcactattattattttaacaaactgttatctgtcagatcaattatgaacaaggaatataaaagtttttaagattcaagcttctgacctatattattttccttctctctgaactttttttttttacatatttcttacaaatcagatttgcaataaattccctcaatttttgctttaagtcttttatacatatttcttacaaatcggatttgcaacaaattccctcaattttcactttgagtaagtctttattcttcctttactttggaagggtaacacaacatggcaggatataaaattctaggtggtgggcttctttctctcaacactaaatatttcactattctcttcttgcttgcatgatttctgagaagttggatgtaatttttatcttagtttctctataggtaaggtatttttcctccctggcctctttcaagatggtttctttacctttgattttctgaagtttgaatatggtgtggctaagtgtagatttttggcacttaccatctttggtgctctctgagcttcctggatctgtagtttgatatctgacactcatttgggggaattctcagttattacttaaaatattgcttctgttcctttctttttttctgctgctttggtatttccttatgtatattttgcacctttggcagctgtctcacagttcttgcacattctgttctgagggagtttttctctgtcatttttcttcttgctttccagttttggaagctttttgtaatatcctcaagctcagagatttttaaaagtccagtatactaatgagcctatcaatgaaattcttcatttgttacaatattttttactattttttattctttcttaaaatttccatctctctgcttacattatccatctgttcttgcatattgtctactttttcctttaaagccttttgcatgttaatcctatattttttttaattcatagcctagaaataaagccacatacctacagccatctaatctttggcaaagtcaacaaaaataagcaatggggaaaggattccctattcaataaatggtgctgggatagctgccaagccatttgcaggagaatgaaactggatgcctacctttaccatatacaaaaattaactcaagatggatttaagacttcaatgtaagacctcaaactataagaatcctagaagaaaacctaggaaacaccactctgggcactggcaccttgggaaagactctatgactaagtcctcaaaagcaactgcaacaaaaacaaaaattgacaattgagatctaattaaactaaagagcttttgtatagcagaagaaactatcaagttagaaaacagacaacctacagaatgggagaaagtattcacaaaccatgtatctgacaaaggtttcatatccagaattgataatgaacttaaacaactgaagcaaaaaatagtcccatttaggccgggcacggtggctcatgcctgtaatcccagcactttgggaggccgagacaggcggatcatgaggtcaggagatcgagaccatcctggctaacacagggaaaccccgtctctactaaaaatacaaaaaaattagccgggcgtgttggcgggagcctgtagtcccagcttctccggaggctgaggcaggagaatggcgtgaacccgggaggtggagcgtgcagtgagccgagatcgcgccactgcactccagcctgggtggcagggcaagactctagctcaaaagataaaataaaataaaataaaataaaataaccccatttaaaaatgggcaaaaacacatgaacagacacttctcaaaagaagacatacaagcagccaacaaacatgraaaaagaggctcaacatcactaattatcagagaaatgcaaatcaaaatcccaatgagttatcatctcacatcagtcagagtggctattactaaaaagtcaaaaaacaacagatgttggcaaggctacagagaaaaggaaacctttatacattattgatgggaatgtaaattacttcagccactgtggaaagcagtctggacatttctgaaagaactttaaaagaactaccactcgacccagcaatcccattaccaggtatacaaccaaaagaaaaaccattgtaccaaaaagacacatgcactcacatattgatcacagcactattcacaatagcaaacacatggaattaacctaggtgcccatcaacaggattggataaagaaaatgtagtacacacacacaccatggaatactatgcagacataacaaagaatgaaatcatgtccttttgcagcaacatggatggagttggaggtsattatcctaagcaaattaaggtaggaacagaaaaccaaatactgcatgccctaacttataagtgggagctaaacactgggtactcactgacataatgatggcaacaatagacactggagactactagaggagggagggagggggtggaagggatgaaaaactgtgggatactaaggtcagtacctgggtgacgggaccattcagaccccaaacctcagcatcatgcaacatacctaggtaacagaccacacacatgtaccccagaatctaaaataaaagcttaaaaaaaaagtaaaaatacgtaaaaaaatttctggtctgatatttccaacattcctgccatatttagctatggttctgatgtttggtttggtctcctcaaactacagtttttgccttttagtatgcctgtaattttttgttaaaggtggacataataatactaagtatttttttttttaaagcctacagtaaacaggtgttttgtaatgcagtactagggtgatgggggaggagaagcattctataggcctaggattaggtctcagtcctctggtgagcccgtgcctctagactgtraccttccaccagcatttctcaggttttttcctcccttcaaatggaacagggtggctggagagggctgaagttatttcccttcccacarctggaagtctagagggaggtggagttaggaatttccttttctccatgtggagggctagagttgactggagctgcatttttcccattccccagttaggtttggttctaagagaaataatttctcctgagggcaggccttgttaagaacagaataccttggtgtatttcaaaatgtttcacttctcccttctccagctgacagcgtaagaggatttttctcaaatatttactgtgaggacctggtagagctccaggaagtaaatctcacaaaactacgggggcttccttaggactggctctccctggagcttttaggtctcagacttgtccacactgagcctccagcaactcctcaattacagctcagattttcctacccgggtactggttccctcaggggtttctgatcctcggtttctgcttcagtagttgtgattctctgtatccagctgtctgtctctccagttttggaggatgtggtttgccctgtgacttcacttatctgaggaatctaagaagtgttgtctattcttcattttgttcagttatttatttgttgtcaggaccaagtggcaattactgagctccttacatgctacactggaaattggaagtcttcagagattacttcttaatagtttttaagagtgctttgtatatgaagatatatacccaaaaatcagacaaaaaaccctctgtcaggttttacaaattttttcctagtttgtcatctgtcttttaatcttgtttatattggttttggaggcacaggagtttcaattcttgtatactcaaatctatgattatggtttctgattttacgacagaaaggtcctcctgctatcaagaatataatacctttatctatttttttgtacttttatggtactttcagtttttccatttcctacctatcagaattttttttcttcagtttttattaaatggctggctggttgtcacatcgtttactgaataattccatcgtgttccaaaaaccataaaatgctgtctttatcttagactaaatatctattaataattgggtatgtttctggactttgagggaaaaaaaaaaaaaaacctgggaacagagactgcctgtgaaatgaactgagtagctggaaacagggaagaaaaaaagactaatttttcactgttcccttttaaatttattccacgtgctttgaattatcactcaagacatcaacagaaatctgttgaaattctgcttactagacatgatgtcattatcaaatatttcagatttggcaaattataccacaaccccatatgcacctgaatacctgaaatcataagtctatcttgagcttaaaaccctgatttaatctattctattttaaataaatagtaaaagtacctcaattatcttaaactagatgtttctctgccacttaacatggtcaaacacaaaaccatattttaccatgaaggaaaaacaaaagcttctgtctaaatccttaattgttatagttaaggctactactggaaatgtgtaagaatctcagataatgtcaatttcttactgtgtgtgcttcccagatccagccatcacagatgtattttactttttgtgttgtcagctagtcaccatctttttctaccaatacctatagtgaatacttaatcagaacctaatctttttattctattgctatctgatcattgtattttcagtatcatttcattatcattcaatctctgaagccaaactgaacctctgttgtaaccataattccataagcgactgcctgagagaaaagaggtatccatctagcagcagacagaaaaagaacagctttcttctgttatgtcagtcttcttaagatcctctctctccccctattttctaaacaactatgaaagacagactcatttagtaattttagcctttctccaaataaatatattttttagccactgaaaatgctctcttaatagaaatgcgaaggtgacctagtattcagtctcattagcattctcattaataattacagggatcagacattatctttgtaccctctaattctgctctcactacctgctctcctaggtactttcttagtctctgttgctctrctaataaatgaactcttttaacatgcagaagatgcacattccacatatctcctaggraaactaatatttaaaagagaaaccaatgcttttaacagtctaattacccttagattttaaagcctcttatttttgatcttcataacagtatcatccccatattcaacaggaaacatacagtgtgatttaccaaacatcctattaccggtagtagaactaggtctcctgtgagaatgtcctttgccctaaatacattgccttcctcagagaagaaaagtgtctttgcagaacacaatgaaggatgcgctttatatagcacaatgtatgaatattagtgatatatgtataaaatcaaaattaagttcagtacttaaagaaatcatatcttctatataagaaatgatttcaagcaytccaagagaccacactataaaagcttctaggcagaaggtactatatttccttttctcccagtgcccctagcaccttatcttatacagtgaagtacttatctaatggycactttttttttttttttttttttttgagacagagtctcactctgtcacccaagctggagtgcagtggtgcaatctcagctcagtgcaacctccgcctcccaggttcaggtgattctcctgcctcagcctgccaagtagctgggattacaggtgtgcaccatcatgcccagctaatttttgtatttttagtagagatgaggtcttgccacattggccaggatggcctcgaactcttggcctcaagtgatctgcccttgtcggcctcccaaagtgctgggattacaggcatgagccaccgcacccagcataatggccacttatttcttagcaaatctcaactatctgctaataaatttggcagatttctgtgtatctgagacacagtccaatacacagaaattataaacaccctccactaaaatctgggcacttttcatgagagactcttctcagatgaagttactcttactttagatcaacagttctcaaccacatcagattcaatgtgccccttgcataaaatattttccaacttctgctttaccaccctgaaacaaaataacaatattcctacaatttcaaacaaatccatataccctaaataagagtggaaaagagacatgaaaatgatttataataacatatatttcgacgtggggcaaaactacactagaagacttaaagaagtaactagtagctgaatatatctatgaatgcagagctgtttgtgatacaattttccaaaactgtaaacaattcttggtcaagttgtgaacaaaacaatcttccttcaattcacataaccgttgcatgtggaaacagactcagttaaaattcagtctcagttaaaatcatgatgcaagatggaggttccaggctttgataattacaaatactacatgaaagtcaggcagatattcttaaatcatgcaagacatggggacactttgttcaggactgtcccacacctctctagccttcactcaacaaatgcaagttgttagctccaatcattacaacaatctaaaaaatgccttccagtttccccttggagggcaacaccaagctggacccaccgccttaaacacagttccgctatctatcccagtataatgtaaacaagcttgggaagcatgaattagatctccagttctgttaccaatgacctatgtgatcacccgccagttgagttaacttctctaaacctcactttccatggtaccaaaagggaataaacgctatmtggctttttaagttgtcagaatgactcaatgacacgtgtatagcacatagtaggtggtttccaacccatggcctattgagatgtgaaaaaaggcactgttccaggtaaayagaaagaaagcagcaaaaagtaatctaaatgtggaagaggcagaagatataataagcatacaaaatgaaacttaacgcacagcagtctagggacatttcagagagcagccagccatcctacctaggttgccttcagcaacccctgaaggcattaatgtactaggattagctgaaataattaatattcacaatgatgacctccaaagtaaaaaggcaagaaagacatttttaagagacttccaatgtacgtggctgaaattttttaaatctgatgcctaaagagtgactgtatttcacaaacattattcaaatttttattggacgtttaccctatctgaggctagatagttggaaaacacaaagaaatctaatacaccatgtctgttctcaaacattttaccattcagtacattagacatggtagaggcagaatgacacagataagaaatagaaattcaagtaataaattatgagagcacagacaaaattaggaataattgtccctgaggaaaaccaaggatgtcttcatggcacaggccactgaaaaatgagagttctgataggtacagaatggggagcaaagtgttaagggaaaaacgaaatctgggcaaaagcactgagcatgaaaatacaggttggctgaaagaagagaggtagggaacgggtacattaggagttgggggtgaaagtagtaaaagtaaaggctgtaaagctatttcaggacctttcatgaagggatctgaatgatattcaaattcatttgagttttattgaacaagagagttcgccaaaaaactggtgcttatgcagcacacctgatcctcaaataatgctgaataatggccaaaaataaaagattcagagttaaatgcaaattattactcaaattcctgaaataaaaagtcttgacatgaattaataagcgaaaagaacctaacccaagagtagaaagtagcttctgagcttgtttcttaaataatgaaatattacccaatttattgactgagaactgaaaataatttaggataatctgttgtgtcctttgattgtcttccatgcaagtcagagtatttcctaaacatattatttagcagtgcctcatatcacccttgaaaggcaagagacagactacagtattattaccccctttttatcacagggaaactgaggaacaagaagacaaaattacagtatggtcacaaaagccatcatattttctaggactttaattaaaggctccaagcctacatttcatcttttattctycgcaccatctgaatactagaattatcttttactatcgtcttaactggaaaaaataaaaatatctaaactttaacatcattttctcaatttggtactgtcacaaaaaaaaaaaaaaaacagttttaaaagtctgcccttgaaatgatatttgcaagaacagcaaggtgtaagcagtaacccaacctccaaaaaatacagttgtaaatcttacagctgtaatatagttgtaaatcttaagacaggtcaggaatcctagacccagcctttactttgaacatctggcaggcctcagggaaataatggagattcgtgtctgtaaacagtctttgcagatgctctgatgaaaaggtgccctaagaggcccagaacagtggtatcactgcacccactactgcaaacatgaaatcctcctctgtccctccctgcattgcaccacgagactcgtggcacacacggaggcctgtgcaagaacctctcgacgattcctttaaaatgtggtaatataaggacgcctttggtgctgggcctccgtaaacactgaggataccggatgtggccaggcacacctcaaagtcttggctctccaaaaccagggcctggtcgagagttttattggacaccgagttcctgcgaatatctcacttttcacacagrcactgccaatccctaccctccagtacccttcctcagcctcctgccccactctcgccgcgaggtgggcgtcccaaagagctaaggagggtaaggttggttagagcgcaggggccaaggccgcggcagcgaggccgtccagcgcgggctaggatcccgccagcccagccctggagcccggccgcctggccccagccctggcccgggccaacgcgccgccgccaccgcctatcagcggagcgcaggggcggggctgtccggactaggctgccgggccggcgggcgggggcgggcggggacgggcgggggaccgaccgccgcgcagcccaggccgccgcgcgcacacaccgggcccggctcctgagggcgccagcgcggccccggggagcgcgaggagccggcgaagcgcgcggcctgccgttggcggcctggtccgcagcgccctgcgcccacccgccccggacgtggggcccaagcccccgtgaagatggtgtcctggatgatctccagagccgtggtgtaagtgcctctcactgcgccctgcagccggcgcgaggcccaggggagctgtgggaaggggaaggagccgagaggaaagggaaggcctgggcctgggcggggacggggtagcccggcctcgggcctgccgagggtctgggggagccctcggcttcctcaccttggtccacgtcgctgcggagctccctgcgacggccgagggcctagctgcggcgactgcggctgcgacggcggcggcggctgtggcgctgctcggctgcgtgcggtgcggcgcggcgcccctgctccggcggcgctgggtgggcaggcgctcagggcaggcggcgcgcgctccccgctcctgctccccgcgcagcgcggcaccgccctgcgggcccgggagcggcgcgcctcgcagctgctccctgcgcaggctccgcagacgccgagcgcgggaggctccgcgatcctcccgaggatgcgacggcagtgccgagcctttgtatcccgcggctgatgcgttgcggtgtctctcttggcggctgattgccattcggtcacgtgtggtaggaggagagatttgtctaaaaaccggagaccgctcccagcccaggatccctgggaagggtcctagttttcccaagatttgcagcttaccgagaaaggtgacaccggctgctcgcccagatccccgaattcggccctgtctcggcggaaatatttgctaagtgattgaaaggctgcaggtgcctgttgcctttgttcaaattatgggttcatttcattgttctcctaccaacaagtgctacaggtctgtaagaaaaagaaattccttgagttggtggtgttaatcgtgtaaatgtatttgaatacagtttaaactgattttctctcatctccattttacccctctccccgattaaaaaaaaagtcaccaagtaaacaatgacgtagttacagctagggcctatgaattcattattcacctctgtagtagtgttatctcagaaggtttcataaaggtatatgaaaaaatgtttatgtgagggggcaggcttctctgataagctttagaatttaggaaaaataacattaccagactttttgttaaaaggagctagattttctgagtttggggtttattttgtttggaagtgaattactagccctatttaatcagatttgcagcacagcattcaaaatttttcatttgattaaatcgcaaagtttctagttttaaagcctcagagcttcctgtgttcccctgtacgaaactaaaaatcaagatataaacaaaaggataccacagatgccttcagattgtttttcagccttttcctggcctctcttttgagtctgtcatttatctaattcaggcatacctttcttgacctagtagatgtctatcaactgttgtgtccacacctagaaaatcaagtgccctattaagaagctgtactttacaaaaaaaaaaaaaaagcctctggatttctttgaccagttcttcagctgacagaaaattgtgaagcacttttagacttttgtttttcataattgccaatgaatatgaatgtctgttctaggtgctacctataacacaaaggtcagtaacacgtagttgatcatgggaattgacagtttgggtgcacagatatctgcagtacaggtccaaatgtcaactcttgtaaaagttacacccactctaatacccagtgttggacaaggaagggatatctggttggagaatcagaaaaggcaagggagattacgtttcagatgggccttaaagaataggcccagtagagtggctcacacctgtaatcctagcactttgggaggccaaggagggaagattgtttgatcacaagagttagagaccagcctgggcaacatagcgagaccttgtctccacaaaaaaagaaaaatttaattagctagtcacagtagctcacacctgtaatcccagctactcagggactgaggtaggaggatcgctcaaattcaggaggtcaaggctgcagtgagccgtgatcgtgccactgcactccagcctgggccacagagtgagactgtgcctcagaaaaaaaacaaaaaagaatggacagaatctaggcagccaaagatgaaaaaggaaaggattccagatatagggaccggcgtgagccaaagcccagaggaggaaaagcccagattagttacagtgggcgtgagggactcgggtggggaaaaagcaagctggaaaggtagcctggggcctgttttcaagaaagaaggggtaaatgttataaggcagcaacagctttgctttggaagattctctgcccttctgtgaaatgattggcaatggagacctggaagacaaggagactccttaggaggctccctaactggagagaggggattaaagcctctctccagttaaagtacttgagctacagaatgtaaggtttgaggctaacgacagggagcaataatgtgaggaagaaaatgtcatgaaaagaaatgtatttctcaagtgtcaggaactgttattttgtgagccgtgaacacattagcacattagaaagcacacttgtagagaatataaacatcattctatttttcctctttactcagtttctctctctaaacatgaaagagcaatcacaggatctacacaaacttggaaacctttttcacaccaggaggtagaatttacttgattctttctaacctactgagacaaccacctcctcctgagcaagatcagacccttctctcaacatgaacctctggtagcatgggcagggaacctccataaccaaagcaccctgtatgtagaagcactttgtcccaagatcctgcactttaacaccagagaaattagccctggacaccactcttttttttttcttttttgagacagagtctctctctgtcgcccacgctggagtgcggtggtgtgatctcaactcactgcaacctccacctcccaattcaagcaattctcatgtctcatgactcaacctcccaagtagctgggactataggtgcacgccaccacacccggctaatttttttgtatttttagtagagacagggtttcaccatattggccaggctggccttgaactcctagcctcaagtgatccgcccaccttcctcgctaagtgctagaattacagccatgagccaccgcacctggccctggataccactgtttacagctgcgtggtcttgggcagcatgctaaacccttctgagcttcagtcttcttgcctttaagtcattataataaataccacatgaaaccgttgtaaagaaaattagccgggcgtgatggcgcacacctgtagtcctggctactagggaagctgaggcactagaatcacttgaaccctggaggcaaaggttgcagtgagctgagatcgtgccactgcactccagcctgggcaacagagcaagactctgtctcaaaaaaaaaaaaagactgttgtaaagattaaattagtttaactaaaacgtggaagtgtggtgcttggcattgagtgtgcacttaaaacgtaatagatatatagatagcttttttatgagggaagtgagtaaaatggtgtaggaagaaatatcactggattgttaccaagaaacttggaattcagaactggctttggttaccttaaccagctgaatgaccctgaggcagtctcttgctgattatagaccttggttctatttcttagaagaggcaaagggacctgataaccgccaagctcttttgtccagccttagcattctgtgatgatatgaaagtatttttccattacttacagtctgttcaatctcagcttactttaacatcacaggcaagattgacagattagttactttttttttttttgagacggagtttttctcttggtgtacaggctagagtgcagtggcacaatcttggcttactgcaatttccgcctcccgggttcaagcagttctcctgcctcagcctcccaagtggctgggattacagacatgtgctaccatgcccagctaatttttgtatttttagtagagacggggtttcaccacgttggccaggctggacttgaactcctgacctcaggtgatcctcccacctcagcctcccaaagtgctgggattacaggcatgaatagttaccaatttttaagggatagtagtttgagattaccaatgatgttccattcatatatgatatccacacctcaccttttgaaacatgactctcataagttgagggaaattccatttttttccctaacttttcttaatttgtttttatgatctagcattgtgattaagatcaagataaaagccagattgccaaattcaactattaactctgccatttatgcgtcataacctaccccatgggattaaatacattactatatgtaatgtccatagtccagcatctggcacatagtaagcattcagtaaatgctagtagtagttatcagaaaaaggaaaaacatgctctcctaaaatcccagcatgctgaatgtttgaagtatcttcaatatacattttttgtttgaatcactttgtgtgtaggtaacataattttaattagagtatagtaaaaatgttatactagtctttattatattgtaagcatcttctatgttgctctgaaatcttataagcatcttctatgttgctctgaaatcctatttagtatcttctgtttgatcaggccagtattattttcttagccattcatctatttgtatttaattttacatttagataatttttaatatttcattattataagtaatgctgaaatgcaattataatgctataatggacattatatatacttcttttgaagtacatacttctttgggataaaaatacaagaggaatatttctgagtcaaacactgaatatttttatgatcattgatatgaattgccaaattgctttccaaaagaatattaatattttacatgctagcagcaatgtgtgagtactttctttatcacaatgtagccagaatcggaagttttaattttttaatactttaccaataaatataacatatctcattgttttcttttgtattttatttatcagcacagttgaatgcttgtccagatttttattaattatatatattatgcatacagtatgtatatactttgcccatttatctcttggttacttgataatttacttgttttgtctgagctttttacataataaaggaattaaccttatgtgatatttcatgcaaatgtgtttctcaatctaatttcagttttcttttagatattttattcttggttgcatagagagtttatagttttaatatagttcgccttctttgttttttattttgtgatttcttgatcatttctaaatgtaaaattagatactacagatatttgataagtactactttcctatgtagaagtggattaatttggagacttccttttcaattctatatatcgatatttcccttttttacaatgataatacatttttgttttaccttagtttaattgtctggcagtactcttaaaacccgcaattatttttctctgattctcttcatttatattgggtgctataatggatgtcttcaaaggctaaattatacaccttaaaaaccatacttcagcagctttcccccttcttttcagcttcatctcttttttcttctctactagatctttctcgacagcataccaacatgctattacttctcccatcttaaaaaaaaaagctcttttaatctactatacttttcatcttatcaccccatttccctctgtctctttagagcaaaaattcctcagaagaatagtccaagccgggcacagtggctcttgcttgtaatcccaacactttgggaggctgatgcgtatagattacctcagctcaggagttccagaccaatccaggcaacctggtgaaaccccatctctacaaaaaatacaaaaaacaaaaaaattagctgggcgtggtggtacatgcctgtaatcccggctactgtggatgctgaagtgggagaatcacttgagcctgggatgttgaggctgcagtgagccatgagcatgccactgcactccagcctgggcaacagagtgagaccttgtctcaaaaaaaaaagaaaaataatttttttaaaaaaaggatagtctatacaccatcttcactttctttccttcagggtactctggaacccatacgtttgtttagacttttctctccttccactccactgaaattgcccttctcagatcaatagtgaccgccacttggccaaactgtttgatc

SEQ ID NO: 97251 - DNA, 64985 bp, Homo sapiens
tcctcagtctcctctgctgcttcctcatcctttattcacctgttagataatattgaagctcttcaaggctccatcttctctgatcactctactctctcctcctgggtggtctcattcactcctgaggttccaaagacatctctatgccaaaaatctattttcaggtctcacctcccttccaagccccagacacatgcattcaccttcctacttggattctcctcttgggttctgcataggcatccctaacccctcctaagttcttcctcctacataactcttgaattatcccattgcaccatccccacatcatccacgctagaccaagccacccccatctcccctttgaagaccacatcacttctaagctggtctctctgcccggtctcctaacccactccaattcttccttcattcagaagccaaagcgctcttgttaaattgccaatatggccatgcacccacgtccactgccttcatgggcatcccaaataaaatcaagcatctctgccatgccttgaaaagctctgcccagcccagcctttcttccagacacagtccccatcatctctcttgctccaaacctgctctcctctcctccctgactgcacccaactttccctcgcctttgcacatgctgacctctctgcctgtttagtagatgcagctgatgcccccttggctcacctctcctgaaggcacatcctgctggaggggcatcaccagcagctgggagtgttggccactcacggaaggcagccgcacacctccctcagagaattgccctgggacaaactagagtcacctctgtaataggcgacaatcaggcagacctcgctgcccaccatgggctacaaaaggccagccacctcccacagggtgggactgttccctggacagttgatgttcccaatcccccctcgccccgccaccactgtggcacggggctgaggctgggaccacctctttctctgcttctacccaccccgtcctgcttctctcccagcttctccccaattgccaccccaacagatccacgcctcaggttccacttgtagggcacctaaccaagacttatcctccaggttaggcctggatgagccctcagcctgggtcagagcactatctggacagcagcttgctgttttcctttctaaccgttagcatggccatgattaaatatttgtctgtgttctctgtctaacatgcatctcactgtgctctccataagggcagggctgtgtctattttactcccaccgtgttcctagcaccccccagcacatagtaggcacacagaaaatatgaactgaaagaaggaaggaaggtcctgatgttgcctctgtcttatttgatcaagggctctgaggctaaatgacttttggggttggcagccgtgagtgtcatggcttgggctcgctgccctccagtaagcagctctgagaccgtgtgggcagaggccatgtggcatgcctgcgtggatggcggccatccaccgcctctctcttttcctcactcagaggcagcagctggggctgctccgccagtgaccgtgagcaaccctggaagctgcactgtcaacaacctgtcatagcgaatcaccccaggccactgattccccacagagctgcctgctgaaccagcctcagcctcttgaggcctctcccagcagcactcacaggctggcatcaggctggcaccaggaaggcccagacctgctcctggtgccaaatgaggcactagctggagctgctgggagcctgggctcaggggatgccacctcccaccccaggacagagggcaggaatccccatggagtatccaggagaaccggccctttcccacccaccgtctgccccattacacttgggaaggcctgtgttgtgccagaacatttctcactccttgcttttgctaaccctcatgccagccacacaggctgcatgaggctggctctgcccatccctcagaggagaaaactgagattcagacaaaggaaagcaggagaagaagttagtagcccaaggattctctccgtctcaggagttccccatcctgcatcagtgctgcataagggggctttgaggagtacagccaaacagaggcgagggggctcagaagcccctgatgtttgaggcttttagtctgtccagatcataggtcagcacccagcagccctctttcatttgttggctataggggaatagctataaagggttcccagtgggtgtcccagaaccaaggcccctgagtttcgcccagccctcatcccacccaaccaatgaaggccacactctacctcagggtcaggtggcaaggacatcagctgtgtcccagagcgtcctctctgtcagagcaccaaggcctgaaggcaccctgggcaacaactcctcagcagagaggccaggctgaagaggggccacctccaagctgagctgcgcagagatttcctgggcatgccacaccccccagtggccaggctttctcctccacagactctcccggagggctccagtcacctcgtgtctccaccagaaaggggaggaaggaggaagagaattattatcacaacacagtaattatgatgtattcatttgtccaacaaatatttctccagggcctgtgctgagcccagctctgtgctaagtgcggggcacacagccaggagtgagacagacctagtccctaaccttggggacctgggaagccagtggacagatggtggacacgcacacagatagggaagagatattcaacataattttggaggctgtaggtgcaatggagagaaacaaggcattgcacaggctgagggaagaggggaaggggtgtgtgggttggtggtccagaagcttctctgaggtggtcacaggggagaccaaggtgatgtgagggcaggagccactccaggagctcaggggagagtgttctgaacacagggaagagaagcaggggcttggggcaggagggaggagggggcagggggatggggctggaaagagaatgagggccagatccggccctgaaagccaaggtgcagatttggctttgacttcgagtgagacagggagccacaagatggttttgagcaggaaagtgacattcacaaatatttaaaagttagtattagcagctgatatttattgaccatttactatctaccatatcaggcattactctcggcactctgaccacattatcttctttgatccttacaaccaccctgttgcagcagcacacccaatgacctcaccctggttccaaggttcagaggtaggcagccctctcaggacatgccaaagtcacagaccctgtaagcatctgtgaccccaggactcaagtcagctctgtctcactcactcaagagctgttgggctgttgggggagaagtctgggcacagcttaactggggcctctgcttctgggactctcacagggctgtgatcaggatgtcagccagggctgaggtctcatctgaatgttccactgaggaaggatccactttgaagctcacacagttgctggcaggattcaatccttcaaggctgttggactgatagcctcagttgtagccggatgtcaactggggcccagcctcaggtctttgtcacatgggcttctccagcatggcagcttacttcatcaaaacatgcaagccaagaaggcaagagagacggtcagcaagtaagactgaagtcttatgtatcctcaacacaggagtgacgtccatcatctttgccatattctattgctctgaagccagtctccaggccattctacactcactgggaggtcatgaatggcagcaggcagaaatctctcaggggagtctgcccgaaccaggaccgtgcagctcaactagcattttctggtgccttctatgtgccaggcatggtattagtgctgagaatttaaaactagatgaatttgggcttccacttccaggaacatttttctgggaggtgttttctgctacgtactcttattcactttccattgatgtgaccactttgtgacctatgtagaatcactcttgagagggtagggaaattactaacttgatagtatggatgagttcaccagacctttttcctctgaggggcatttggacagtagtagtcactgtgctaggcactgtaagtaccaaggaggtacccagggtaatgaggagcagacaggtaaacccacaggttgagcctggagcaaggcaatgccacaatagaggccagacccacagtgggagttggcatagtggttcttaaagcaaaataagttacagacagtggatgaaaagctgaaaccaagctttgccctatgcttagggggcctagggggcctagctggcttgatttcagagcagcagaaggtctcttccccaacacaacccctcttcccacaccctgatctctgcctcacggacaccagagaggcttgttacagggaaataatagacacacacttttagctttcatgaaaaagcaactctcttcattagaagaacctcatcttccctggctaaccatagaagtctggcaggagctgccaatcacagactccacttctcttggccaagggggtgagggggtagatttggcatccaggccgaatcaatctcccatcccctgtcccataaaacatgtgacacaagccaagccaatcagagtccttccctgggactgttttccaggtgaagctgacaggaagagatctttttcccagttggtcaggacactataaagaagaggcctcagaagcagatggtggccatgtttccagccatataggaaagaaggggggagatggagaccgatatacagagagacaagagagagagcgagctggcatgccagtcaacagcattacatccttggttcctgtcttccctctggcaagctttattcttgccctttctagacatgtaaaccaataaatccctttttatttacttgaaataattcaaattggtttctattagttgccaacaatagggtcctaaaatataagcctataatttcaccactgaagttcaaggtaaagctacaaatcttcctgggagaggtgattcatgggtctaaattgttactaaagtataaatgactgataacagatcctttcttaagaggagactataattacgagcttatctgaaaacagacaaagcaccatacagctagaagtaaagacagtcaaaacgtctggtaaccttcacctatcagcacataagttttttttaagattagaatcttcagtcaccaatgtgctgagtttgctgggtctggcacccagtatggggttcagtcaatatcgtaaaagggaagaaacagaagcaagggaaagtggaaagaaaggaagagtgggggaaggaggaaggggaaaaaaagaaaagaaaaaaagagggaaggagacgggaagaggagaaggaagggtgatgagggaggaagaaaagagagaaggaaggcttgaagggaggcagtaaggagggaagaaagaaaggaaggaaggaggaaggaagggaagaagggaaagagaaagaaagagagggagggagtaaaaagaagggagggaagtggagacggagggagagacacacagagacagagacaagacagacaaattgaggggaaagggaggaaggaagaaagacgagagtctgagcggtggatcccgccccggccccgccctgggccccgcccccggcccgcgagctggagcaccacctttcggtcgccagggcccgccacccgcagccgccggcaccctgtgcgcgcggcgggccttctttcccgcttttgcgccggccgcgcgccccccccgccgccgctctcgggctccggccgggtctcgcgcgccgtcttctcgagaggggcatcgcgccgcccggcgcgcgccgcccccctgcctcgcggcgcggggtctcgcgggccccgctcccgccctccgctcgcctggcccggaccggaagcggcgccgcacggcctgggcctggcgcggggggcgggcaccggggcccggtcggacatgggcaagaagcacaagaagcacaagtcggacaaacacctctacgagggtgaggagggggccggggtgcgggcggcgggccctcggcggctctgccgggcttccgctctttcccagtggctccggggcggcccggggcccttccttcccacggcaggcccaggccggcgaagggggcgcgtcctgccggaggccgcgctgccccccgtgcggccgcggcattcgaacccgggtccccctggtccggtgggtctctggtggggagacgtgaggcgggcccgggaggcctgggagcgttcggggcgggcggcgccgccgcacccccgggccggggtccgtcattcaacaggtgcttcgcggagcgcccaaagccgcctcgggcttgctgcgccttggcgctctgcatccttagcactccctggagagccccgattttaatcgacgcgctttcctttcttttcttttctttttttaagagtatgtagagaagcctttgaagttggtcctcaaagtaggagggaacgaagtcatagaactttccacgggcagttcggggcacgactccagcctcatcgaagacataatcgatcatgtcaaacacaaggactgaaatcggaaaaagagaaagaaaggagagaagcagattccaggggaagaaaaggggagaaaacggagaagagttaaggtacaagtggttacattgctttggctttgcggacggcactgcctcttccaggtgccaacctcattttattttctttgtatctggggaaaacaaacgcctctaagatctggctcgtttgaggaggagcaggacagaatagagacatgaatcatctatgagtttcagcaagtcgtttttggattatactcttaggcarttgtactcgcacatcaggtgaggaagcagctaagtccaaattttgaggagctgcttcaaagaatggtttttccatctaggcagggtaaaaagtcatgctcaagaaagcctcagtgttcaaggattgtcaaaaatagtcatttcagaagcgagtgggatctactggggtttaaagtttgttctgaaataaatattataatgccaaatctgtaatgagcaactttaaatcttttaaaacagtgttgtagtgtgttgagaaaatttggtcagaaacctgtaatggagattgatattcttaaccatttgcatttaacagaaaagaatgagtagctaccatcttggtttgaaagctgggcaaaataataattaatggctgggcccagtagcccacacttgtaatcccaacactttggaatgccgaggtgggaggattgcttgaggctggaagttcgagaccagcctgggcaacatagcaaggccctgcctytgcaaaataaactacaaaaatttccagagcctggtggtgtgcacctgtgtcccagctattcaggaggctgaggtgggaggatcccttgagcccaggagtttgaggtacagtgaggtatgatcataccactrcactccagcctgggcaataatacgagactctgtctctaataataataacattgttattactgttattaactttccaaatttaacctgccactgaacgacttattacatcaattattgtgaaggtaaattttcataggttagttatgtaatttttcttatgtttatatatacaagaggagctttctcttccatgtgattgaacacattgctaagtcaccaagtcttagagatcttattttggggatttcttaagtctattccttcccttttgtcccagtttttattacctttggctaggtaggagtaatgttttgttttcttccttaaattataaaacccatatatgcatttgattttttaaaagtagttcatgtggtgcaaaagtacacaaaatggaaaaagttttcytcaccccaatccttcacatagactccctcttcagaggtaaccagttgttttttttaattaatagtagtaaartaattcgtgaagatgatttttaaaagtcaagagtactacacagctttttgacacaaagcaggctgctgctccactctggacactttttaggtatttttccttgcctacttatttctatttcaaaataaaggtttatattgctatttactgatttagcagtttatatcttctactgacatcatgttatggaagatgagaattcagtttcccttgctcaaggtataggtacatcacaattattggttaaatcaatattaaagtgattgtagacaagtatagtatgcaaatatagatctgatcttaactagttagatcattgctttcatttgtttggttattgcttaataattcttcccaaactctaagatttatgaaactcatttgagttctttacttccttttttattttcctctggagacatttatcttacagctytctgtctcctggaggctgaattagttgctgtcaaggcctcctgggactctccttcacctgcttcctggatctcatgccttcctctttcttgattcattcccttgttctggtggactcttaactctaggaacgtcctaagaaagcatacacggggtagattttataagttctaacatgtttgaaartctgtattctgccctcatacaggttgatggtttgacttgtttagattgaaaattattttctttcagacttttgaaggcattgctttgttgttttctggcttctaaatttgctgttgagaagtctgttgccattctgattcttagtcctttgcatatgaccagtatttgctaacttgaaatttttaggatcttccccccttatcttcagtgttctgacatttcacaatgaatacttgtgccttcagttcagagctgtgtgcttgaagtattcctgtgttcatttctttccctccattttttcttttcttggtttctggaactcctgccctttagatattagactcctgaactgatcctctaattttcttatgtttttctcatattttttctgggtgtgtgtggggtgggggagggttcttccttcagggaacatccctaaaatttctgacttttccagatttatttcagatcttataccttgaatttccaagaattttttcttgttctctaactgtcctttttgaattagcaccctgttcttggttttagatgcagtatattcttttctttctctgaggatattaatcgaagttttttcctgtttttttctcctaagttttcttttgctccctgccctgtctctctctcccaaattcttccatttatttgtctgtctctgttttctgttgaaagcatcctttagttgtctgttgagcttttgcagtttgtacaaagctgaktaaatgctttgtacctagacagagtttgtcagttgatggactttattgtagagtgactaacagggactcagtcattttggtgaagaatgccccaatgtctgtaccttacagatgttttctctgggatttttagtttctccagagaaaaatcctcctctcctaggagatggattttgccagttttatccgtgtttctggagccaactatggggcaggggctgaaggtcttaccacccagttttctgagtctggcatttctccttattttggctcgtctmgagatttggagactctcaggttccctgcctcctccagttctgagcttttccagggttctggaatttaggcttttttcaaaggtgtccacctctctgcatacgggagtatcttgctttctctgttctgcaaatcaccccatttgccttccgtctcccaagtgtgttgacgtggcttatcaacctttgtctcttacgtgctctttgttccggccatcgtcttgtttaacaaaagttgaggtaaccactttgaaccactctggtttttgttctggcagttaccaccataatcccattgatacattaatattcttcgtttcttgttttattcgttatctttatatcgattacatagtatttagttatatggatataccatacttatgattattacttttaaatcttacatgtaatactgcagtgagcctcattgtacacacatctttgtacacttgtgtaagaatatcttcaggatgggttcttagaagtgttctcccccctgtgttccagccactctatcctttcttgactgtggctctaaagatcattagtcccattgtattttgatgtcattgcaacctaaaatgggttcatatccacagtctcttctggacacacctctcagaataggacaggtagggggatggtttctatttcacattcagggctagagacttcagatcctctggggtgtcactggttctgtagggactgtttgggtcattctttttttccaggctagaccagggaagcagggagagattctttttgctagtgttatgtagggagggagaccttagagatgcctctgtgagctgtgttctggatgtccagggagttttaggaatagtagttgatgtgatctcttcttgggagaaagaagggctagagtatgtatgattctgagggactggcgactcttctctcagttccatgsagctggatggaggacaaaggatgtccttttcctttcaaaacatttttctgaaaggcatacataacttctgcttatgttttactaaccagaacctaatcacacagtcaccttagctgatagggagaccggaaaatgttgtcttttttttttttttcctttttgagataggatcccatgttgttgcccagggcagaatgcagtggtgcaatcatggtccactgcagcttcaaactcctggacttaagtgatcctctcacctcagtctcccgagtagctgggactacaggcatgtatcaccacacccagctaattttttcaaaaacattcttttgtaaagatggggtcttgctatgttgtccaggctggtcccaaacttctggggtcaggtgatcctttcacctcagcctcccaaaagtactaggattacaagtgtgagctaccatrtctggcattttagttgcggggagtgaatgggggtaatgtaccttgctaaaaattaggaatctgttacttaggaaaataagataaagttgggggaagcacacgcgcacgcgcgcgcgcrcacacacacacacacacwcaaacacacaacgtaaagccttacaatttttcaaaagtgcctcagttaagtgattttcttgttttgagtaggaaggctctaactatattagtttaaaatgccccaacgggtaggatcagcagtatttctccctgtacagcagtggtatttaatgccaaccaaagcattaggggtacaacgtgctttggtttccacaagacaccacccctatgaaagtgatgaattttcttattccttaaacattctgatgctgagcagttgataaagaatttgcctgctggcatgactcttaaaacattagttttcctttcctaaatgttcagtcttaatattttcccatgttatgtaaaaaataaaataacagccataaaaaatgcttatgccatctgatctagtcatacatacacaagaggatagttaagtaaaactaagatgcaataggtaaaattctgtgaggctgttaattgataaaatgatttataaaaattacagaagtatttctaaaatcacagtagaggaaataaccatatacacacccattatgattataacacgaaaaagctacacrtaacgttttacaaataacaactgctacttatcaggcatatagtacatcctaggttctgtgctgagcgctttatgtacatcatcctactatactccctactgtaatcctgtgagactggtgttctgtctctattttgttggattgtggtacaatacacatagcataaaatttaccattttaattatttttaagtgtgcagttcagtagtgttaaatgtatttacatttttgtgcaactattttccagaacyttttcgtacctattaaaaactccccattttcctttctccctctcctcagaccttggcaaccaccattccactttctgtctctgtgaatttgactgcttttataagtggaatgatacagtatttgtctttttgtagctgtcctatatcatttagcacaatgtcctcaaggttcgtctgttgtagcgtgtgttggaatgtccttcccttctaaggctaattgctactccattgtatggatataccacattttatttatttatcagtcagtggacatgtggtttgcttccaccttttggctgttatgaayaatgctgcgaggaacatgaattgtacaaagttctcttcaggacccctactttcacttcttttggatacacacccacaaatagaattactggatcatactatctcctcttttattaatgagaaaattgaggctcagggaggttaagtaactttaccaaagtctcacagttaatgccagaacaataactcaaattctgcccttaagaggtctttaatctgaaagagttgttaaagtaggcaccaacctctgcccacagcacatggggaaataaagtcagtgccctaacagaggcagggttctagttctgaggctcctgagagtacatggagctgggggaaatcacagaagacttttctcaagaagcagcatttgagttgggctttagaaatcaaaatacagtgatgtaacactatatgttcagttaacatggggtcaactatatgccctgagagaaatggctctttttatggtagttcagtagaagtattctaagattgtaagtcatgagtattgtacttaatgggctacttcaggtattttccaaggtgatttgacaacccaatttttatttatgtgctgcctttagatgatgatccctgaatagaatgataggccactgcgtagagacgtggaggtcaggaagcccacacaccagaggattatggagctgttgttagaggattagctcaaaaatgggcaagaaggagatgcgtataggggacataaagtaagtctctttttaaacacagaatgcrtggaggggaggatagggtaagatctgaaaggcagctgagatggcagagtaaggagtttgagcttcagtatgtagtcagtaggaaatcaaaaactttgagtggaagaatgataaaagctgagtgttagtaacataaatctggtaacagtatctaacaaatattgaatggagagagtggaaactgtaaggagacctgcatagaaagctttttattgaaatagctcagacgagtggtctcaattcctttattgaaactcacttgctgttctgaagaacatagtcctaacccaaatgatgtcttaatagctttgtaggtcgacttctggtttagttgctgaaagaagttaggccactcacattgcttaggaatgttatcagaataaaatgagaaagatagtagtcattaaaaaaatttttttactcaaaagcattaacacatataggatgttattatatataaagctaaaattaagtaaaactttaatgaaaattacagtaaattccagtaagtacctattttattaaagcactatctatactaagtccaacagtggaggcagactcataactaacatccgagtgtttactgtctgccagacactattctaaattctttgtgtatatttactattttgatccttagaaataattctgtgaggtaggtgctgttagtrtctcgtactgctgatttaactgagccacagagtatgaggtagcttttaactagagaggagcagtgactaatcgtattaagcaaagtgagaattctggcaaaacacagttcattgacttgtgccatctgtcacacctggcatctctgggctgttgtggcttatctgccttggcagaaaaccctccccctttctcagcattggtctgtgtgtgtccctcctgaggtagtcgtctcaaccccaaaagacctttccaaggaaggaagaactcagaaaaggggcctatgagtagcattgctcctctgatagaaggctgtttatctgtttctttattcaacaaatatttacctgacacctattatctggccagactgtactaggctccagtgattaagataggtaaataaataaataaaatcctacaggagctcaaagttggacccaggaatcagacatgaaagtataaataaacctcacgacctggtaaatcctaagggaggtttgactaacttgttccaggagtccagggaaaggtatgcgtcattctgccgtgggcagcyaggggaaagcatcatagagctaatggctaacgtgtgtagcaaatgctgttttcagcctagggccaaaaatgatgtgcagctgccaggtaatgaaacatttttcattggattctaaaatcagctgttaaaagggaactctacattgttttgcatattggagcatcacttgaatatatgtatgtgtatatatcctccgaaagtaaccaacctgaaggacagtacttattactaaggactttagctgttaatttgcatgcttttgtgttcctatgtcatgctgtctcctatgattaattacttctgcaaatacttagcaagtattatgtgttaggcatttgctgagcttgcaggtatggagctgaataagacaaggaccactgtccagagggagctccagtagaacaggcaaatgtcatttgttgagtgaataatgtggttcggtgagtgttaaatcctaataatctgagcaaagatttgctttaaaagcattacacacagattaataaaataacttgccatcaagttgtgggcaaattagaatctagtcagaagaaagtaaatgtgtttgtagttcatggaaatagcccctcttcctttctcctgcctcagatcttcatgcatacaagatgtttcccctgcctggaatgctgttcccacacacctacctccacccccaacctagctagattctttctccttcagatctcagctcagatgttacttcctcatggaaaccttcccacacttgtccagtctaaattattttcacccaaaagttattctgtccttgaaatctgttttgttgttgtttttaagactagtcaagtgaagcagtgggaatggggaaggaacaaaaaaatctgtagctcgttgtgatcaattagttgtaaacatgtttattttttttaatgagttatttaatgcacatctctgctgttataaacctgtttgttttttgaatgagttatttaatgaacatctctgctgtttcactctgagctccgtaagagtagggctgtgtatattttctctttcactatatagccacacagtaaagcctcttttatttattgaatgaatgagtgtccatcatgtgctaagtaatgtgctaaaactttacataaactatcacatttaatccttaaaatagtcctgtgaggtatgtattcttgtgtctattttaaagattagaacgttagactccaaaaaattatatagtttatccatgacaccatagctaattacatagtttatccatatcatagctttgtcacctactagtgacgaggccagaatttaaacccgctttataaactaactgtaaactcttcttccttaactacctaaagttaaatggcactaatatttttgcttagttttttctgtgtaattaacaraatttactgttaaccaraactgtgttaacttatggttttacgtaactatattcatttaataagtgacattcacaacaagattctgcaacatactctgaattatgaaaaagaaaatgtaaaggttggaatcaraattttaggtggagagagacctgtagagatcacagccttgtgttgtacagatgggaaactgagactaaaacagtggggtaacttgttaaaagtcatatgctggtgaactagaagctagatctcctgattctcagtctggaaataacatgctatgatatctctattcagtttagggtagtttccaagcatatgtttttatattctttttttcttttggactccctagccccaaagactttttgctttactgaatgataaagtggttacggtagaccaggataactaggtaaagatactaggtaggggtagttcagaaacataccctcctttggtactttttccacttggctagtttatgattgaccatcttatcaactctgtaagataaataataacagttaaatctccatcttgcatgtggtaaagaggtctgatgagagtaaatgaattgcctaaggtcacagagtggttttttactttattctttttgttcttttttttttttttttgagacaggatctrgctctgttgcccaggctagagtgcagtggtgcaatctcgacttaccgcaacctccacctcctgggctcaagccatgctcctacctcagcctcccaagtagctgggactccaggtgcacaccaaaactcctggctaatttttgtattttttgtaragacgggatttcgctatgttgcctaggctggcctcgaactcctgagctcaagtgatccacccacctcggcctcccaaagttctgggatgacaggggtgagccaccgcatccagccagcagagtgttttaaggatgaagctggactcttagagcataggttagcaagttggccaacagtttttgtaaataaatttttattgaaacacaaccaaattaattcatttacattttatctgtggtggttttcatactacaacacatactataatacaaaagcagagtttagtagttgtgacagaacttaatgggccacaaagcctaaatgtttacagtttggccgttttgggtttttgttttgttttgatttgttttgtttttgagacagagtcttgttctgtcgcccaggctggagtgcagtgatgcgttcttggctcactgcaacctctacctacgggttcaagcgattctcctgcctcagcctcccaagtagctgggattacaggcatgcaccaccacccgcagcggatttttgtatttttagtagagatggagtttcgctttgttggccaggctggtctcaaactcccggcctcaagtggtacacctgcctcagcctcccaaagctctgggattacaggcacgagccactgcacttggcccagtttggtcgttgaccaaaaagtttgctggccccagttctagactcttggcactggcactggatgagttttttctacctgggagaatgcatactgcctctcaagctgtcctttcttcacaggtcacatttaataggaaggaatctgtgtctctgtggctgttatttcatagaatggatcttctaaacttgccagcctaccaagatccataccagtatttctgsacgaaggatttaaaattttccaaagttaagaattactgcaacagaatatgttgtgaggtggtaaaaatacattaaycaactaacagtggtagctgggatcaagcatgagttcagtttataactgctctctggaacttttaaaacaaccatatattctgtattaggtgctttggattctgaaaatagagtgcagagctctagatcagtgattctcaaagtgtggtccctgtaccagcaacacccacatggcctggaaacttgttagaaagtacaaattctctgtctctaccccatacctgcagatcagtaattctagggacaaggcccagccatctgtgtttttaatgagaccttcaggtgattctaatgcacactaaagcttgcgaaccacaagaatttttgtttcttgcaaaataaaatttttgtttcttgcaaaatcctaaataatcctgatgctgccagtctggtgaccatgctttgagaaccattgctgtagatactagaaataaaaaatagggcataggccaagaaaatagctttttgagtccataagatcctgttgagaatcttgattttgatgagcataaaatgggcattgttggacaattttacttcaraatttaaattttaagaatgcagagtacagagaataataaaactaccatcttgataccaaccatccagctttaacagatctcaacatttagccatatatatatgtgtgtgtgtgtgtgtrtrtatatatatatattwtttttttcccctaaggaaagaagagggcagacagagatcccttataccctttcagagtcccatttctgtctttccttctgatagaaccactgtactgaatttggtgtatatcacatgcatgtttttataattacaagttctgcatacatctgtaaacaatgtatgcttacacattttcatacatagcttgtaacagtaattgttctgcagcttttctccagacattgtttctgaatgttatccatgttgatacaatacaattttagctcatttacattacctgttatgtaaatatgacacaatttattaatctattttccttttaataggcattggattattcctattttttactattttaaacaatgctgcagtaatctcttacaagtctccatgtagaccatacgacaggaaatttctctggtatatgcacagagagtagcagttgagaagtaggttaaaggctttgctagctttgctagatattgctaattgctctgctaaggattgttcctattcacccaattgcaaggtatgaaaatcccatttctctacatttttatcaaaacttgacatttcagacaaatgttgccaaagagaggcgaaatgccttctagtttttaaatctataattacccaagttctagggagcttgagctagttctcatgttctcaacatttcacatttcttattctgtgagttacctgtgatatcacttatctatttcttttttggattttttgcctttttgcatagatttatagatgctcttcatggaatccttaatgttttataagttgtgtttcaagtactttatctcagtctatcgttagatttttaacttggttcatggattttgttgaggtaccaaaatttatcaacttaatatcaaatttatcaaggttttcctttaaaatttattcattttatatctttttaagaaagtctttttctactcttgggtcttaaagatgcttttcttttatctgaagttctgaagctttgctttgtacatttaagtctttatctggaattcacttttgtgtatggcatgaagtagagctcaaattctattttctcttttcaggtaacagttgtctcagcaccacccttttgtcattgacttataatgtcacctctgtgatayactaagattattctatgtacatgggtctgtttctgggctctgatctcttctgttggcttatttgtctgtgtgtcagacccacattgtcttattatcacgttatacaaataatatctggtaagacgtatcatcttactctgacctttttcaaaactattgtgttcttaatcgttcactcttcgaggtaaattaatgcaattggcttgttgaattccatggaaatttttgtttttaaatttcgattggcattacatcgaatgtattgataacttgagagaggattgactctgaattcatgaacatagtatatctcctttattcaggccttctgtgaccttcagtaatgtttcacagtttttcccaaaaggttttgggtatcttttattagatttatttctatatacactatgttgcttttttggatagtattgkttttctaactggttatttctggcatagagaccccctttgttttttccttcgtgaacgtattattctctccttttccagtagatggcagtaaagtacattgagcttgttattaagaatattttctttacartgatgtctttttaccccttaaaatgatttatgtatttaaagatattggttctgaaatatttctaaattatctccctttgttccatttaggaggataaaaagaagcgagatcgagaccgggtggagaatgaggcagaaaaagatctccagtgtcacgcccctgtgagattagacttgcctcctgagaagcctctcacaagctctttagccaaacaagaaggttggaataactctgaattaactatcctgaatgaggaggctgaaatyattatagctcaggaaaatggtggggttttagcttctaagttggagctttgtgattgaatttttaagttttttctctcaaactgcataagagctttaaattagcttcaattttggattaatactctcaaacttcaatatatttttaagataaatggaatttctgtatgagatatttaataatggttgtagaaaatgatctagtaaataatactctctagaatactcctttttaaaatacccttttcccttcttctttgctttagaagtagaacagacaccccttcaagaagctttgaatcaactgatgagacaattgcagaggtaaatgtttttccaatatttttataacatagaaattaaaatggtagatgtgtaggatccaaaccacatttgtgcctaactccaaacatacgtgattttaaagtgaatgataaatattttgcctggcagcagaagtactccaagaggctaggctaacttttagatattctttatttggtttgtttccctggcaacttgaagggtgttacataatacttttaatgacaaatttctgtctctaaagtaatttctgatgttaaaactttaagccaggaataaacaatacagatatttccactttgctaatagatggaaataccttctatgtatttgtacaatgcttatcatgccacaaatgtttagcaattattaagtatgggagaaaaaataaaacaccataaataggaattatggccttcttttaaatgcagaaattggttctaaaaatttcagtgcctagattaagctactgttgagttcttaaaagggaaaagaataactcaatctttattaaaatatttattttgggccgggtgtggtggctcacgcctgtagtcccagcactttgggaggccgaggcgggcagatcacgaggtcaggagattgagaccatcctgkctaacatggtgaaaccccatctgtacttaaaaaaaaaaaaaaaaaattgccaggcatggtgatgggcgcctgtagtcccagctacttgggaggctgaggcaggagaatggtgtgaacccaggagatggagcttgcagtgagccgagattgcaccactgcactccagcctgggcaacagagcaagattccgtctcaaaaaataaataaataaataaataaaatatatttattttgatatctctctactcagagtttaaattttcagctcaaagatatttccattatttgcaaagggtttatggttgtagatcatacatttttacagtggactttctttcattgtattgaacttaagtcaacccagaacacattgtaaataatttttctctaatgtaatctgtattcaatgcctgttcaggtttgcagttaagatcagaagttaaccgagtatagtagctcacacctgtaatcccaacactttgggaggctgaggtgggaggatcagttgaggccaggagtttaagaccagcctgggcaacatagtgagaccccatctctacaaaaaaataaaaattatcctagtgtggttgcacacacctgtagtcccagctccagagactgaggtggaaggatcacttgagcccaagaggttgaggctacagtgagctgtgatagcaccattgcactccagcctgggcaacagaatgagatcttttctaaaaaaaaaaaaaaaagaacttactgatctctcttcttttttggtgtttgagaaaaattacatctagtctttatatttaaataacttgttcattacttcactacttgtccgaaaggagtgaataggtattgggtattccattgcaatttacaaggtgtgactgtaaaatgtcatggctgccttagagtttttcttgcaacgtaaggccagaatgtaggttaatgatgtcaccttaaaagaaatgacttaattaaaagaagacattcaaatggccaacaggtatatgaaaaaatgctcaccatcactaataatcagagaaatgcaagtcaaaatcacctcaccccaattagaatgcctgttatcaaaagacaaaaaaaaaaaaaaacaaagctggcaagaatgtggtagagaaagggaaattgtatatactgttggtggaaatgtaaattagtatagccattatggacaacaagttccttaaaaaattaaaaatagaactaccatatgatccagcaattcagctactgggtatatatccaaaggtaatgaaatcagtatgtccaggagatacctgtactcttgtgttaattgcagtrctattcatagtagccaagatggaatcagtctaagtgcccatcaatggatgaatgcattttttaaaatgtggtatgtatacacaatggagtattattccaccattaaaaagaatgaaatactatcatttgtaacaacatggatgaacctagaggacatcatgttaaataagccaaacacagaagaacaaatactgcacgatccttttgtagttcataagtgtaatgattgggttttcatgttcctttgtgagatataccgccctcaaactttgttacaacatcagcacattacccatctgatgtgaagacagaaaatatggtgagggcacaaatatgacatcatctcactcatgtgggatcttaaaaagttgattcatagaagtagagagtagaacagtggttaccagaggcaagggaaaggtagaggttggtcagcaggtacagaattacagttagatgggaggaataagctctggtcttctgttgcacagtaaggtgacagcagtccacaaccatttattatatacatcagaatagctaaaagaaaggattttgaatgttcttattccaaagaaataacaagtgtttggggtgataaatatgctaattaccctgatttgattattacacagtgataccgaagtatccttgtatatatgtatgttagtatatatgtgtcgaaacatcacactgtaccctctaaatatgtgcaattattatatgtcaattagaaacaaagtcttaatgaaaaaacacttcaggaagtatttcttagtctaaagacattgggaattagaacccagagccacactgttttgattagttttagtgattggatgattcttcatccttaccaggagctaagcctggtttaaaaaataaaaaatctagttgatcaagtttggtaatagcatttttggtcaaaactagatggggctctgtattaaaatgactgacctaggagttagataatttcctccaaagggtagctgcaggaggccacccaggggtgaatgctgccgttacggtaactcctgtggacagcgcacattttgatgtatgggtcctgactatgtatttttgcttgttgtcattttttagtctcactgcttaggcatcctgctgtgaaaaacaaaggcagattcacatagacctgagtcagatttctactcttttatttaatgcatgactcaggatagataatttcaacctcactgagcctcagtatcctccggtagtggaggataccaccactttgatggcttttgtgaggattcgatataaaatatgtcaagtgcctaccactgggactagcaacatggtaaatatgtttttaaagaagttgttattttttaaaccatatttttactgttattctgtggagtaagaaaacttttggtgtgccagatttccagagggaaaaaaaattagcataatgatttaatcatataaagcactcattctcaacctgacaatactggaaatacaaatgccaaatattcaaatcccaatgccaatactcatctgtggaaatatcactgcctggaccctacccttcttccccaagagcttctggtacagtgggtctaggctgagtcttcctcccgcttcttccccgcattggaatttttttaaagctcctgtgtgattctagtgtacagccagtgttgtgaatctgtgatgaaaagcactagttttcaaatttgagtttctgattttggggtttttttggtccagtcctgtcttggcacacatacggaggtatttaagaggacctttttaatgtcagtttttttagcatcccccacatacacatgatagaagttatatccatttatggagaaaatagacatgcatggaccagaaatgcaagcctattagaaattaatatggaggattgtagatgtatgttcatagttactattttagtcttttcccctttggttggttaaaaatatgcagtgctaatctcccaaaggttaaaacattggtcagttagttgaggttgtttattttgcttcatgttttcctgtataagtgtagctgttaatgaggctgtgtattttaaaagaaagaaatctccatcctgagggtacagctagtatgtaaaacttccttgttatgaaatacttaatagactttaaaatcatttcttcagttttcagttaaaaatatgttaacatattacaaattctttctgcatctgaagggtttcctctgacttctgctcctagaccaatagatttgtttgtaatagaataaaatattacattgtcttttgcatatctttacagaaaagatccaagtgctttcttttcatttcctgtgactgattttattgctcctggctactccatgatcattaaacacccaatggattttagtaccatgaaagaaaagatcaagaacaatgactatcagtccatagaagaactaaaggtaactcttcaatcctatatacacaaaatcttggtagaaatctgcatgtctgatattcagaatctttctcattgaccttttattttgcaaagaattgagtttattttaagatccagtatctttgtttatttctgcttcagaaaactttatgagcttggtgatggaaaaccagatgaaataggtcctctgatatctttcattcataattatttttgtctttagcgaaattttgagtttgatatgtgttccacagtatattttttccaaccttagagtgaaatttttagcttagatcaatacaagtaaaacgaatattttaatgaaagttgagggttttttctatttctagacatatgagatatgcatattgtattaatccattcttacaccgctatacagaactgcctgagactgggtaatttatgaagaaaagagctttgattaactcacagttccacaggctgtacaggacacatggctggagagacccaaggaaacttacaatcgtactggaacatgaaggggaagcaagcacgtcttcacatggcagcaggagagagtgaagggggaagtgctacacactttcttttttttttttagatggtttacatttttttaatttttttttttttaatttaagttctagggtacatgtgcacaacgtgcaggttggttacatatatattcatgtgccatgttggtgcgctgaacccattaactcatcatttacattaggtatatctcctaatgctacccctcccccatacccccaccccacaacaggccccggtgtgtgatgttccccaccctgtgtccaggtgttctcattgttcaattcccacctatgagggagaacrtgcggtgtttggttttctgtccttgccatagtttgctcagaaacagcttcatccatgtccctacaaaggacatgaactcatcctttttatggctgcatagtattccatggtgtatatgtgccacattttcttaatccagtctatcatcgttggacatttgggttggttccaagtctttgctattgtgaatagtgccacaataaacatacgtgcgcatgtgtctttatagcagcatgatttataatcctttgggtatatacccagtaatgggattgctgggtcaaatgctatttctagttctagatccttgaggaatcgccacactgtcttccacatggttgaactagtttacagtcccaccaacagtgtaaaagtgttcctgtttctccacatcctttccagcacctgttgtttcctgactttttaatgatcaccgttctaactggtgtgagatggtatctcattgtggttttgatttgcatttctccgacggccagtgatgatgagcatttttcacrtgtcttctgcatgaatgtcttcttttgagaagtgtctgttcatatcctttgcccactttttgatggggttgtttgattttttcttgtagatttgtttaagttctttgtagattctggatattagccctttgtcagatggatagactgtgaaaattttctcccattctgtaggttgcctgttcactctgatggtagtttcttttgctgtgcagaagctctttagtttaatgagatcccatttgtcaattttggcttttgttgccattgcttttggtgttttagtcatgaagtccttgcccatgcctatgtcctgaatggtatagcctaggttttcttctagggtttttatggttttaggtctaacatttaagtctctaatccatcttgaattaatttttgtataaggtgtaaggaagggatccagtttcagctttctacatatggctagccagttttcccagcaccatttattaaatagggaattctttctccctttcttgtttttgtcaggtttgtcaaagatcagatggttgtagatgtgtgttattatttctgagtgctctgttctgttccattgttctctgtctctgttttggtaccagtaccatgctgttttggttactgtagtcttgtagtatagtttgaagtcaggtagtgtgatgcctccagctttgttcttttggcttaggattgacttggcaatgcaggctcttttttggttccatatgaactttaaagtagttttttccaattctgtgaagaaagtcattggtagcttgatggggatggcattgaatctataaattaccttgggcactatggccattttcacgatattgattcttcctacccatgagcatggaatgttcttccatttgtttgtatcctcttttatttcattgagcagtggtttatagttctccttgaagaggtccttcacatcccttgtgagttggattcctagctattttattctctttgaagcaattgtgaatgggatttcactcatgatttggctctctgtttgtctgttattggtgtataggaatgcttgtgatttttgtacattgattttgtatcctgagactttgctgaagttgcttatcagcttaaggagattttgggctgagacgatggggttttctaaatatacaatcatgtcatctgcaaacagggacaatttgacttcctcttttcctaattgaataccctttatttctttctcctgcctgattgccctggccagaacttccaacactatgttaaataggagtggtgagagaggtcatccctgtcttgtgccagttttcaaagggaatgcttccagtttttgcctttcggtatgatattggctgtggttttgtcataaatagctcttattattttgagatatgtcctatcaatacctagtttattgagaggttttagcatgaagggctgttgaattttgtcaaaggccttttctgcatctattgagataatcatgtggtttttgtctttggttctgtttatatgctggattacgtttattgatttgcatatattgaaccagccttgcctcccagggatgaagccaacttgatcgtggtggataagctttttgatgtgctgctggatttggtttgccagtattttattgaggatttttgcatcgatgttcatcagggatattggtctaaaattctctttttttgttgtgtctctaccaggctttggtatcaggatgatgctggcctcataaaatgagttagggaggattccctctttttctattgattggaatagtttcagaaggaatagtaccagctcctctttgtacctctggtagaatttggctgtgaatccatctagtcttggactttttttggttggtaggctattgcctcaatttcagagcctcttattggtctattcagggattcagcttcttcctggtttagtcttgggagggtgtatgtatccaggaatttatccatttcttctagattttctagtttatttgcatggaggtgtttatagtattctctgatggtagtttctatttctgtgggatcagtggcgatatcccctttatcattttttattgcatctatttgattcttctctgttttcttcttagtcttgctagtggtctatcaattttgttgatcttttcaaaaaaccagttcctggattcattgatttttttgaagggttttttgtatctctatctccttcagttctgctctgatcttagttatttcttgccttctgctaggttttgaatgtgtttgctcttgcttctctaatttttttaattgtgatgttagggtatcaattttagatctttcctgccttctcttgtgggcatttagtgctataaatttccctctacacactgctttaaatgtgtcccagagattctggtatgttgtgtgtttgttctcattggtttcaaagaacatctttatttctgccttcatttcgttatgtacctggtagtcattcaggagcaggttgttcagtttccatgtagttgagcggttttgagtgagtttcttaatcctgagttctagtttgattgcactgtggtctgagagacagtttgttataatttctgttcttttacatttactgaggagtgctttacttccaactgtgtggtcaattttggaataagtgcagtgtggtgctgagaagaatgtatattctgttgatttagggtggagagttctgtagatgtctattaggtctgcttggtgcagagctgagttcaattcctggatatccttgttaactttctgtctcgtygatctgtctaatgttgacagtggggtgttaaagttttgcattattattgcgtgtgagtctaagtctctttttaggtaactcaggacttgctttatgaatctgggtgctcctgtattgggtgcatatatatttaggatagttagctcttcttgttgaattgatccctttaccattatgtaatggccttctttgtctcttttgatctttgttggtttaaagtctgttttatcagagactaggattgcaacccctgcctttttctgttttccatttgcttggtagatcttcctccatccctttattttgagcctatgtgtgtctctgcacatgagatgggtttcctgaatacagcacactgatgggtcttgactctttatccaatttgcyagtctgtgtcttttaattggagcatttagcccatttacatttaaggttaatattgttatgtgtgaatttgatcctgtcattatgatgttagctggttattttgctcgttagttgatgcagtttctttctagccttgatggtctttacaatttggcctgtttttgcagtggctggtactggttattcctttccacgtttagtgcttccttcagaagctcttgtaagacaggcctgrtgatgacaaaatctgtcagcatttgtttgtctgtaaaagattttatttctccttcacttatgaagcttagtttggctggatatgaaattctgggttgaaaattcttttctttaagaatgttgaatattggctcccactctcttctggcttatagggtttctgctgagagatctgctgttagtctgatgggcttccctttggtgggtaacctgacctttctctctggctgcccttaacattttttccttcatttcaactttggtgaatctgacaattatgtgtcttggagttgctcttctcgaggagtatctttgtggcattctctgtatttcctgaatttgaatattggcctgccttgctaggttggggaagttctcctggataatatcctgaagagtgttttccaacttggttccattctccccatcactttcaggtacaccaatcagatgtagatttggccttttcacatagtccaatatttcttggaggctttgttcatttcttttcactccttttcctctaaacttctctttttgcttcatttcattcatttgatcttcartcattgataccctttcttccacttgatcaaatcggctactgaaacttgtgcatgcatcacgtagtcctcgtgccrtgattttcagctccatcaggtcagttaaggtcttctctaccctatttaatgtagttagccattcgtctaatcttttttcaaggtttttagcttctttgcaatgggttcaaacatcttccttgagctcagagaagtttgttattactgatcgtctgaagcattcttctctcaactcatcaaagtctttctccctccagctttgttccgttgctggcaaggagctgcgttcctttggaggagaagaggtgctctgatttgtagaattttcagcttttccgctctggtttctccccgtctttgtggttttatctacctttggtctttgatgatggtgacatacagatggagttttggtgcggatgtcctttctatttgttagtttttcttctaacagtcaggaccctcagctgcaggtctgttggagtttgctgggggtctactccagaccctgtttgtctgggtatcaccagcagaggctgcagaacagcaaatattgcagaatggtacatgttgctgcccgatccttcctctggaagcttcatctcagaggggcacccagctgtatgaggtgtcagttggcccctacagggaggtgcctcccagttaggctactcgggggtcagggacccacttcaggaggtagtctgtccgttctcagatctcaaactccatgctggcakaaccactactctcttcaaagctgtcagacagggacgtttaagtctgcagaagtttctgctgccttttgttcagctatgccctgcccccagaggtaggctccacccagttcgagcttcccggtggctttgtttacctactcaagcctcagcagtggtgggcgcccctcccccagcctcactgctgccttgcagttcaatctcagactgctgtgctaacagtgagtgaggctccgtgggcatgggaccctctgagccatgcgcgggatataatctggtgtgccatttgcaaagaccattggaaaagcacagtattagggtgggagtgtcctgattttccaggtacagtctgtcacagcttcccttggctaggaaagggaattccccaaccccttgtgcttcctgagtgaggtgattccctgccctgcttcggctcacactctgtgggctgcacccactgtccgacaagccccagtgagatgaaccsagtacctcagttggaaatgcagaaatcaccagtcttctgcatcactcatgctgggagctgtagactggatctgttcctattcggccaccttggaacctatcactacacactttcaaacaaccagatcttgtgaggactcattatcacaagaacagcaagggggatatctgcctccatgatcaaatcacctcccaccaggtccttcccccaacattggggattacaattcaacatgagattggggtggggacagagagccaaaccatatcacatgtactctaaagtaaagaataaattggcttgtccagaaatactaaagagaagtttaattacattttctaatttgatgaaagttaattgctctctgagttcattttggctatatttgttgagcatattttcttcagctttaagaagagtatagaaaatttacaaggacctgaaaacttataatatatatacctattatagatgaggtttttcccatttgagggagtgtcctggtgtgtgttgattccagggaaaggaaccatgtatattaaaatttactatgtattcaaccgccacaaacttaattggtttagataatatctgttttacctctactttgttttacataaccacagtagtgctcacctgacctataagggttagaccctaattggttaccctaattagttattttcctaaaaataaaataagatagtgtctttatggccaggtgtggtggcttacacctgtaatcccagcacttccggaggccgaggcaggtggatcacaaggtcaggagatcaagaccatcctgggtaacacagtgaaaccccgtctctactgaaaatacaaaaaaattggctgagtgtggtggcggatgcctgtagtcccagctactcgggaggctgaggccggagaatggcgtgaacccaggaggcagagcttgcgacagagtgagactccatctcaaaaaaaaaaaaaaaaaaaaaagacagtgtctttacttagtcccttttttcatccacatattgataagcagagatttatgaagaatatcagtgtttagtgctctttactgttgagtttataggtaatattccactttctccaaagaatctgaattacattctctcttatttcgagaaatagaaacttttcccaactttttatctggtgaaaattaggctaaaaccgtttatttcagcatatttctgaccttaccattgcttaatgggaaagaatttcacagttttttgttttttgttttttttctgcatgattttcctctgatctttctcttacagtaagaagagtagaagtgtgtccccagagtgtttttaagcaggttagggtttatcataattgaaaggaattggtatcttagctctttagaatttctacrttgccacttttttctagggaaagctcaacggcctaaagtaatatttattcagttcatttggcagttgaagtaaaatgtgtgtgtgtgtgtgtgtgtgtgtgtgtgtgtgtgtgtgtktgaaaagtgtgcaggaagactcagctttttgaatgaccagtgccatcacccacagttcagtaaagcccagcacattatgttaagatttaaggaatctacaaattggcttaatagatcagtcctgtgttcattagaacaattcagtactcttgccagttcataggcccattatctggccaattataggccaaatggtcacttagtttgagtatatatagtaatctagtatctccgttcacttgcgtcccatccccccaaatacatatttaatttttttttttttttttgagaccgagtctcactctgttgctcaggctggagtgcagtggcatgatcttggctcactgcaacctccacgttcagggttcaagcaattgttgtgcctcagcctcccaagtagctgggactacaggggtgtgtcaccacacccagctaatttttttgtatttttagtagagacggggtttcaccatgttgccctgaccagtctcaaactcctgggctcaagcagtccacctgcctcggcctcccaaagtgctagaattataagggtgagccactatgcccagcctagtaattcttaatggcctggaagcttttccaaatatctgtaacaaaggtctttaatctagggtcctttggataccataatgagcctttagagggaccaagaacctactaaaattacatgaagacttttgtgttcagctgtgtgtgtgtgtgtgtgtgtgtgtgtgtgtgtgtgtgtgtacttaaggtctggtcccatagctttcatcagatgcttagagatccaagacctggcatatttacagtcatggcccaaactgaagatccacatatacttcatccactttaataccaaatttattgcgacccttcactcagtcttacgtacttgtacatagaactcagtctacttatttttgttctatttaagtgttctaacctgtcatcactattaaatagtggaatttgaattttttttgttttttaaacaaatttgtagggggcagattctcttttcttgggtttttctttcaacttagtaaggccttggcataatgaatcgcacatttatagatgtaaaaattacttaactatgaaagcatgcagtggggtcaagttctccagcacatagcggacttggaaatttaagccaaaaagacagttttggtaatttggctactccagttacatgttttaactccttgaggttgtatggtttatttcacattggcatggttttgcaacattctgcaaattatgtttagtttatgatagtatccaaacacataaaagtagtgtaaatgttttaacattttttgctcagttaatgtgaatttggcaggaaatactgcgataatttaggactgctccgttttcagtcaagatctgaaataaaatgttcaattcctaaatggaaatttaagatgtttgttttaaagctaggagtaatattttttttatttacatgaactactcagctaaaatcattacatatgaaatagaagtattttcttcacattttttttatgtgcagtaagattatactgaagaaacccatttaaaagtttcattctgggatctacagtttatatacaggtactataaaatatttaagaatttgggaaataatatagcatatttaaatacatttagcagtatttgttttgttggtgagtcttaaaacttaataaattactgttagtattgtttagtaaataaagaaagggatgttgctttttaaatttttagaggacctgtatattttcaacctgggggtgcagggtagtttgttttgcattaatgcattttctcccttaatgttctttctgcaggataacttcaaactaatgtgtactaatgccatgatttacaataaaccagagaccatttattataaagctgcaaagaagctgttgcactcaggaatgaaaattcttagccaggtaaaggaaactctttgtcataaataatagttattaaaatctgtgtcgctgtttgttggccatagtaatacagatacaatacagtattgattttattttattagcaggttatattatattaaataaagtagaaaatactaaatgaaaaaaattttaataaagagaagaaaattaagacaggaaaattcttacttggaatcaatacaaataaatattggcattcacttgtaattatctcttaagacataaaacatcagcttgaaacatcagcctgaattccaggataagactggctgaattgtgagaactctgaagaggaaagctctctgtttgcatttgtaggggtggaatctaatgttggtcagtcctgtcagaagcacagaatttctagtaagaaaatacagtcatgcgctgcataatactgtatatacagactgcatatacagtggtggttccataagattgtaatactgtatttttactgtacttttgttatatttaaatgcacacatacttagcattgtgttacagctgtctgcagtattcagtatggtaacatgctgtataggttcctagcctaggagcagtaggctatatcatttagccaggtgtctrataggctataccatctargtttgtgtgagtgtactcattgatggtcacacaacaaaattgcctaacagtacatttctcagaacgcgtcccttcattaagctacatgtgactatatacaaatgagagaaaatttgaaactgtctcaaaaccacctctccacaacagcagactcttccttaaagggtaagaattagtgcatagtaagtcatttgaggtcagagaagtgtgtgcgtaggcacagacacatcatcatcaaactgcaggaaagagcgtaaacatgagatattatacacagtggcaaaaaattactagtgtccccaggacgacagttgataaaaggctttgaagggtaagctgagatgatcactgtgcatccgctggagaaaataactcgcaagataagccatatcttttgaggtttttctcaccactctgagtgggagaaacctatgtaagagactactttagggaacgaatcaagggtgatcctggcaccataccataccatggcaggcaggcagaagagagttttcattttagctctcttccactaacttgtggactttgggcaagacattaactaccctgggactyagtgttctcatccctaaagaagggtttagtctgtggtctccaagatgatttctagcattactgttctgattctagataagaggtagagtagagaggatactatgaaaaagaaccacaagayaggacagggattttgcaaagaagaaatgagtgggtataagacactggtagaaggagaaaggaatcagagtccagagcttgagctcacattcaggggagttaaaggatgataaaaatgagtcgtgcatctgcatgtggtttttcgatttttatggtgattcatttttctgtattacagttttacatttaaagaaatgccttggtgtgcagatgtctgaktgtctgtatgcttggctgagagattcttggattcacttaactagagaaagaaaaacatgtttggattgttgattattcttgcgctcctaatatttagacaactttggttcccaccctttcctaaagacttgggaaactaatggaagccagttacccatctttgacaacattcgcagaggaaagaggaatatgaaatgtttacccattctttgcaggaagactctcagaatctagaaccatgccatattccaggtttaaagacatggaaatgcttcttgttaatgtatttgaagtaaaaatgcatttgtcaaatgcagcctttagtcactccaaaatatgtacattgaattgggtggtgggagcctaatttttaatgacctttgatttaccacttccttaagtaatgtagttaatacaacaagcaaaagattccattatctcttgaattttactggcgtgtggaatggttgaaagcacagaaaataaaattttcttcactttcccttccctctctccctctttctttctctctgttgtcttcctttttttcagatcttttgctgttgaggagccccacccatcctgtgttattagcttcctgttgactgttctctccaccctacaggggaggggtcgtcacaacagtgatttttaaacgtttaaatttagaccttttgagttaactcttctaatagtttgtgctccaagagagcccagcacacccttccgtgaatggtgtcttttcaaagataactgtttttgaatgttcattgaaaaaattgtagagtagtcactcatcattttttcagttacactcaaataacaactattagtagacgtgttatttttataaagaatgaacagatgaggccaggaacagtggctcatgcctgtaatcccaacactttgggaggctgaggtgggcggatcatctgaggtcaggagtttgagaccagcatgaccaacatggaaaaaccccgtctctactaaaaatacaaaattagttgggcgtggtggtgcatgcctgtaattccagctactcaggaggctgaggcaggagaatcgcttgaacctgggaggtggaggttgtggtgagccaagatcacgccactgcactccagcctgggcaacaagagggaaactccgtctcaaaaaaaaaaaaaaaaaaaagaagaatgaacagcatgaagagtaactttttatctcctaaataaatacttgagtaaaatgctgcattgtagtacaaacaaagtagtacaaacaatactatttgtagcatagtggctttgaaatcagaccaatcaaggttcaagtcctagctctaccctttggaagctgtgtgactttagcccaggtaacctttgtcagcctttttcctgtcctgtaaagtggggataataatagtacttacctcatggagttgtgtctggcacatgggtaagcactaagtaaatgttagctatattattagcaaagaaccagccctgttagccatttaatattgtaaaattgaagatcaataatgtgctgacttggaggcattttaattaccaaaaaaagaaaaagacattgctttcaaaggaaaattaaacttcactctttcctgggacttgtttcaaggtttagaaactttctstaattgaatttattttgtgcatgtcgtgttttttaaaaccccaaagcattcttaatgtaagttctgctttataaaattctagagtggaaataaaattattactgagaacttacagaaataattaaactcactaatatttttaatgtagcaaaataaaacrtgtttttaaaaatcaaataagattgctttttgttgttgtttgtgttttttgttttttgttttgtttttttgagacggagtctcactctgtcacccaggctggagtgcagtggcgcaatctcggctcactgcaaacctctgcctcccgggttcaagcgattctaatgggttagctttttaagtgatactattgattttgtcaaggattcagagaaactttcaaacactaatgtaaattagtatgtaaattggtataccttttctggaaagcagtaattatcaaaagtctcaaaaatattcattccctttgactttgtttcctttctaagagtttatcctaaagagatactggttcctagagagatttatttataatgatgttgatggtacttttatttataatagtggaaacatggaaatctaaatgttcaatcataggccattaattaaatcatggtgtagacgtgggattaaatagttattaaaatattttaaatatctattgatatggagaggaaatgcttataatttattaactgaaaaaatgctttttactaaatattcagtataattccaatttgctgggttatgtaatggttggaaaagtactggaataataaacttgttaacactgttcttctctggatgakacattargaggatttttattttctcctctacccatatttttatttgtccacaataaaatagatcgctttaatggttttaagattactttaaaagtccagtaaaaaacagcaagaactgtgttggtgaggatstcaccatctgcactactaatagagcatggtgtgatgaggaaaggcccaacatgagtgacagcaagcctagtcttagttgctggtttagtgaccttaggtgagtcatttgttgttcctgggctgcgttgttcttgtttgaatggcctctggttctttctagttcttagtttatgttactccacagaagtcttccctgctgttgctgtgcagccctaaggaggttgcactctattttacccagtgataactttcagagtacaggcaaggtagtcagtagaaacaaatatgccttcttaaaatttacggagaaacctcaagccyttaactacaatgaaaatttcacagcacatcattgcagcgaaaaattaagcacatgtttcacagaatagaaacaagacttctttggttagcgaaaccattctgcactctgaggaaggaactgtgccaccaactgtcttctcctcaaggcttgttgttttcacacagagtgaaatgccagcgtcatccgtgagcacactgggctaccagaacagagagggacttcacacgctcacatgccctaggctttgatacacctaacagttcttaactgtcaaaagataagcctgtctgttaaacacaaaatgttaacacaccattaaactaaattttagtcttccaattcagtacttcaaagaatacttagtcttaattcatactttctcctctgttaaatttctgatagggcaataaagttgtaaagctttctatgaagttggaaattaaattttaagaattgaaggtgtaggcattatcatggtttccaaatacaatactctcttggtatatgattacatttaattgtttttcttccctggttaatgacaggataagtataaactcctgtggggaaaaaaatgcattactttaaaagttaatgacaaacatataataagaatattttcgaatatgtttaggaaagaattcagagcctgaagcagagcatagacttcatggctgacttgcagaaaactcgaaagcagaaagatggaacagacacctcacagagtggggaggacggaggctgctggcagagagagagagaggactctggagatgcygaagcacacgccttcaagagtcccagcaaagaaaataaaaagtaaaagatctttgggatgttaaggtcaaactgtcttcttcaagctagtaagggggaaaaatacttattcggggcctgacttgggaagaccaagtgctagtgtgtcggtggtggtggtgttttggcatgaaagtccattttgatggtgtgatacccctcttctcatatgaagcactatatgggattgtccaaacacagttcagaaagcagttctaatgtgtattcttattgaagtagttttaaaacctataaagtgtcttttgggactgatatggtcagtgagtttatttaaatagaactgtttgtttaagaaaaaatgcatagtcattacctccttccataaaggagcaaggagttcagtgggagcacaggcactgctgcgtcttaagcagatgggctgtcactgcagcgtgcccatgttttccacccaatgtcagctggtgggagcaacgctgaaccactgttccacctaggcagccacctgtgcagctgacggcagccgcatctgcccgttcacactactgggagccagccctgaccgcccagcacctcactgccaactttggggagggttgtagttagcagtttgggatttttgctgtcataatgcaaagaaagtaaactagtgacaagtttttctttgttctaagatttacacacttaagtgcttgttttaaattttaaaaatcaaactttaaaagaacaatggtatattgttctcccttcaaagtaatgtttgaggtagaactaatttttttgtaagttcccagaaaaacgtttaacacaagtaacactggwcagaaaaaggtagggaaataacatgttaggtgtgccttactgtttctgttcttaaattagagacccttaacaggtcatcaaggaagtaagtttcaatgagtgactgtagtacaaatgtctccactttagttgtattcatatttagaattcatttgaatgttttcatcttacttatctttgtttttttttttacttagtattaatgtatattttcaggaaagacaaagatatgcttgaagataagtttaaaagcaataatttagagagagagcaggagcagcttgaccgcatcgtgaaggaatctggaggaaagctgaccaggcggcttgtgaacagtcaggtgattgagctttgccttttcttttctctacctactgatttggggcatctgaaacttttagtttttaaattgcttgcgtatttttaatccatatctgccatagagctcttcatcagtataatacttagcagaaaaacaattaataatggacagacaattccctacaatgggtttatcagggtgttaaatgcattttcaactcatgatattttcaacttacagtgggcgtgttggatgtaactccattgtaagttgaggaccatctgtgttcatttgtaaagtacatgattaatcttaccctcttttactggatttttaaaaaatgaagttataatatgttctaaaattggaacatgaactacagaatttaaatttacaggaaaacatttgtattctggtcttttgaaatcatattgtttagcaygttggttttatttaattttagattcaaggggtacatacaccattttgttacgtgggtatattgcatgatgctgagatttgagcttctcttgaacccatcacccaaatagtgaacatagtacccagtaggaagtttctgaacccttgcccccttccctccctgcccccttttagcatttccagtgtctgttcttcccatctttktgtctgtgtgcaccagtatttagctcctacttttaagtgagaacatggcaatatttgtttttctgtttctgcattaatttgtttaggatagtggcctccgtcttcatccatgtcgttgcaggggacatgatttgattcttttttatggctgtgtagtattccatggtgtgtgtgtgtaccgcattttctttacctagtcctttgttggtgggcacctaggttgattctgtgtctttgttgtgcacagtgctgcagtaaacatacaaatgcatgtgtcttttgagtaaaatgatttattttcctttggtacatacctaggattgctgggtcaaattgtaattctatttttagttctttgggaaatctccaaactgctttccacaggagctgaactaatttacattctcaccaacagtgagcattcccttttctccacaaccttgccagcatctcttattttttgagtttttagtaatgatataatatggtatcttattgtggttttgatttgcatttctccaatgattagtgatgctgagcattttctcatatgtttgttggctgcttgtatgtcttcttttgagtggtgtctgttcatgtcctttgcctagtttttaatggggctatttgtttgtttcttgttgatttaagttccttatagatactgggtattagtcctttattggatgcgtagttagtcctttattggatgcgtagttcacacatattttctcccgttctgcgggatgtttctttactctgttgatagtttctttggctgttcagaagctctgtagtttaattaggtcccacttgtgaatttttgtttttgtcacttttgcttttgagaacatagaaaattctttgccgaggcccatgtccagaagagtatttccaaggttttattctaggatttttataatttgaggtcgtacatttaagtgtttaatccatttggagttaatgtttgtatattgtgagagataggagttcagtttcattcttctgcacatggttagccagttttcttagygccatttattgagtggtctttctactttgtttatttttgtcgactttgtcaaagatcagtcggttgtatgtatgtggctttatttctgggttctctattctgttccattggtctgtgagttattttgtttatttttatcagtatcatgctgttttggttattgtagccttgtagttttatgggagcttttgtttggtttggtttgattttgagacagggtgtcactctgtcgcccaggctggagtgtgcagtggcacaatcttggctcactacagcctccaccttgggagctcaagcaattctcctgcctcagccttccaagtggctgaaagtacaggtgcgtgacaccatgtccggctaatttttgtattttttgtagaaatgaggtttcaccatattgcccaggcaggtctcaaactcctgaactcaagcaatccacccaactcagcctcccaaagtgctaggattacagacatgagccaccgtgcccagcctgtagtatagtttgaaattgggtaatgtgatgcctctgactttgttctttttgcttagaattgctttggcacttcaggctcctttttggttccatgtgaattttagaatagttttttctgaatctgtgaagaatgatgttgggaatttgataggaatagcattgaatctgtagattgctttagacagtatggacrttttaacaatattgattattccatgagcatgggatgtttttccatttgtgtcatatatgatttctttcagcagtgttttttagttcttctagagatctttcacctctttacatatattcttaggtattttattttttctgtggctgttgtgaataggattgcattcttgaattggtgctcagcttgaacattattggtttatagaaatgctactgatttttgtaaattgatattgtatctttaccaaaaatacatttttctttatatactatgtatatagaattgtttctcttatatctagtaattttaataacatwttaactattttaacttttagtaaccctaatttcaagtgaaaaccctaagattacttaatataacatgactttaagatttaaaattactgaagagaattttgaaactagttttatttaccaaggattactaaagttgtgtgaactaaagggcatttgagcgaaattctgttttttttaaataaaataattgatttaagcacttacttttctttggtcagttgattagagctctttcgtatattttggtagtgatacatcacatacacatgacacatatatagacatacaaacacacagaagcagatcttctagatttataagattcttcatttgccagttttcactttctctccccctcttagactatcagtcatttccaaagtcataacaaagtagacgaaacaaggtagaaaatttacatctcagaggcacagaagctatacctaaacaccattacctgaaaacaagttgattgccagaaggaggttgcagtgagccaagattgcacctytgcactytagcctgggcaacagagcgagactctgtctcaaaaaaaaaaaaaaaaaaaaagtgtcctcttttcaacttaacttgtttccttattagattactggtttcaagagggagccctttaaggaacagggccaagaaagcatgcagtttttagggcctaatacttactggaaggcaggttttagatcaccccaaatcactgaatcctgggtccccagaaagctgaagagatcaggtaatacaatacagaaaagagcagagttttagatctgagaggaatctgtctgcttacaactcttggtattctgtgaggaaaaacagagattcttcccaaaaagaggagtctttgatgccttttctgtttactcaagagatcacaagctgccagaaattcctttaggtccctaatatggtatcgagggtggcaagaggaaggggggacagccaaacagaactcagttgactgagacattttacagagccattacagcggcgttaaaacagtagacatatgtgtgtatatgtatagcccaaatagcagttttaactgagccgacatttgaatatagagctcttttttaaaaaatatttttcctaattgtaattcctactcaggttgttttacttttgcttctgctgctagctgggctcctgttgccaaacaagcagcccacaaaagtggccatcttgctgcagtggctgccggctgcccttcctgaccacagtgcgatggatggctctcagccgacaatcactccaaatacactagtgttttcagggcgtccttgtactcacgcacaggcatctaaaacatgagccataccactcaacgaggaagtggctgccacctgggatttcctccacggatgcttccttccctttgcccatttcttggtccctccactcctgactagctcaccacatgttccagcttaaatgtttccagaaagaaacatttaacagggacttaggaacagaagccatgtcttgggtggcagtgagatggtgggtccctgtcacgttggttttaaagccaagtaggtgtatacatgcctttaagcaagccactgccctcacctggtccatagtagccttttttgatagactggggaggactaggtggccttaaggacccacagagctcttagaattctgagattttcttcacctccatttctctagcccatcatcccctgtgtgaaagtcagtatcttgagtttaatgattagccacctgtaataytagtttggttaaaataagcctttgtggtttgctgcatatatgaatatggtacaggctgagcatccctaatccagaaattcgaaatctgaaattctccaaaatctgaaattttttgagctccgacatgatgacataagtggaaacttccacacctgacctcatgtgacgggtgcacaaaattatttattgtataaaattattttctggctgtatctgtaaagtgtatatgaaacataaatgaattttatgttccatccctaagatatctcattatgtatatgtaaatattccaaaatctgggaaaatctgcaatccacaacactctggtatcaagcatttcggataaaggatactcagcctgtttgtataaaacacttcattccatctgaatactttgggtcattgcagtgcgaatttgaaagaagaaaaccagatggaacaacgacgttgggacttctccatcctgtggatcccattgtaggaggtaggatcagagtaaaactgtgcatgaacttgatgctatttggcagagaacagtaacctgggttaacattttaaagcaacaagcttgaatattgatcagtctgtgtcattatgcacaaaggatctagctagacatcatgtatttcatggtaacagctagcctaactttcacttcatcttgaaataggtacagtrtatcaagttttccttaaaattcaaagtccctgaaatattttaaacccgccattaacaaagccataacttttagatagtaattcctagccctggttttaagagactttagtatagacactcagtttagaggtatctcatacacacagaatatgatattataaatttaactgtttatttcagggaataaaatgaatgtatatgccacatagtgccttaataataatggaaggtgtatgcttagtgacatcgtatctttcactatagtcagtagaaagtttgtaaagattgggaatctttagaacctcagtcatatttttgttttctcaaatgatgttttaatggaaatcatataggttatattttgaaattcgatgtcacaattagaactttttgtcactggtctgaggagagaatcatgtattgagatatgcaaatgtgagaatgttaatttattcaacaaatatttattttcatactgtcataatgaaagaagtaattggaaatacgaaaatgaataatgacagaatttttacccttaaggaaacagtctctgatgtttattgtttgctgtgagcagggtgctgtcttaggagctagctgtgtagtagagaacaaaacagagagagaggagtcccttttccttgttctatggagtcgggggaagaggactcacataaagagaagtctgtccttaatcagtactatgcaggtgtgtgtctataatgaataaatactacaaaggaaaagaacagctatgatcataatagaagataccaacctagtgtttgggggtcagggaaggcatccttaaggagatgatgtttaggttgagtaagggatgagagaacagcagttgtgaaaaccttgaagcagggaagagcatttgaagatggaaagaaggggactatgaatgttctctaaaggaggagaacagtaatagaagaaaaggagctagtgctgttttcaaaacaaaactcagtttctactttgatgcagacaagtagaattttgtatgatcataggtcaaagaatgccacaggattgagaacattgctctttctactatagctgtggtgaacatttggtgttaggagatgcagctaactgatgtaggtgacaccttaagatctgctgctttctgtgaagccgagtgtggtctctgtccttgctctggtttcctgggtttccagtttctgagacgtaatcaaatgtggccaaagctgacttggctccccgtgtgcacagctccctctgtaggccactttcatggtttaaggtagaagacacccctgttcatcttctcagcttcattgtctggtacccgtacctattaggaaaccaaattccagactgttggctgaggagagaagatctgatttagatgttcagttgcttaacagtgccttcaccacactggtcactgatggcagtagcctccgttgaaggctgatcatgtgacacaaactcagactcttcttcaggagagcagatgtccctctgttagatactgtgggagaccacatcttctcctgccagcatcttttgcagtcccctcaggtgcccatacgtgacatttctctatgtcacgtattcccagcttcatcacagggattcattcctggctaatgcctgttctcgttgcactaaaagtatgcctttcatagatactcatttatccttcatgtgttagtagcccttttgtctttaatgcaggtgttttccctcagtcttttactaacctttgtactggttaactttcatcttaacattaaaagtcccagcttttaaaagtttttgtggcttttgtttttaataaaaattaattttttaagtgaagtgtacatgattataaagaattccaggaagcaggagagtgtaatgaacaggtctgagttttggtcctggctatagttctgcctttctgagctttgattttcttataaaagtggatgtagtaagcgcttcccagcctccttcacggtcatgcagatgacatgcagtggtttgtgcggagtcactcggcagagggccccgtgggtcatggccatgtaggcctccttcactgtgctctgttttatgttgtaragccaggctactgccctgtgagactgggaatgacaactggaagacttcagtctggagtgaatactttgcaggggttcaaagaggataaaaggaacaaagtcactccaggtgaggctcctgcataggagtcattttttctcttctctgttttgggatattagggaaaggaagcacgattatgctttattcactaggtgggcaccagtatcttggtggtatttttgcaacattaattagctattttattaacttcagaagagactggaaaattgggtattagtattcaaaatgaattttgttctttcttgttcctctccctctcccttgtagggaagaattcacttgagttgtaactttacaagtacctgtttgagagaaaatatcttagatttgcaaaccagycaatgaagtagtaaagttaggagagaataaataatcttttggtaaaacaaaatagattgacatgcaagttaaagaatagtgttacagtatttgattttttcaacagtgttatatttgaattatgggccctacagttcttatgcaccgcattatgactccacatttgcaaatatcagcaaggatgattctgatttaatctattcaacctatggggaagactctgatcttccaagtgatttcaggtgagtttccagttaatattctgattacatttgtttaaaaacattaaagtacatacatgatttgtggatagactgacaaagctggccgagtagtaaaaaaaaatgtgctcagtaatttttttttaagctgacaataatggattcatagttactattatcctttagtggagagagagagcatgtctccctgatagtagcatctgcagtattttaatttttwaaaaatatatttttaaagagactgtacctcagccagtactaaagtgtaggaacttgttacttcaaaacgttgatgtgccatctgctgtcttataacatgttgtgtgtcagtgagttatggtccaaacttgatcagtttgggaacctacagtgcattttccccaagaaaggaggcaggataggatggctctattccataggcagcccacataaaagcctttttgaccaatcacatgccaggtagaccattgcagttaaactcaaccattctttattgcatgtttctgtgggaagatcatctctgtgttcctgtttaggatgctgagcagtttggatcccatcaacataatgagatccatcctgacttagcaggattctggctcaggatgggacactgagcttgggttatggcagtagtttactggatrttattccttcttagcagtagtaccttgctaattttcattacatataagaaattaaccctgtagattcaccagtcccctgcttttctsacaaagagggaatctgttcacttttacattagtaagtgtggtttggttgttgttgtttttacaaggtagaggtccttaagtccgaarttgactgtggtttcagatcaagccatttaatcttttagacctcaccagcctgaatgaattctttctggatcatgcatctatgcattccacaaatagggattgcacaggggaacaacactggcaaaggcccatgccctcctgtcaaatgatgacaagtgctttggagaaaggtaaagcagcagagaaggagagagtagtgctggggctacgagagggatgcacttttaaatcggtcagataagtctggtacaaaagggaaagttgagcaaaaactgaaggaggtgaggaagcaagcaaggctgctacctgaaagaacgttccaggcagtgcaggagctgtgcagagggcctgagtgggagccttcccaacatacttgagaacagcaggaagaagcagaagagtgcaggcacatggccagggagggcgttgatgagagtgggtctttataagcacttggaatttcattctcagtgagatggaagttactggtggattgcgagcagaagagtgacccggtccagattatgatgtttaaaggatcaccctggctactcttggagaatagactgtagagaggcaagggcagaagtagggagatgagaaatggaccgggggagtagcaggtgaggttctgggaagggctcagtcatcagccagtaggatttctttactgattgaagtgggatgtgagagagagatgccgaggcttactccagggtttgcacactgagcctggaagactgcagttgctatttaccgagaagggggaagctttggaacattacttggggggaagatctagcatttcaattttggatattttaagcttgagatgtctgttagacttccatgtggagcaccaaagggtgtggtccaaactggaggtgtaacttttgagagttttttgatcccatatgaaagtcctgaggtgaaggtgatcactgcagacaggaagtgagggggcggggagcagaagatccagggactgagcctgcacccgtcactgaggtttcatttttctttggaacgttttatttttactgtgttcttcatattatctcatgataatgttattgctaattaatatgtagataccatgttgtgtctaggcagaaatttgatgtcatgatgtataaccgaggacatctagtggaaacagttggctctgatgggaggataaagccagtggaggtgatttatgtgagactttcctaactgtctcttgcagcatccatgagtttttggccacgtgccaagattatccgtatgtcatggcagatagtttactggatgttttaacaaaaggagggcattccaggaccctacaagagatggagatggtaagaacactgctaatgaaaacagggtaatttattatcgactctcaagcattagtcattcagtataatgaaaccatgggattaacaagtatgacagctgaactctgtggccctgaaagacagcccagcccggctggaggccacgggtggacaataaacggaaaggagtaatttagctaccaggatctgtgagggcctgagcgttatccttatctcctcatcttgggaatgtaggactcaaaaatggggtttacaactcagaagtcagtgggcattgtgtcctctaacaaaaaaggaaagttttgctcactggcctgaaactaagttggctaaaatgatagggaatggcttttcctcgtgcagtaatagcacatcgggaggaacctcaagttaaaaagtaaaaagcttcctcattgctattttattaacatttgtaagctatctctagttcagttggagatagttggtaatctggaatcattcagagttttggcttaaggattagaaccagaaaatgttcctactgatacagaagagagttgatctccagaacgttcctgtcacaatagttagaggaaccctgtgtcttttggaggtctaactcttaatggtgactgtgactgtagtgcctggtaccctgctcacaactgcacatatggttgctgggtgacctgtcagcagagctgaggttagtgcctcggtcaggcccaacgatgactgctgtaaaatatccgcacttggactgctttcatcacatgacctaaaaaatgaaattttacatcaatttaaaaaatacatatttttttaccatatcctcatcaattaatctgaatgaattaatagtctaacgaaaattgaatatttttcatttggtgaatatggcaatgtgtttcaaaatgtcaagtgtctttgtccttcaatatagcagttcctcttctcagaatttattctagaaaaaatacaaaagttacatataaggttacattgtttataatttttagaaattgggaattggttaaataactcacaacctttcaaagaaagatgacatcattgattgatgtccatgatatatttgtctcttgttcctgggtgcattagctctgaagagcaagattgggaagctttcacattctctgtagcatttgattattttacagtaatcctctgctatctgagaatattgctgtgttcatgcacagtaatccctagaactccttcctgtcttctcgtcagggatttttctgataaaaacagataccatttatttacatatttataagttatttaccaaataccttcttaaacatgtatatagcttttgatcaggcatggaaataacatcaccagtaataagtaccccagctcacagaatcctctcaaaatgctaataattatatttagtcattttggcctgaaaaattatattccagtagtccatatttgtattcattttctcttgccaagaaactcctgacagttttctcttttccttgatattcgccttcatgtgttttcctaaaaagctgtttttcttcatccttatagtcattgcctgaagatgaaggccatactaggacacttgacacagcaaaagaaatggaggtgattttattttacactttacaagaaatatttaaatggaaaataaggggagtaagagaagtcttgagaatgggaaggcccattgggtaagaaggaaaaaggttagtgagtagagttgtgagggcctagctgaaatggcaaaccataaatgcatatcagtgccaagttgcacaattatacagtttctcccccacaagtttttagcccatatgtaggtagagaaatcaggtggatcaatggagttagagttggagagccataccatagtataaatggaaccattagcttttgattgcttaatatctgggttgatctattcctaaaaagtaatgttgaggttatggaaacccctgagtcttaatgattctgaaaataaaaactccatctttttttttttttttttttttttttttttgagatggagtcccgctctgttgcccaggctggagtgcagtggcacaatctcggctcactacaacctccgcctcctgggttcaagcagttctcttgcctctgcctcccgagtagctgtgattacaggtgcatgccaccatgcccagctaaattttttttttgtatttttagtagagacagggtttcactatgttggccaggctggtttcaaactcctaatgtcaggtgatccgcccacctcggcctcccgaagtcctgggattacaggcatgagccactgcgccaggccaactccatcctttttaagattttgtttctctcatgcaatactgacagcctagtttggaggcctggagaagacccgggaagtgtatcaataggaatgcaagtatacggactagatggactgaaatatgaaatagtctttgaatctcgaaaacacaaggcattgtcatcaccaaaagctcttcacagtttaagcaacaacaaggctctcattacttcatctttagaatagttgccatactaaacaaatgatataaattgtataagatacatcattacatttcacagaagtatggatttattgaatacctgtttttgccaagatttgggaatagcattttaaaagggtgttctggaaattcattttctgtaagcatcaaaattaggactccatagtaaataggtagaataactttgcctgtaaatacatgccatctgagtaatttctagttaacactgctgtggcttagcaagcgccagtaattgcctgtttttccttttgaagcagattacagaagtagagccaccagggcgtttggactccagtactcaagacaggctcatagcgctgaaagcagtaacaaattttggcgttccagttgaagtttttgactctgaaggtaagtgtctccagagggtttgattgaaacactgcatgatgtaggcagtcaagatttcatgtctcataagtacagattaacatagccattcaccacaggaagatcttggcttaccaagttaaatgaatgggtatggcgtgttgatgtcatttcaagcggattactcttttgaagggagaaggctaaccaataattagcaaagccctagagcctaggattcggtttactgcacaagatcaaacagaagtgtgtctgttttcttaccacacagaagctgaaatattccagaagaaacttgatgagaccaccagattgctcagggaactccaggaagcccagaatgaacgtttgagcaccagaccccctccgaacatgatctgtctcttgggtccctcatacagagaaatgcatcttggtatgttttgcctcccataagaggagagtcacgggatgcttcaaagaaaaaacttcttgagtacagtggtgatgccactatagagtaatgctgatgtgaatcccagggacagtttttttgttttgttttctttgcatgtgtacatttactgttctttgggatgcctctatctaaaggaaccatgctttagtatctggaactttgtttttctttttagctgaacaagtgaccaataatcttaaagaacttgcacagcaagtaactccaggtgatatcgtaagcacgtatggagttcgaaaagcaatggggatttccattccttcccccgtcatggaaaacaactttgtggatttgacagaaggtacgtgccctgttttctctgggaaagcagaaagctatggtgactatagtcatccctcagtgtctgcccgagattggtatcaggaccycggatttggtatttaccccacaaagatagcaaaatctgtagatgctcaagtccctaacataaaaggtatttgcctataccctacacacaacctccagtatacttcaaatcatctctacttatatacttcatagaatgtagttaatagactgtattttttatatttttttcattgtttgttstatttttttaattgggttttttccccaaatatttttaattggcagttggttgaatctgcagatgtggaacccatggataagaagggtcaactgtaaaaggaacatttatctgtttttaatgtataaactactcttagttttctttttatcttgtctaaagaattaataaagatttcctgtgtgcagaagagccacaatgatcacctgataatgcgcgtagtcttcagccttggatgtggtgaagaagggctctcagcagttatgcttctggatggcagcttgactttcatgtcccctttttaattaaaaggtaaaaacaatgttgaattaagtgatgtctttttctttcagacactgaagaacctaaaaagacggatgttgctgagtgtggacctggtggaagttgaggctgcctggtatttgattatatattatgtacatactttttcattcttaacttagaaatgcttttcagaagatattaaatatttgtaaattgtgtttttaattaaactttggaacagcgaatttggatgttccagaggttggacttgtattaggtaataaagctggacctgggactcgtgaggaaggaatgtgcttggggctgttgccatacctgtgcagcattctttcaaaatagtgccttccaatgcttcttccttatgtcccacagacaggatcatcactaagaagcgttcttaaaacggccccatccagtgagattttccgttatacgaacatacttgaaataattttagaatttactactgtggttctgcccctgcatacccagtgggaatgatgcccttgtatgggtaattaggcacctcccacccacccctgacaaaagcacactgggagttttatagcactgtcacatggctagtgttcttttttggttttttccgttttttaaagaaagaggagttacttagtactatagcaaagtaataagccaaataagataaactaagtcatccttgaatagatcagggaattaccagattaccaaaaggtgacatttctactttacttactgtttatctgaaatacaaaggtcaagtacccaaggagttgaactctaagtaggagaccacaagattcatggcccccttttatcagcaagctgagataaatggtgattttgctgaatcggtatagaacctgttatacacaagggaaaaaaatcaggatggagatagatagatagatagatagccttgttcagtgaacaaattaagtttgaaggcccttatacaatccttctataaatcacccaggcaggaagccatttgatttctattattttcctgactttgaaaattaattagtatttaggaagaacaaatagggtaaaggaaaattaattccctcaaaagacttaaaatcttatgctaaaagagtcaaattttcaagttgtttgagtctacttttaatctctagtgagttcatgaggaccacgaaaataaaataccttcagatatttgagtttttcaaattgctaatttaatgtataaaaagcagctaaacactggtactttataaaaatgaaacagcattttgaaacaaatgttacagatctataaatattcattatatagaataaaccctagttacttgcatgcaccacctcaaatcatatttctttacactgacctattatatacacaaagtatacagtggttaatgatcttctcttctgtttgtttgtttgtttgtttgttaggaaatttcctcaataagccagaaaaccttaggtattattttcacaaaagttaactcaggagaaattgtaaggaagtccttgacccatggagaaggtcactgtttgtttgtttgttagatacgtgtgtctgtcataaaacaaaatgacaccagtaattacttggtaatttaaaaacaagttcataaaaagaaaatacctgcaggtaatttttatggtcagttatattctataacctgaacactgaaaactaaaaacttytacttacaaactattattatctgagcacagcacagtgctttgctttaattggaaataaaaatgcatgagtgagtggtagtcagttatttgttaaactcccaactggggtttctgttgttactgaagaaaaaaacaaatattccaagagtacaaatatgctgacctcagagaggcccagtgcactaatgtgtttctatgttatattagcaacagaaaccttcctgacttgccaggagagcccccgccgggcagccctggtcactgctagatcttgagagcacagatttcagtatagtattcatgtgaaaccagcccttcatgtaaaaagttttggtgtgtaaaaaaggcaacttaagcgaggctaattgcccttaccagcattgttgccatgaaattcctttatacagcaagttcttctattcatactgattccacttatgtgcagcacatgagagctgccactagtctacccagcacctttgtgcaaattagaatacacctgcccttcctcgggctgataaagccacacgacacagcacaggcagacaggttcaattttcgttccctccaccgccacccccgcacttagctgtactcttaatttgcagcccggggcaactcatcccaggaccccaacaagtctggtcagtcacccaatctgcmaccctgtataatcatcttgtaaaggctcctgtatgcaagactttgtgtagaactttacggggttcatggggacacctagctaagaatccctgctatgtagggaaactgagtgcattagaaatcctggcgatgctctggtgatgaggccaccggttaagtcttccggttatgaagtccattcagaaaaagtcacgggcagtttggtcatttctcaccctgttgttacagttaggttgactttcaattccttgggaagttgaagcacagtaagacacatccccaaaacctggctttttgcatttgccttgactcacgcagtttcagagcaagaacggctcagcatttgtgagggggcgggcttcccagatccaggagcctctgcatgcacccatgcggagtagatccttctagttttgaagctctccagagttagctgtgaagactaaaggaaagaagagatgcactcacaggttgtccaagttgtctctaaacagactccattcctttctggtaagaaaagtaagatacagttgaaggacggcaggggagaaygcaaagatgtgtgagtaatcaaggaagaggtgaaaggccgcaccttactttcaaagcacctctctccagaatgcttgcctcacaagctgcctcattcaaaggcaaggctctgctgctcccygccttcttgctgtgaccacattcctcaggactctatccccacagccagctgaccccataagctgatgctagacagtagtcctccttacatgtcagtggttaaaaaggcagagcatacactggagggaagagatttatgtctagtgtctgaaaagtcattcaaaaggataaaaaccccattaatgtattcatttaaaacaaacatgccagacaaggcaaaaagtaacagtgttaattgtggtgtttttctctctacctgtttgaaaccgtttacagatgtaaaacacccctttcagcttcatttaccagaatgcctctgtgagaaatgctgtcattgccaggcccaccagggagagggagtctccaatccgtgctagacagctcagcttactcccccttggtgtctagaaaaacagacctcacttgtgcgtgcccacaggccactgaggtggaagtctgttttcatcatgtgctaaagttgcctgcctggcacctcagggaacaaagatctcaaagtcagccccgaaccagtgaacattctccagctggcctggaaactgttacagaccaggcacagagcttctggcctcccctgcgcattatggctcagtggctgcttcgagccagaatctggtgcatgtgtctgagaaatcctccagtgcaggtccaaagaagccaacatgcacagccatctgcatgcctttgggattggcgtggggcggagagtcttctcctgggcttgcttcagggaaggagactggcttcccggccttttcggaatccagcaggagccctcagttcagccccagcccctgaaacttggcagtgtccgtacagacaaagtaagtcctcagctcgcctttgcctttgacgttgatcaggccacggcattcacaagagtacccgaggccctggaggatggtgcaggtctcctcggtaacctgaaaaggaagagagacctgttgtcttcagaggcgggaagaacacctgtcatggtagggacagatagagactgcccaggcatgcagtctgccttccctggagagtgtgatagctagaaccatggctgctgggtgagacagcagctcttaagtccaagtcccctcacctctggggaagatcttttccccttagtcaactgcttccccaataggtctttacctggattttcccaagttctccagtgctttccattcggctggccacattgacagtgtttccccagatgtcatactgaggttttcgggccccaatcactccagcaatcacaggcccatggtttatgcctgaagatgatgtttacagttacccaagcgtgcaggcaaagcctcaagcttctgcccttagaggaggccagagaatccataccccagcacaggatgcggggacaaaacaactagagtgaaggctgggttgcttcccagagtcactgcgttgcagtcgggcttggggtatgaggagggcattccccggccagctctttttcagactcagaagtctgggtttgatgttaacacttgtatctgctaatctctcttttaacaaagaatactttgttaaaagtattaacaaaggcctggctttgagcgcaggcccgcaactatttaggtttagtaactttgcttccttctctatattttaaggtcacctgtttacagacaataattttggttctccattttctgtagttacgtattattaaaactctcaatggtaactatatgctaactatatgcaaaacatcagaataattgtccaactgctgagcttgtcagatcagagggatttctaaaacctttcataatagatggcgaggtgcagctgtgccacacagactgggtggactggcctagaggcaggggctccccaccccgctccatcacccgggctcaccgacgcggaggcggaaggagttgaaggagtgcctgttgatgccgtccagcttactcatcagggcgatgctgaactccaccatgacaccaatgtgggcatgctgccgctccagctcctgcgggacaggctgtgggtcagatccttgcatctccagagcccccagacctagtgggccctggcgcgccactcttgttgaggatccccaccactaaaatcctggctgagccctacaagtacctgtgcccctcccccaggacgagataagggcacaccctttaagtaaggtgacaggtcacctttaagtgaggacagtcagctgaatttcacctcttgggcttgagtacctggttctcgtgccctgaggcgacgctgagccctgcagctgccatgtacgtgctgccgatggtcttgatcttctccacgccgctgaacttgggcttcagtaggagctgcaggcaagaaggaagcggtgaagcagccgccactccatagccgcagccaggctgcccctgcttctcaggaagggtgtggggttccctccacccatcgccgcctctcgcacacacgtctcatggctgccctgccagctgagcgcatgactaagcatggtgaggacatggcccttggcggctcctgctcttcctgttgtctccgtccccacactgtctccctcttcccttccatctgtgtctgcacagagcaaacacagcattatctacacaggaatgtagattctttgtctccagcaaagaattcaacccaaactgatttcctctgtttggcttggttgatagcgtgggcttagttggaaatgaagctaaggggcctgagtctaatcttagcaagctgcccatcacagagaagatgccaacgaattatttgctgcataaaacagaatgaaaaagaaatgtgtacctttatattctgtgtaatgtatgttccccccaggcgggccacgtcgttttttttttgttgttgttgttgttgtttgagacagagttgtgtactgttgcccaggctgtagtgcagtggcgtgatcccagctcactgcaaccgcctcccaggttcaagcgattctcctgcctcagcctcccaagtagctgggattacaggtgtgcgccccaagcccagcttgtaattttttgtattttcagtagagacagggtttcgccatgttggccaggctggtctcgaactcctagcctcaagtgatccacccaccttgacctcccaaagtgctgggattatagaccaccttgcccagctctgtgtcacatttttaaattgggttttaggatggcaggtgccaccgcccttccctctccagcatgggtgggggctgctgcgcaaggctgggctagaggctgtacctcgtcgaagtcggcaatgatctcattgagcaggcgtaggcactccagcccttctttgttgacatcgcactctgtgtagaacactttgaagtccggcacggaggcaaacatgacacagacgcagtcataggactgatggtaccagtcctggatgggaagaaaccggaccttacaccacttcacctcttgaggggacaggaagagtggcaaggcctcaggagcagatggcactgctgaactgcccagcccagctttcggggagtggggaggggggcgggctgcatgagtttcatctggtggctgttaccgggtgattaagaattgggtggccagggagggtcaggctcaggttggtttttgctcacagaagcaccatgggtgtttccatgtacacatggggtgagaacctctgcagtagtggagggtaacgggaggtcttcattctcactgggcctccgtttcctatctagaaaacttgctacacataactagtagaagtacagacattttcatcaacacagaatgtccagatcacaaacccctgaacacacatttcatcctcgccacaagcctgtggggaagggctgtcagcccattttacagaggtgaagaccaaggcctgggaaagcaaggtgccttgttcacgaccacacttgagcccaggtccctgaccccaggcccatgctctcacagctgatgccatacattgtcgcctgggcatcccggtgaggccaggacctgaggaagccaagctcagcatgcactccagctccacaccttcaccctacggactgcgcctggaccgtccgcctccctgcccccgccccagccccttctcagcacacctcgtttaacttgtcaccgataaagtgggcagccacgtgggctggcaggacgttctccagaagaaggcggttcacgttctccatggtctcaaactcctcgtgctccttcttgaacttcttcttccataggcagtccaagcggcagtaatagtcaatctgcaaacggcagcaacataagcgccccgtccacaggcaagtgggagccgtgctgctgtgcatctcctagccaggtctgtctgtccctggcgtccttggagcctctggccaggggaccagtgctttcctggcaggactctagtcttttctgctactccacctgagcccaccccaccccaccccatctccagatggaggtgaggaaaagtgggcagagcttggggggggggggggggccagcctccttacctgtctggagagtgtaagcagggtgatgtagaacaggaccaggtagaaattggtcatggtcttcaggtccttccaggaacagctaggggtgccactgaatgcgaagggaggcccaagtcactcccagcactcaccactccaacccactgagtcatgctctccaggtgccacgcacacccaggggaaaggggaaaattgattctaatggggtgggtagaaaacaagacaactttggggtattataaaggggggaggggagaggtgggcagggagatgggggagcccttgtggggaagacctctgatctcacccctgaatgaccagaatcagctgtgatgagggcctgaagggagcccagaactggtgagccagggtcagtggcaggcggggtggggtggatgggtggcataaggattttgcaggtgcggggcagacccacaggagcaggttctgttctgggtcccaggcttccagcttttttgtttaggggggccaggtccgctccttaatccacttgggacccagaacccctagaaccacacaccccagccctgccagcctcaggtatcaccacctgtccaggaagagatggaagcaactgctccttccagaactcgagacccaggatgtggccttgagaggcacagagctagagctgcagcctccttccctccccaccactagactggcctggaaacaggatgacccggtggcctctgtcagactagggacttcctaaagaacctgccagtgaattcctcggctctgagcgctggacaccatctgccagccccgccctgcaaggtgcccactccccatgaacacagaagccccttggtgcgagcaggcaggcaccagatgaacaggccaccatggggatggggacggggacgggcgggaccccacctggtggtgccgttgggcttggtgaggttgcccaggccttggccgcagcagtcccactgccagcatggggagaggttgaagagcaccaggtaggccaccagggccactgtcagcagcacaacctttggctccaggctcatcctcaggaagaccgagcaggcgatgaagcccaggacacagctgcaggtgtagtactgagggggcagggtgtcactcaggacagggccaccccaccacgtactctcgcctccagcccagcacataccacagagccccactccctgcacctcagcatcacgctcttgccttaccacctcccttctcaacaaaaaacaatgagacctaagagtgtccagtgttgttttcactgtagttttatttcttatgaagtgagctcatttaaacgggaaaaaacagtatgcaggtgctgtggatacaacagaccacagtcaaggtcaaggccggagcgtgcatgcatccaagctgcctccctgagtttttgtgagcttaccctcccaaaggacctctgccctgctcaagattgtgctgtggctccccagcccccagaataaagaccacgctcttcacaccccggcattcctgcacctcccagtctggatcaagcctgcccccggctccatctcccagttctccccactccctctccaggagacaacccacccaaaaccccactgctcccaacacacgcctcggctttttcccatgctgtcccttgtcccagaacctttctgccttttagagcccagctcactgcactgccagcctctgaagctgcagagtctgctgtctgcaaggccctccaggcagagaccttgacctctgccatcagcctgtctgggcctgccctggcgccatcacctaatgaagcccctccctgagctgtgcatactcgtgtataaaatagtgacaggcctgtcagagaggaagtgccctgaccagagacccgcacaaggccagatgctcccctcactccctgcctacccacacagcctagaccaagcctgccaaggccaggactcctcactcccttgggccagaggc

SEQ ID NO: 97252 - DNA, 224235 bp, Homo sapiens
  misc_feature (1)...(224235): n = A,T,C or G
ctgcagccccgttctgtcaccaaatacttagccctttgactagccctgagaacagtttaattaatgaggaggtaagcactacattgttttgagtttgactggtatctttaaaaagatggggcagatagaaatttaagttttaatcttgggatagccttgttaatgaattattcataaattgaagagaataaagcaggaacaaaaaatcatgaattcaataataaaacattggcctggtttcttctaatctaaaatgaggattgggttctttttaaagtgaaaaaaagccaacacttacattatacttactatgttccaagtactgcgggatgctctttacataattaactcacttaatcctcacaacatccatataaagtggtactattgaatctatttgctgagaaaatttgggcacagagaagttaagtaacttgcccagggtcacacagatagttaatggtccaaagacttgtcagtacataatcaaacacagctttggtagcagtttccaaacaagattctgcttcagcaccaactgaaaagttttaaaacaaaagcaaacaactaaacaggttcctaggcccaatccacatcctacttttttaatctttagagttagaactcacaaatccatatttttaaaggagcttcttgtaaatacttgtgatgcaaacagtctaagccctgacacttagaaactactgatattgtcttgcctatgacctgaagtacaaaagaagaaagctgtattataaatataatacaatgccaccaacttatatcgatcatttattatgtacaattatgaggcacatttctcatcaatagtgatatggaaatgttaagagactctctgttcttaagaagctcacaggccaggtgtggtggctcacacctgtaatcccagcactttgggaggctgagatgggcggatcacaaggtcaggagtttgagaacagcctggccaacatactgaaaccccatttctactaaaaatacaaaaattagctaggtgtggtggtgcgtgcctgtagtcccagctagtcgggaggctgaggcaggagaatcgcttgaacctgggaggtggaggtctcagtgagccgagaccgcaccattgcactccagcctgggcgacagagcgagactctgtctcaaaaaaaaaaaaaaaaaaaaaaaaagaggctcacgatttcctgagggagagagaaacagatatataagtaatgaatggcaatatgccataatagtatagagtgtatagtataactagaaatgtgttcacagccttacagaagcctggtggaagaagaattagtcatgtctagtgatctggggaagttctcaccaaagaggtgacattgaaagatgagcaccatttctctaggttaaaaaaaatcttttggcttttatcttattaccactgggacttatttcgagagtataaagtatgggttggtgtgatttgcatatactctgagaattatatgaaggatgaattgaagcagagaggtgtgaagcacagagttttttggaaagctatggaaatagtccaggaaaaaatgataagagcctgaactatggcaataggaagggaggacaaggagattccagagactgaggtaaaaatagtaggacttggcagtgagtaaatgcgggaatgtgggcaaaaaagaaggcaaggataactttaaatgatacagaatggcataatttgctactaatgaaatcaaggatcaggatcaggatgaggaagaaagggcactatagtaaaaaaatgaatttggcattagacactcaactcagcgtgagtcactacatccaagtggaatatatacaaggctcttaggaatatggttttggtgtttataagagaggtggggactgaaatataaatttggtgatcaatatatagcagacagtcgtgatattactgggagagagctaacacttgttgagtgtttcttatgaaagagacactgttctaagtgtttctacatataatctagtcatttaaacttacatcccagtgagctacgtactattattttcctccatttgatagatgataaagcagaaacatagagagggtaagtcactgcttgaggttgctcaggtagcaagtgataggcctgggggttcaaacctcagtggtctgacgacagagcctgcatatgtaaccactttggtacattatatctcaacaaaggatgaaaaaatgagtgctgagagaggccagactcctaggagtaatgttaagggactcttttcaaggcatctaaattctaaacagaccttttgcttgaggtttggaaggatggaggagaatgaagcactttaggacaaagccttcacatccttcaaaagcctcttgccaatgtggtctgaactcctcaaaccacctggctttgtggtgatttgcccagttttcttccccctacttcttgacccacagatgctcttaccagcttcaagatcttcataaacaatatttccaattgtttttgctttttcaaggtgctcatcctggaaatctcccgagaaatagggaactgtacaaagaattatgagaatattgagtatgggaaaatagcaaagggaactactggctatgcaactttgggcaaaacacttaactattctgtgtcttaaaatcctcatgtgttagataagtggtcccaacctttttggcaccagggactagttttgtggaaaacaattttttcatgaactgcggcagaggggatgattttaggatgattcaggtgcattacatttattgtgcactttgcttctattattacattgtaatatataatgaaataattatacaactcaccataatgtagatagaatcagtgggagccctgagcttgtttccttgcaactagatggtcccatctgagggtgatggaagccagtgacagatcatcaggcattagattctcataaggagcatgcaacctaggtcccttgcatgcacagttcacaatagggttcaggctcctatgagaatctaatgctgctgctgatctgacaagaggaggagcttaggtggtaatgtgagcaatggggagtggctataaatagagatgaagcttcacttgctcacccactggttgcctcctgctgtgtggtctggtttctaacaggccatgaactagtaccaggggttgaggacccctgtgttagataattcaggaaaagacagggcacagtctgcactggcatcacttgtaggaacagagtgactttgtgtcccagagtagctagtatagctatgatagaaaggtaagaaaaaaattagtcagcagatggccatttggattttcttgagtatgatatttcaagatacctctaatatgtcaagaatgttgatgcacatccagagaggattgggagccatttactcaccatctggatactccagatatacagaccaaagagatgctaagtcacaatgcaccagagaggagttgctgtgcctgcccatggctatttgtgcagaagtataatactagctagttacctgaacatggaaaatgtcattaagaagacagtagaacttttcatccaacagtgtcatgactttatttcgaaggttggtctgtcgttctttataatgtttacaagtgtctaggcctaggacattggccatgaacatctggatggtatagaaagtttgatggaagctgatcttattcaatgaaatggcaataatcctgtttgtgagaaaatcaagaaacagaagagagtttttaaatatatatttttgaaaataatagaggttgaaggaaagctctgtcttctcatattcagctataatgatggagattttccaagctatctcgcaatggttctttattgctgcttctgatatactccctcttctcctgttcctaagccctgattaatttaacctagctaattctctcctttctagtcctactgccaccctatactaccacaatagcaagccactacccccatccaggtcatgaccctctgactgggagctcccattgcctaacggcatgaacccaggcctcctttatgtgacacacaagactttccaaagcctcattctatcctttcttgccactctctgcctagcaatctacccttcaccaacagcaagcaggtgagagttccctgcacacccagagctatttctcctctccatgcctttgcttatgctgtctcctcagcccagagtgctatggcttctcattgcccctcatttgaggttcatctcaagtctcagctcaggtgtagcctcctggaaactgtcatcaatgtcctaaggttgactacataccctttcttctctgaacttccacaattctctattgcatgactctatcgttgccctcactatattcaacttttaatgctatctgatatggtttggctctgtgtcctcacccaaatctcatcccgtattgcaacccccgagtgtcaggggagagacctgttgggaagtgattggatcatgagggcggttccccccatgctgttctcatgatagtgagggagttctcatgagatttgatggtttaaaagtttggcacttcctcccttgctcgctctctcctgccaccatgtaagacatgccttgcttcccctttgccttctgtcatgattataattttcctgaggcctccctagccatgtggaactgtgagtcaatgaaacctcttttctttataaattacccagtctcaggtagttctttatagcagcgtgaaaacgactaacacattatctctctcctcctcttctgtgagagctccttgagggcagagagcagactttattgatattcagggctttggcacttgttgacacatgtccccacaattcatatgttaaattcttagcctctagggcctcaaagtgtgaccttatttgaaaagagagtcgttgcagatacaattagttaagatgagatcatgctagagtagggtaggcctctaatccaatataactgatgcccttataaaaaggagaaatttggacacaaacaacacacagggagaatgccatgtgacatgaaggcagagattagggtgacgcttctacaagccatctttggaacaccaaagatggccagcaaccaccagaagctagcaggtgggcatgaaacagattcttcctcatggtccagagaagaaaagatgccttgatctcagactcctacccctgagaactatgagacaaatttctgttgtaagccatccatttgtagtacttttttacagaggccccggctagtgaatacagcacttagtagttcctgaacatagtaggaattcaattaatgattgaatacatgaataaacaaatgtcttctgactgttgtgaattatcccttcagcaatgataaagatattttaaaactggcctttctcaggcctaactttaatgtgggatagagatacagctaagaatattataagattaacaagcattttcccctcacactgtttaggttaggtggggaagggatatgagtcaccatcattattgtcctggtcatcaccactgttattgaataccatactatctacttccatgaggaagtagaatggattgtcccaaagatagccctcataatattccttatatgaaaataaataaacaacatgagacaagtatattagatctgtcttccagggaaaaatccaaagacctcttattctctatctccagtcttaggactaaatggtttgaactagtgattccctgttgagggaagagacagaccctctcatattgttttatactcagaaaaggaaagaaaagtgaaattaaaggcagatagcccggcgcctaggaaccagacccgaaaccaggcctgggcctgcctgacctaagctcggtagttaaaattcgacccctgacctagcaactgttgttatctatagattccagacattgtatggaagggcattgtatggaaggacattgtgaaatctctcgttctgttctgtttcactgtgaccaccggtgctcacagcccctgtcacgtacccyctggcttactcaatcgatcacgaccctctcatgcggacccccttagagttgtgagcccttaaaagggacagaagttgagcatcagacgagctcggattttgagacgctagcctgccgattctcccagctgattaaagccactcccttcactatctcggtgtctgaggggttttgtctgcggctcatcctgctacatttcttggttccctgaccgggaagcaaggtgattaacagatggtcgaggcagctccttaggcggctttagcctgccctgtggaacatccctgctggggactccaaccagccagagtgacgcggatcctgagagctctcctgggtaggcatttgccccggtgggacrcctcgccagagcagtgtgtggcaggcccccgtggaggatcaacagagtggctgaacaccgggaaggaattggcacttggagtcyggacaactaaaacttggtaagactagtctttggaacttgcccactccatttgagtggaagcatggcctgatcacccacggcgtgcctttatcagcacttggttttggttttgacttggtttgaattacttgacaggactggtcttgggaacttgcccactccattcccactccatttgagtggaagcatggcctgatctgatcacccacggtgtgcctgttccggcactttggtttttgtttttgacttgacttagattgcttratactttggttttggttttgacctggcttggatttctgaatactctgattttggttttgattttggtttagtgtaaactgcaaaagtgtgtgcgtgccctttttacccgttctttgttttgtggtgtgcatgtggtgtgagagtggtgttttgtctcgaagaaacatgggtcaggcacaaataagcccaccctactagaaactatgttgaaaaatttcaagaaaggatttaagggagattacggtgttactatgacactagaaaaacttagaactttgtgtaaaatagactggccaacattagaggtgggttggccatcagaaggargcctagacaggtcccttgtttcaaatgtatggcacaaggtaacctgtaagccaaggcacacagaccagtttctgtacgtagacaattacagctggttttagacccccttcgcccccacagtagttaagagaggcagaaagagaggaagaaacagaggcaaaaggaaagtcaaagagagagagagggagagagagagmcagaaagtcaaagagagaaagaaaaatagagagaaatatccaagtagttaagaaaaaaatagtgtaccctattccctttaaaagccaaggtaaatttaaaacctaaaattgataattaaaggtattctccgtaaccctgtaacactctaataccactttgttgttagtgtaaayaagggcgtatcccgaaagcactgaggccttcctatcaaaaatccttaacccagtaacccacggatggcccagatgcattcaatctgtagcagcagctgctttgctaacaggaaaaaaaaaaaaaaagagctgtgggaaggcaaaatttatgtaaaaagagtgttatatggtaaattcttgtcttgaaataaattaactgttgtttaaagaaagaaatatttgtaataagtcagaaagttgagacatgtcaaagaattatctgcgaaagtcatagaaaacgatgttataaaaaatttatgcaaaaaatattgtataatttgaaagtaataaggcctcctgagtactattgaagaaacagtttatgtgcaaggtgcataagaaaagtaaaatatacttttggtaaaaagattagaaggaggcataagaatgtggatttttacctacattaaaaggttaaaaaaattattgttttgaaagtttaagcaagttttaaaatgttaattgtaaaaaaaaattctgtgtgtaaactaattagctaaagataaaaaggtatcatccagtttttctgtgaactggacattaaagtaaaaatgcaacaggtttttcttgaagcaccaacctgctctttaacaaaaattataaaaggttaaaaagagtctgtaaaaacttaccttatggtcaaacatgaaaaattggataaatatgtctatgaggttttattaaaattaagtttaacattaataacacactaatataaaggtaaaatttagcttatctggtataaaaatcatacaagaagtattattaaatataaaatggtgtttagctttctttggtctaaaaactaataaaaataggtcctaaaggaaacattcattttactagaggatcatagaagttaaagacttaaaacaaactttggcaattaagacagcataccaagatgcaaatgcctggttgaaatggatcaaatattccatctgcacattaaacaaaagcagttgttwtgcttgtgcacatggcaggccagaggccctcattgtcccccttccactaaagtggtcctccagtccaccaggcgtgggctgcatggtagctcttttccaggattctacagcctggagtaataagtcatgccaaactctctctgctatccctgtgggtcagcccccgagggccatccagcctccgtctcccaacactaagttcacttcatgtctctcaccacagagaggaaacttaggattccttggagacctgaagkgatgcaatgagcttaagaattttcaagagcttatcamtcagtcagcccttgttcatccccaagcggatgtgtggtggtattgtggtggacctttacygggcactctgccgaataactggagtggcacttatactttagtccagttggctatccctttcaccctggcatttcrtcaacaagagggaggaaaaataagacatcgtaaagcgagagaagcccccttataggtctttcractctcacgtccatttagacgcaattggagtcccacgaggaataccagatcaatttaaagcttgaaatcaaatagctacaaaatttaagtcaatattttagtgagtgatgttaataaaaatgtaaattagataaattatatctattacaaacaacagcaacaagcttttcatgagttgaaagaaaaactcaggtcgsscccagccctggggctacctgacctgacgaaagtgcacactctatgtgccaaaaaaaaaaaaaaaaaaaaagggccatctataccaattctaagttaattyagactaaacaaggtcttactcatagcaaaggataattgaaatcccaaacttacaaggttttcaacaaaagtaaagtttgctaaaagttaacagtgtaacatgtattatagtaacttctaatcttgtggccttagacagtctagtcyacagatataaagaaagttcacttaaaaaaaaaaaaaaaagaatggttatcttcaaaaaaaaaaaatggcagttggagttttaacccagactgtagggctctggccaaggccagtggcctatctctcaaaacaaytagatggggtttccaaaggctggcccccatatctaagggccctggcagcaacggccctgttagcacaagaagcagataagctaactcttaggcaaaacctaaacataaagtcccccccatgctgtggtgactttaatcagtaccaaaggacatcattagctaatgaatgctagactractagataccaaagcttgctctgtgaaaatccccacataaccattgaagtttgcaacaccctaaaccccgccaccttgctcctggtatcagagagcccagttaaacataactgtgtagaagtgttggactcagtttattctagtgggcccaacctccraaaccatccttaaacatcagtaaactgggagctgtacgtggatgggagcagcttcaccaacctctgcaaagtgactcagaaaaagccctgctccagtcacacccggaagctgactggtccacgcacggccgaagcatgagaaaactcatcacgggactcattttccttaaaatttggacttgtacagtaaggacttcaactgaccttcctcagactgagaactgttcccagtatatacatcaagtcactgaggtaggacaaaagattgctacagtcctattatttcatggttattataagtgtacgaggactctaaaagaaacttgtttgtataatgctattctatccaaggtatgtagcctaggaaataaccaacctgatstgtgttatgacccattttaagcctccaatgatcacagttttttaaaataaattaaggactggtccttttctaggtgacacaagtaaagtaatagctaagacagaagaaagagggatccccaagcatgtaacactaaaatttaatgcttgtgccactatcaatagcaatcggcatagaataagatgcggttctttaaactgaaaaaaaaaaaagttacacagcaggaaataagtatatctgccacgaattaagctcatgtgcaaatgtgtgtaattactggtcttgtgtcatctaggctacttagaaaaaggatgaaaaagaccctgtttagctccaaaaaggagaaggcagcccctcctgtacgagtggaagctgcaaccccttgaaattagtaattacaaatcccttaaacccaaggtagaaaaaaagaagtacacgtatctctgggcgtcgataaaaaaggactagmtcctagagtaaataccttagtaaaagaggaggttcgtaaactctctccggaaccagtatttcagactttctatgattaactaaatgtgccagtaccagagactccaggaaaaaccagaaatttgtttktgcaattagccgagcatgyagcccagtctctaaatgtcacctcatgttacrtttgtggagaaactgtaataagagatcaatggcataagaagcccgagaattagtgcctacagacccagttcctgatgrattcccggcccaaaagaatcaccctgatcatttctaggttctaaaagtctcaattattagacaatattgcatagctgaaaaaaggaaagaattcactcatcctgtaggatgacttagttgcctaggacaaaaactgtataatggtaccacaaaaacagttacatggtggagttcaaaccacrcagataaaaatccattcagtaaatttccaragttgcagaccgtttaagcccacccagaattccaccrggactagacagccccccactaggctatactggatacgtggacatagaacctacgctaagctgcctgaccagtggacaggtagttgtgttattggcactattaaaccatctttcttcctactgcccatacaaataggcgaactcctgggcttccctgtctatgctttccgcgaaaagcgaaacrtagccatagataattaaaaagatgatgaatgaccacctaaaaaattatacaatactataggcctgccacttagacacaagatggctcatgggtataccagacccccatttacatgctcaactgaatcatacggttgcaagctgttttagaaatcatcactaataaaaccagtcaagccttgactattctggcccggcaagaaactcagataagaaatgctatctatcaaaatagattggctctcgactacttctagcagctgaaagagaggtctataaaaatttaaccttactaattactgtctacacatagataatcaaaggcaagtagttaaagacgtagttaaagacatagttaaaaacatgacaaaactggcacatatgcccgtacgagtgtagcacggattcgaccctgaagccatgtttagaaggtggttcccagcactaggaggatttaaaactcttatataggagttataatagtaatagaaacctgcttactgctcccttgcttgctgcctgtacttcttcaaatgataaaaagcttcattgctaccttagttcaccaaaatgcctcaacacaagtgtactatatgaatcactatcaatctattgcacaagaaggcataagtggcaaaaataagagtgagaactcccactaataaaaagtgagagtctcaaacgggggaaatgagggaagasagagaccctctcatattgttttatattgttttatactcagaaaaggacagagaagcgaaactaaaggcaggtagcccggcgcctaagaaccagacccgaaaccaggcctgggcctgcytgacctaagcyyggtagttaaaattcgacccctgacctagcaactgttgttatctatagattccacacattgtatggaaggacattgtgaaatctctygttctgttctgtttcactgtgaccaccagtgctcacagcccctgtcacgtaccccctggcttactcaatcgatcacgaccctctcatgcrgacccccttagagttgtgagcccttaaaagggcagaagttgagcaccttgacgagctcggattttgagacgctagcctgccgattctcccagctgattaaagccactcccttcactatctcggtgtctgaggggttttgtctgcagctggtcctgctacactgtcagctagctggataaacttaagtgtttgttctgcagaccaaatctagccttgatctcaacatctmtgccaattgttctcgatctgtctgaatattgggattacttaggaaactttaaataaccaagcccttcctggcattaaatcaggatatccatgggtcagcccagtttctctttttcttagctctatgtgtttattgttagttatctatttagcacaagggtcatggcatccaataattgtaggttatagataatttacataaggcaagttrtaggaaggagaggagcatcaaaataaatcaggattctatgggttcacacagaacaatcattccaagacactcacctgtgattcttaccttgggccaggtactcaattttcataagtatctggctttttccatatcctggtaatccctcatacattaaracttggctgctgttagatatcaaaaatttcttcatagtatacatgaagtagttgatctctttattacgtcctgttatttttagttttaaaaaagagcaaactcaatcaacgtaaaatagtctagagatataaaaagtcacatagaaaccctccttctaaaaatatccttgggccaggcgctgtggctcactcctgtaatcccagcactttgggaggccgaggtgggcggatctgctgaggtcaggagttcgtgaccagcctggccaacatgatgaaaccctgcctctactgaaaatacaaaaaaaaaaaaaaaaaaaaattagccagacttggtggcggrtgcctgtagtcccagctactcaggaggctgaggtaagagaattgcttgaacccaggaggcggaggttgcagcgagccgggatcctgccattgcactccagcctgggcgacaagcaaaactccatctaaaaaaaaaaaaaaaaacttggaatttccatggcattgttcacagactttcttcaagccttatgcactttcaaaattgtttaaatcttcctgggagctttttagctaaccatgtggttttgcagtttcatttgattagaagctgtgagagaaagtattcttataatcctcattataatgtttaattatagtgtagaaaactgagatttgcttagattacacaaccaggaattaagccaaggctatctaaccctaaagcttgtttttttttgttttttgttttttgtttttattcaacacactagaagtaatatgtagactattacattaggaaataaatttattaaagttagttttcctacattaaacaattatggataaaatatttttatttctgattctgtgataaaggaaatttgccctctgtaaatgaagattatacttaattcagggctacaaaaagcattaccagggataaaattcaatttgccttcagaaatcatgtacagattatttctatcataagagcaacttaaattcttagtgaaaatagattataggttttttctgattataaaactaacatatgcttgctgtagaaaatatggaaaacttggaaaagaaaaaaataaaaatcaccttgggttacaacccttatttttcttgtgtgtttttaaatactgtaacagccctgggtgaaatctgaaaccctgctgtaaggagctgtaagaattgtaatttctaagcagtgagcaatttctgtcaaaaaagttggagactcattgagagctaactattccttctgtgctgggcagatgaatgtggaggcccattttgttattcactgatagaacaaataaatatccaggtattatctaatgtctttgttgaaggaccattaattcaagtgtagacatttaataaaaagaagctaagtgctttgcttggtaatatacatttctgagtatggcttagtgagaactacttagcagactgtattgcttcttttgggtgaaatattccctttctgaaaatgcatttgaacctcaatttcrtgagatgttttgtgtttttctttggcctgaatgaagctcacataggaacttagaagatgaggcttcaaaggctgcatagctgcacaccaacatggcacatgtatacatatgtaacaaacctgcacgttgtgcattgtgtaccctagaacttaaagtataataataaaaaataaataaataaaaaataataaagtttccaggctgggagcggtggctcacgcctgtaatcccagcactttgggaggccgaggcrggtggrtcmcctgaggtcaggagttcgagaccagcctcaacatggagaaaccccgtctctaytaaaaatacaaawttagccgggcgtggtgstgcatgcytrkaatcccagctactcrggaggctgaggcaggagaattgctkgaacctgggaggcggaggttacagtaagccgagatggcgccattgcactccagcctgggcaacragrgcwaaactccatctcaaaaaaaataaagtttcctaaggaagcttaaaaaaaaaaaaaagcctgcatagctgactcttccagctccctgtgttctattcatacagaacacctacyggtagaaccttatggagtatctttagctggattctaaaatgagattgtctccttaacttgaaatgcatgcaccttgtttctatctaagcaaagcctcaatatcggggactgttgtatgcagtttttaccctaaaaagccactatttatttattatagttttgttgtcaaccatgctgttgcaatttcatttatagcagcccttgtaaaagaagggcatttcccatgctgctagcctctgacaatctgtgtttggttatagcttgaaggaaaggtatgtggacctgatctttatgtcatactggtggaatcagtgcaaaagggcaactagatcagactgagaaatatacacataggctgcacgcagtggctcacgtctgtaatcccagcactttgggaggccaaggcgggcagatcacgagatcaggagttcragaccagcctggccaatatggtraaacccygthtytackaaaaatacaaaaattarctgggtgtggtggtgtgcacctgtaatcccagctacttggraagctgaggcagaagaatcgcttgaacccgggacgcagaggttgtagtgagctgagatcgcgccactgcactccagcctggghgacagagtgagactctgtctcaaaagaaaaaaaaaagaaatatccayataatgtgttctaatgtgactgtcatgttgggtctgcaatcttgtagaaagaaggttaggattctgttgctgtcagttagtaaaataagtatatcctaggatgaaaagtaaggcctctgaggagggtgagagtgggtattccttctctctagcttcaggagttttggaatctggacttaaatgaagtgattggcttgaagaccctgaaaactacctgaaagcagtgaaagtgaggcatttctgctggcccaagtgtttttttgcagttctggaactgttgccctccttcaggctctgctgacaccaagattgtggcccnatatttctccaaagtgtgagacagagcctcctcttaattgccttgacacagttagnaccaagatttaacttatgataagacttttggggatgttcgtgtctgacagaaggaaattacaagtgctactagaagtggctgccttcagaatccacaggtcaatcttctttgggtctcttctcttataggtatatcccttcctcattttaggtctactcccctgtctaatctcgagttatctttcttacaataaggtccctatcaccaggaatcacaaaaatatcaattccaaatggattgtagacttaaatataaaaggtaaaaacaaaatttctgaaaaaaatgctagaaaaatatctccatgatttttgggtaaggaaaggtatctcaaatagtatacagaagcactaactataaaagacaggtaaatttgattacattaaagttaagaattctgtttattaaatgcataattgagagtaaaaaggcaaacacagagtgggaaaagtgatatacagtagaaacaaatgacaaaggacccatctctagaatgtgtaaataattccaaaagataatcaaaatataacccagttgaaaaataggtgaaaaattgtacaggtactttaaaaaaatgtctgggctgggcacagtggctcaygcctgtaatcccagcactttgggaggctggggcaagtggatcacttgaagttaggagwtcaagaccagtctggccaacatggtgaaaccctgcctccactaaaatataaaaattagctgggcatggtggygyacacctgtaatcccagctactcaggaggctgagtcctgagaatcacttgaacccaggaggtagaggttgtagtgagccaagattgctcctttgtactccagcctgggcaacagagtgagactstgtctcaaaataaataaataaataaataaatccaaatggccaataaacttatgaagaaggagctcaaccacatcagggaaatacaaatggaaaccataataagataccactatacacccaacagaattattgaaaggataaagattgataaaactaagttgttgccaaagatgaagaacaactggaactctcttaacattctcagtcagaatataaataaatacaaccattttggaaaactatttggcataatcgaccaaattgcaccctttgtcccaacaatttcagtcctacgttttactcctaccttgtactcaacagaaatgcatacatgcattcaccaaaagacttgtgtaagaatgtttatggcaatattattcataagaaccaaaaactggaaataacccaaatgttgcacagcaacagaatgggtaaattgttgtatatttataaaaatggaatactacatagtaatgacatagaataaattacagctacacccaacaatatggatgaattatataacataccattgagtaagagaaagtatatataagcygtatataattatacaatgtatgattccatctgtatcaattttttaaacaggcataagtaatcgagggtgttagaagactttggggaaaggaagaaggaaagagtaatcctggtgtattgctatttttctatttcttaacctggatgatgattatattttcattttgtgataattcattaagctgcacagttatcattgatgtacttttctgcatgttttgttttagttcaataaagaagtttaaaatcaaggcctactacctacccagcaaagggtaatcctcctttctgttgcagatgaggcacgccataccaaacatgctgaagagaagaacaaaagaacagatgctagattcaaaacagggacatattgagagcaagagtgattagttcttagttcccagaaagtttccttctcaattgctaacaagagtctatcccctgactcamgggtcgcaaacgccaaaagaaggagaaasgagaaggtctgacttggtagtggagaatccaaagaactcaggtagcatctgtttccatagcatctggcacattgttcaataaatgcttgttgagtctgcactggtagagaaacccctttctggggagatcagacacctgatatacgacccagtagatttcaatgtggtgcagagtcacacatcctgcaaagattccaccaattgctcaaacaataatagcgcgccttttattggagcacatgctatgtgtctggcgcagttccaagtgctttacatgcatcattttctttaatcctgacaaaaacactgttaagwagtactacttggctgggcgcagtgactcacgcctgtaatcccagccctttgggaggccraggtgrgcagatcacgaggtcagsagatcgagaccatcctggctaacacggtgaaaccccrtctctaccaaaaatacaaaaagaaattagccaggcatggtggcggttgcctgtagtcccagctactcagggggctgaggcaggagaatggtgtgaacccgggagggggagcttgcagtgagccgagatcgcaccactgcactccagcgtgggcagcagagccagactccatctcaaaaagaaaaaaaaggactactggccaggcacrgtggctcatgcttgtawtyccagcattttgggaggccgargcagktggatcatctgaggtcagragttygagaccagcctgaccaacatggtgaaaacctgtctctactaaaaatacaaaaattagctgggcgtggtggcktgcgcctgccatcccagctactctggaggctgaggcaggagaatcgcttgaacccragagayagaggttgcagtgagccaagatcacgccattgcattccatcctgggcaacaaaagcaaagctccatctcaaaaaaaaaaaaaaaaaagtactactcttatgttcattttgccagtgaggaaattcaggcacaaagagtttaattgcccaagaccccatagcaggtggtaacacaggatactgacagtatccaaacataggccagggtgcatatgtttgctcactccataacactatctcttgaagaagccttttagtcaaaatggattatgcccttctctgaactacaatactactttgttatgcctctcttatagcatatatcaaaggttcccatgtaacatacagctaagtttgtgtatgttggtcttccccacttgattgtgagttttctgggcaggaactaggccctgttcatactgtgtgtgtatttctccactyttatctgcagaggtggtacagaaaaatcatgaagagtacaggctttgggatcagatagtcctgggtttgcatagtaaactgattgcattaatggccccagtacctgtatctgtgccctttgctgtgtaacttggcagagtcctctcattctggactcagccttgtgaatgctttygtcaatggactatctgcaaacataagacataggaagaggcttgaaaaatgcttttgcattgggcctgctctcttgctcctccagtattgccaggacaaacatgctggatggaagatgagacacatagagccagattgccctagttatcccaactgaggccgccaggttggccaacagtctgttgaaccccaggcacgtgaataagccaagacaagatcaaccaaatccagccaagatcaattgaaccccacatttgtgagaaaaataaatgtttatttttgcayaccactgaagttttgtgattgcccgtaaggtcacattattgtgactgaatcttgactccattgctcactatagatatggccatagacaagtcatttaacatctctgagcctcagtttttgaatttataaaatggaaattataatagtttctatctcgtatggtcaatattaagactggattatatattttgaggtaaagtacctgatgtttaataagtactcactaaaaattattattcattcatgtattcaaactgcactttattgatggcctatgtatgccaagcacagtgctaagcctcrggaatactgaagggaataataaagacaccttgacccaactgcagccctggttctgttatctgactcttgaagacctcgattccagcttgctaatctaatgaataacaactttctgctctctgtgccattcatttattcatcattattgaggacctactgtataccaagcactggggatataagaataaagaaataattagtatcttcaaagagttcacagtgtarcaagtgaaaactgtaggaagtgaataattgtgatatagggcaaggagtgttctaatagaagcatatgctataggaggaaaaaaggaagaggaagaaggaagacaaagggggaaagagcttaactgtctagctgggatggggaattcatagaggaatgtctatgaatccctcgagctgggtttcaaaaattgactgcggttttcccaatagaccagkattaggtgggtgctgatgaggacaatctacttaaacaacccagaggagggggaacaggaggagatgaggttggaaaggcaggtggtaccttgtatgtcactgcaaagattttgaacatcaccatgaaaatgactgaaagccattgaaggattttaagcttcaaagtgacacccataaatctatgctgagcttttggggaatgtatttcactaaagacttagaggagaaataatatcttatactcttttaaccctaacaatgcctcggcatacagttgacwtaattagtaaataatattaaatggttggtgattgggcccatttgggtgcaaatagatactcaaatgagaggattttttgtttggtttgtacaacctttgaagaattaccctcatattctcagatctgaggagagaatgggattttccaccatgccatagtgtcagtcagayggaggaaagattaaggattttgaagtctgggccttggtctggggaaagcatagatttcaacttyttgaactggctccaaatcttaaatgrgtgactgctttgctatcataattctcccgcttctttaytaaaatatacttcaaaattaatgctccacactcacactttctcagtacggccccaatactgatacaatggtccagaatctgcaacacctttcataactttctttggaagctctttaaaaaagtacgctggtaggttgctcccattgtaggtgacagagtcgcaggtcacaattcctgggtagtacatcatcatcctggcagctaagttgactttttgaccaatgactatagcaagaaagagaaagtcaaagatcagggaaataacaggcattgaactgaatgtaatctgaaacattgtccccaaatrgcatttttaccctttactccctttgctgytcatgagtgacamagaagcctagtctcaagacccatattcagccaatggctattcacaaaatgtgcagggagttagttagccattagcaaagtttctgcctcacttgggaggtcaagagaatgacctgctcagggatggaaggggcttgagtatggagcaggctctgtaagtgggatggccacagcactgaaggctctcagagaaggtgtcagttggtcttctgccacaaggtggacaagcacawgyttgggcctggggtactgatctccatatgagacataaaattgtgtctgcatgctcctatgaataaaccttcatttggcgatttctcgatttagtaaatgggctagaagaggcgtgcatggaggattgaagcacaggctctgaaggcagactgtgcagggttgaacaccagctctacccctaactatgtgcaaactacttgggacaattactttaaataactcctcatgcctccattctctaacctataaaatagggatgataatagtaactctctgagagggtggtttatgaagattaatkagttaatacacgtttatcactttcaacagcagctggctgcttgtaagccttcaattaatattactacaaatgaggtagcaaatgtgtcactttaacataaacktgaatacttctgaacaagktactctttttgaaaactrtttattgtggagaaatttgaccataaaataaaatataatgaatttccatatacccatcaccccatcccaacaagccattagcccatggctaatcctgccccatcctcacccccatacactccccaccctgtgtactttygaagaacatctcagacattgtatcatttyagacataactatcgtggtattttacatatattcagtattttagatgcattattgctgaaaatcttaaaccctgataggatggaaaagggaagtaatagagttgtgaaatctggagataagatttacttattactactctcttttgagagtgtcattatttttcagtaatatcaacattcataatttttaaggagttctagcttattccaggaattaagagaagtaactatttaatgttaacaggaaagtattacaggagcccctcattccatcaacatatagcctcccactgctcccctctcatgactacatatttctctactcatacatagccccagaaatgcacactctgcaagcattgagggctccatggcttggctccatctggaagactctaaagtttctgagggcagggctcatgtctcactcatttttgtgcttcctcccgcaaagcccagtggcaaggtgctgtgtttgcrgaaagaaarctggagatgagctgacccagcacacctgtgtactcgtgtctcacagtgtgtccaacgatcccacagaagacaatcccactggcaacrccgatggatacagttctggtgcaggggagacaagatttgtggggaaagaaataaagataatgagcgtagagaaagtgggaagggtgggaaataatgtctgggttgggaaagggtgggaaaggattttctctacccgttggaattagtttatggcatttctacatggcccggagatgcgaaggaggaacaacagtttgagacacaggactaagttcttaattaattcttctttctttcctgttcsctgcatgccctccctacttatgcctcaaaagggtcagggaccrctgggtgggaccagggtcaatactcactggattttgtggacttgagagcagaagtcaaatatatccatagcacattccagagcatgagtgagctcgtcaggtaccttttccccagggaagccaaagacacagaggaaagagcagccctgtgagggaragagacagcaaccacagctgatggacagtgtgctttaaactggactggccagaaggctcaacagagagccggcggcaatttttggcttctgaatcagattttatcatgatttctctcacagtattttatttttagtacacttcaaacacttctactgcatcatcaacaggagggcttgagccttgagaagggcttgttttgctccagatatagtgaatagggctgagctatctgtgtgcatgcttcggcctactctctcctgtggccaaggtccatgctgcaaagtgctcagtttaagtctatgaagcagcagcacagagcagtggaaaaggcaccagctctggaatcagaaagtctctgtcctcaagccacttctcaagtgtggaaacttagataagtctattacaatctaggaacttccgtttatctctctgaaaatggatatactgtagacctgctgagatgtttttggctactaaaagaattaatgtgttatatatattcaaaaagtcatcctaaactataaagtactttgcagatactgttattcttagggataaaggcttaggctgtaagtaggttttcttatcataaagctaactgttccatgcaatgattcaactctaaaacttggcatttgtagtattagtcacttaaaaaatgacctcagtcaggtgctgttgtctgtaagaaaagggcattgtgaataaagggtgatgggttgaaattttgagtttttgacatgttacatcctgataaaatgcaaagaacactaaaatacctcaatttcttcaaccctctccaaaagaatttgatcaactgttagatcttaaaaaggactgggatctgccttgacatgaagggggaaacactgcttctaggtacgtgcaaagagggcaacccctttgggggaagcagggagcttttgcctgcaaatttatgtagcggcctggcaagagcttttgattccccctagcaatggaatgacagctctcatttattgcacactgactctaagataggcattacaccaagtgcctcacacatattacattatttaaaactttccacaatcatttgagacaaatactatccccattcaaagaggaataaaccaaggctcagagaagttcaatgacttgctaagtctcacagctgggaatctttggagccatgtctgcaagacacgaaagactgttctcttagattctacactcttttcttatgatacccatgggtcagtattgaagaaggtactggagacaccaggctggaagtaatccctttccagaactcccatagcacagagttagttcgtctcatatagaatgcatgcttcctgcctggttgtgtcaatatatgtgttactcatctctgctgcccagccctagcttttcgtcttctatgaaatgctcagtaaatgcttgttgaattagtgagtgagtggatgtggggcagtaattaagtgctctgcttttaatacacaaaaggaattgagatgggaaatcaattctcacatatgcatctgtggtcatttgttcatcacatcacttttctctgaattgattaagaacagagtgaagaccaggtgcagtggctcaygcctgyaatcccagcactttgggagryygaggcaggmggatcacttgaggtcaggaattcgagacccacctggccaacatggcgaaacctcatctctactaaaaatacaaaaattagccmrrtgtgktggygcktgcctgtaatcccagctactcaggaggctgagtcaagagaatcgcttgaacccgggaggcggaggtttcagtgagccgagatcatgccactgcattccagcctgggcaatagagcaagattccrtctcaaaaaaaaaaaaaaaaaaaagaacagagcgaaaacacctgggagccagaggcagtcccctccctgccatggatgaaaataaaaggggaactggaggtgttgacatggcaagtgggctttcttggaaacaagcttctggggtaagatggttactaaagactcctgacctgaaacccctgggtaatacatcatgcactgagctggagacttatgtgtagtgagaggtagcccagcgtagtgagaggtagcccagcatagtgagctcagacggggatggcagactgcctgggtttgaatcccagcctcccccttactagcttgatgatcataagcaaaacgtaatctcgccttgtcctggtatcctaatctgtgtttcagcatcctcatctatataatgaggataatgacaagagcaacctactgctcagagtggtcatgaggatgaaatgagtcaatagagatcaggtcctgagaacagtgcctggcacatagtaagtgccatatccaccatagaagttataattataaacaaagactggccttctaggttaaatttctttttttgtttagttgagacrgagtctcacgctatagcccaggctggagcgcagtggtgcgatctcrgctcactgcaacctccgcctctcaggttcaagccwttgtcctgcctcagcctcctgagtagctgagattacaggcacgtgccaccgcacccagctaatttttgcatttttagtagagacagggtttcactatgttggccagtctggtcttgaactcctgacctcaagtgatccgcccacctctgcctcccaaagagctgggattacaggcgtgagccaccacgcccagcctctaggttaaatttcctgtgtctattctcaccaatgtgcttgtccatgaatgctaacctaaaactattggtaggttcccatcccatagttcacacttaccttgtcaaacatgaagactttattgatttggccttggaagatcttcaggacagaagtgatgtgcatataggcatcctggatggctgggcctatctcttctgctttgtcttggtcttcaaacatcaggttcacaaacacaatcgtcactgggcgaagctcagataaatagccctgaagctgtttgttatcaatctgcaaagtagagagcagctttctgtaggtgtccttggcagtggatccctcccccaacaccgcccccacctcatacccraaatcatctagggaatgtctacctcagaatgggtgaggtacaacatgacagagccagcatgcctgaagtggagcagatggaaatataatcaaaatccctctcttccagtggggacttatgcatgtgctaatttttggccagcaaccactccattaccccaactgctggcttcctcatgccaatatgagccattgcaataagggaaataactactgttctttttggctctcctatttttaaaaaaatttaaaattttttaatttttgtaggtctatagtagatgtatatatttttgtgttacatgagatattttgatacaggcatgcaatgcgtaataatcacatcagggtaaatggattattcatcccctcaagcatttwtcctttgtgttacaaacaatccaattatactcttttagttatttttaaaatgtatggttgtattagtccgttctcccactgttataaagaactacctgatactgggtaatttacaaggaaaagaggtttaattgactcacagttccatgggctgtacaggaagcatggctggggaggactcaaacttataatatggcagaagacgaaggagaagcaggcacttcttatatggccagaggagagcagggggagtgctacacacttttaaacaatcagatcccatgagaactcattcactatcacgagaacagcaagggtataatccacccctatgatccaatcacctcctaccagtcccctccaccaacattggggattataattcaacatgagatttgggaggggatacaaatccaaaccatatcaatgattaaattattttttactatagttaccctgttgtactagcaaatactaggtctttctcattctttctctttttttgtactcattgaccacccccaattcctcctcatcccccactacccttcccagcctttggtaaccatccttatatkctctacccccatgagttcaatcattttaatttttttttttttttttttttgagacgragtctcgctctgttgctcargctggartgcagtggcgcratctcggctcaytgcaacctctgcctcctgggttcaagcgattctcctgcctcagcttccagagtagctgggattgcaggcatgcaccaccatgcctggctaatttttgtatttttagtagagacggggtttcactgtgttagtcagactggtctcgaactcctgacctcatgatctgcctgccttggcctcccaaagtgctgggattacaggcatgagccaccatgcccagcccaatagttttaatttttagctcccacaaataagtgagaacatgtggtttctctttctatacctggtttatttcacttaatataatgacctccacttccatccacgttgttgcaaatgacagatctcattttttttatggctgaatagtacttcgttgtgtatatgtaccacattttctttatccatttctctgttgatggacacttaagctgcttccaagtcttgactactgtgaatagcactgcagtaaacatgggagtgtaggtatctcttcaatatattgatttcttttcttttgagtatgtatctaggagtagaatttctagattgtatggtagctctatttttagctttttgaggaactttcaaactgttctccaaggtggctgtgctaatttactttctcattaacagtgtacaaggattcccttttttccacatcctgtccagcgtttgttattgcctgtcttttggataaaagtcattttaactggggtaagatgataatcttattgtagttttgattttcatttatctgatgattggtgatgttgtgcaccttttcacatatttttcacatacttgtttgccatttgtatgtcttcctttgagaaatgtctatttcgatcttttttttttgagacggagtctcactctgtcacctgggctggagtgcagtggcacatctcatctcactgcaacctccgcctcctgggttcaagtgattctgttgcctcagcccctgagtagctgggattacaggcgcccrccactacgcccagctaattttttgtatttttagtagagacggggtttcaccatgttggccaggctggtcttgaactcctgatctcgtgacttgcccacctcggcctcccaaagtgctgggattacagctgtgagccactgcgcctggccttattcagaccttttacccattttttaatcagattattagatttttttctatagagctgttacagcttcttatatagggatgtgaaggacctcttcaaggagaactacaaaccactgctcaacgaagtaaaagaggacacaaacaaatggaagaacattccatgctcatggataggaaaaatcaatatcatgaaaatggccatactgctcaaggtaatttatagattccatgccatccccatcaagctaccaatgactttcttcacagaattggaaaaatctactttaaagttcatatggaaccaaaaaagagcctgcattgtcaagataatcctaagcaaaaagarcaaagctggaggcatcatgctacctgacttcaaactatactacaaggctacagtaaccaaaacagcatggtactggtaccaaaacagaaatatagaccaatggaatggaacagatccctcagaaataataccacacatctacaaccatctgatctttgacaaacctgaaaaagacaagaaatagggaaaggattccctatttaataaatggtgctgggaaaactggctagccatatgtagaaagctgaaactggatcccttccttccaccttatacaaaaattaattcaagatggattaaagacttaaatgttagacctaaaaccataaaaaccctagaagaaacctaggcaataccattcagtacataggcatgggcaaggacttcatgactgaaacaccaaaagcaatggcaacaaaaaccaaaattgacaaacmggatccaattaaactaaagagcttctgaacagcaaaagaaatcatcagagtgaacaggcatcctacagaatgggagaaaatttttacaatctacccatctgacaaagggctaatatccagaatctacaaagaacttaaacaaatttgcaagaaaaaaatcaaacaaccccatcaaaaagtgggcaaaggatatgaacagacacttctcaaaagaagacatttatgcagccaacagacagatgaaaaaatgttcatcatcactggccatcagagacatgcaratcaraaccacaatgagataccatctcacaccagttagaatggcaatcattaaaaagtcaggaaacaacaggtgctggagaggatgtggagaaataggaacacttttacactgttggtgggactgtaaactagttcaaccattgtggaagacagtgtggcgattcctcaaggatctagaactagaaataycatttgacccagccatcccattactgggtatgtacccaaaggattataaatcatgctgctataaagacacatgcacatgtatgtttattgtggcactattcacaatagcaaagacctggaaccaacccaaatgtccatcagtggtagactggattaagaaaatgtggcatgtatacacagtggaatattatgcacccataaaaaggatgagttcacgtcctttgtagggacatggatgaagttggaaaccatcattctgagcaaactatcacaagkatagaaaaccaaacaccacatgttctcactcataggtgggaattgaacaatgagaacacttrgacacagggtggggaacatcacacaccagggcctgtcgtgggctggggggaagggggagggatagcattaggagatatacctaatgtaaaagatgagttaatgggtgcagcataccaacatgggacatgtatacataacgtaacaaacytgcacattgtgcacatgtaccctagaacttaaaagtataataaaaataaataaataaatataaaaataaaagattaaaaaaactcatcaatgaaactaattttttatctgataaaataattctaaaaaaaaaaaacacttgatgttatcccatctgtccatttttgctttgrttgcctgtgcttgtggggtattactcaagaaatctttgcccactccaatgtccttgagagtctccccaatgttttcttgtagtagtttcatggtttgatgtctcaaagtccattttgacttgatttttgtatatagcaagagataggagtctagtttcattcatctgcatatggatatccagttttcccagcacaatttattgaagggattgtcttttcctttatattcttggctcttttgtcaaaaattagttcactgtagatgtatgartttatttcttgtttctctattctgttccactggtctatgtgtctgttttcatgccagtactatgctatttgggttgctatagstgtggtataatttgaagtcagataatatgattcctcctgatttattctttttgcttcagatagctttggctactctgggtcttttgtggttccatgtaaattttagaattttttttttctatttctgtgaagaatgtcattggtattttgttaggtattgcattgaatctgtagattgctttgggtagtatgaacattcttccaatctataagcatggaatatctttcattttttttttgtggcctcttcaacttcttgtgtcaacattttatagttttcacggtagagatctttcacttctttggttaattactaggtactttattttatttttagctattgttaacaggattactttcttgatttctttttcagattgttccctgttagcatatagaaatgctgatttttgggccgggcgcggtggctcacgcctgtaatcccagcactttgggaggccgaggcgggcggatcacgaggtcaggagatcgagacmatcctggctaacacggtgaaacctcgtctctattaaaaacacaaaaaattagcggggcgtggtggcgggcgcctgtggtcccagctactcaggaggctgaggcaggagaatagagtgaacccgggaggcggagcgtgcagtgagccgagacagcgcaactgcagtccagcctgggcgaaagagggagactccgtctcaaaaaaaaaaaaaaaraaaaagaaagaaaaagaaatgctgatttttgtatgatgattttgtatactgtgaccttgttgaatttgtgtatcagttctaatggttttttggtggagtctttaggtttttccaaatataataagatcatctgaaaacaaggataatttgacttcttcctttccaatttgtatgccatttctttctttctcttgtctgattacataggacttccagtattatgttgaaaaacagtggtaaagtgggcatccttgtgttctagatcttagaggaagggcttttagtttctccctattcattatgatactagtggtcggtctattctatatggcttttcttatgttgaggtatgttccttctatacacagttttttgggaatttttatcatgaagggatgttgaattttatcaactgctttttcagcatcaactgaaatgataatatggtttttgtccttcattctgtagataagacatatcacagtgtttgatttgcatatgtccaaccacccttgcatccctgggataaatcccacttgatcatgatggatgatctttttaatatgttgttgaacccagtttgctagtattttgctgaggatttttacatcaatattcatcagagatactggcctgtagctttctttttttgatgtacttttgtctggttttggtatcagggtaatactggccttgtagaatgagtttggaagtattccctcctcttctatgtttcagagtagtttgagtayggttggtattagttcttcaagtctttggtagaattcagcagtgaatacttcgggtcccagatcttgttacttgttatttatctgttcaggttttagatttcttcagggtccaatattggtaggatgtatgtgtataggagtttatacatttcttctagattttccaatttattggcatataattgctcatagtagccaccaatgatcctttgaatttctgtrttatcagttgtaatgtctcctctttcatttctgattttatttatttgggtcttttctcttctgttcttagttarcatggytgaaagtttctaaattctttctctgtgttatcttgaatttctttgagtttcctcaaacrgcttttttgaattacctgtctgaaaggtcacatatctctgtctctccaccctggtgccttatttagttcctttggtgaggtcatgttttcctggatggtcttgatacttgtggaagttcgtcagtgtctggacattgaagagttaggtatttattgtagtctttgacatttaggactgtttgtacctgccctccttgggaaggctttccatatattcaaaaaaacttgggtgttgtgatctaagccatatctatattacagagcaccgcaagtgcagtaatgctatggttcttgcagacttatagaggtaccacctttgtggtcttaaataagatccagaagaattctctggattaccaagcagagacttttgttctcttcccttactttctcccaaacaaatggagtctctatttctctgtgctgagctgcttggagctgggggtggggtcacacaagcacccttgtggctaccatcactgagactgcactgggtcagacctgaagctagcacagcactggatattgcccaaggcccactgtgactactaccaggctaccacctatttttgttcaaggctctagcactctacaatcagcaggtggcaaagccagccaggtttgtgtctttcccttcagggtgatgagttcctccaggccccaggcaggtccacagatgccatctgggagtttggctctcttatttttatagttagggataagaatagcatgctatgtaattcaaacttccattttcattaggtatcttctggaatgttttcacattctgtcctactctacgttcaaacaaaatgaaatcagtattattatccccattttaccgattagataactgatgtatggagaagtaacacagctttcccaaggtcacataaggacacaataaactagaatccaaatctccagactcctcatccaacatttatttatttatttagttagttagttattttttgagacagagtctcgctctgtcacccaggytggagtgcagtggcrcaatctyrgctcactgcaacctccgcctcctgggttcaagygattctcctgtctcagcctccygagtagctgggattacaggtgtgtgccaccrcgcctggctaatttttgtatttttagtagagacarggtttcaccatgttggtcaggctggtcttgaactcctgacctggtgatccacccacctcggcctcccaaagtgctgggattacaggcgtgagccatcacgcttggctcatctaacatttaatctgccacactctcctgcctctctggggtggtggtatatttcatttagttcccctcttctctccaacacaacaggcacagggaaaataaaggagagtgttgggtcgggcgcagtggctcacatctgtaatcccagcactttgggaggctgaggcgggaagatcacgaggtcaggagatcragaccatcctggctaacacggtgaaaccctgtctctactaaaaatacaaaaacgtagccgggcgtggtggcgggcgcctrtwrtcccagctactcaggaggctgaggcaggagaatggcrtgaacccgggaggcgragcttgcagtgagccaagatygcgccactgcactccagcctgggcgacagaatgagactctgtctcaaaaaaaaaaaaaaaagaaagaaaggagagtgttcccaaattatccctgccaatcatcatccctgaattttgttaattaaatacatagcaaatcaatgggggaaaatcactgcactttctccccgaaatagcacagaagtgtcagattcttcaacgacaatgtgaaacacattttctagattaaagaaggaattggtatagggaataatgcagccatgcttcctaattgcctagaaggtcctggtttcatgtaattttattctttttataaaagagatttaataatttctaattaaccaatgtgctaatttttttcttttcttttttttttttttagagacagggtcttgctctgtccccaaggctggagtgcagtggcaccatctcggctcactgcaagctccgtctccttgctcaagtgatcctctcacctcagcctccctagtagctggggctacaggcacgtgccaccacacccaactaatttttgtatttttgtggagatgrggttttgccatgttgtccaggctggtcttgaactcctgggctcaagtgatccacctgtctgggcytcccaaagtgctgggattacaggcatgagcctggccttgatttttcaaataaaatcattcacaaataaataaaaaacttctgtcagactatgtattctgagttttggcttggaaaagaggactacggtatctttaaggacttctcttctttgggttcagggtctggttttggtaaagttgtaaaaggttgtctttggtcttattttcaaccctcttagctgtacctcttcaccaggtaaacatttttcctacctggaattttcccagtgactcacagagtccatcttatattccattgctaaagaccttgttttcaactggttgcaattaaagaagcataatgtattatatctcttgagaatggctgsgggagaatggggtgacttttttaagcttcaaaagccatgaagagtcaagcaatgcargcactaggggtaatgtttttacaatgggctgaaggtggcagggtgcattctgatacctctccaattcactctatgaaggcagctacccactggacaggcctttgttacaaagatttcctccaggacacaacagcattttgatgggactaagtattaaagcaggcatatattaggagggtggatagcctgtgcaaaaattgtagaagtcagatagaccagggtccaaatcctagctatatcttttacttgacaacctcaggaaaggctgtagtgttctctgggtctcagttttctcatgcatataaaatgaggataaaaatatctaccaaggactgtaaagaataaatacatgaactagcagagtgactggcatatggtgagtgataagagatagttataattcacatggaataataaatttgagagaaccaagattaagagaataaaaagagaaaatattggagggtggaggtagctcagagtattctaattacctgcattgttaaatctcaaaacttaagagctaatgcaaatgacttggagaaatagtgtaccaatgttcatccacttgaagtctttctgctatgtggcatatagaaagggtgcccgcatgttcttatatgcttgcaacagctcccatttgcgcaattatataaggcaacgcagtcctattttatgcctgttgtcatattataattatgaataatgatctctttgaaagtattgagatttgaacaatgaatttcacagtcacctacatatagagaatgtctttttaggctcagtgtggtggctcatgcccataatcccagcactgtgggagggtgaggcgggcagatttcttgaggtcaggaatttgagaycagtcaggccaacatggtgaagctccatctctactaaaaatacaaaaagttagctgggtgtggtggcgcatgtgggaggctgaggcaggagaattgcttgaacccrggaggyrgaggttgcagtgagccaagatcatgctgctgcacttcagcctgggtgacagagtgagactctgtytcmaaaaaaaaaaaaaaaaaaaaaaggaagtctttttattttaatggaacattttactatttactagtagctgctgttttttttttcttaaatcttaaaattccagctgtccagatccctgacatccccaaagccagtaaattcaattttgaaaatacctgcttcaaaatgctttccatcacatacttttgtagggacatctccagttcaggatcaggcttcagcgtgcatgcaagcctcaggaggtctaagaaggcagaaggagggtgcaggctcagagagggaagtttggctctgcagtgctagtgagaggaggctcccagtccctattctcttgggcagtgggccttcttgtccttacagttgtcaggagactctgggacacctaggggctgaaagggccaggggaaatccaaagaggagctcttagaggttaaaggtttcccaaaattcagtcacatgtagctcaaaaccttgttcaaactgacatgacgctttgggacttagggagattttcacttctgaacttggtttagaactattgccacaggagatgggaacaaacaaatgagggaatgacaagagaggagcatggtgacagaatgaaggggatggtagagttgaaagggcagcaggaataacattaagaagactggtttctgatctcaggcttgataccgcttcactgtgtgaccctggagaagtcactttgctgccctggttgcctcctatttcctcacctgggaaaagagtagttgagcttcatgatctctrtggttcccttcactataaagattgatagttttatgctctaggatagactgataagagatggtaggaatgagtttgagggagtcaaaaaataagggagacagaaatggcaaagggttttcagcagggaagaaaatgataatgtgaaaaaaaatgtgtgtgtgtgtgtgtgtttaatttggctggtcctgatttgtagcctttataataaaaccataactgtaagtgtagcactttgctgagttctgtgagtcatttcagtgaattactgaacctgagggcattaaggagatccccagatttgtaggtagttggtcagaagtgccggtggtctggggatcccagagcttgcagctagtgtctgaagtttgtagaggattcaaccaatgaaatcctgcactaactccaggtggttataacatcagaattgcactgcaggccgagcacggtggctcacacctgtaatcccagcactttgggaggccaaggcrggcggatcatgaggtcaagagatggagaccatcctggccaacatgggaaaccctgtctctactaaaaatacaaaaattagctgggtgtggtggcacgcctctgtattcccagctactcaggaggctgaggcaggakaatcrcttgaaccygggaggcagaggttgcagtgagcccatatcgcgccagtgcactccaacctggtggcagagtgagactccatctcaaaaaaaaaaaaaaaaaggaattgcattgcagtattatggtgctcaaagtaaggcctgaagaaaccctttatagaaggtaccattaagacccaggagatggcattagtaaagctcaaggagtgggtaatgwcatgaggctttctccttcatctctggagcttctgaggttcttggcctttcctgatcmatgtttgtacagtctccccactccccaccccactgcctattgtggctttgtaaaagtacagtcttctatttgtaacatctaaaatactccagacctgtacataaatgatgagaaagaatgattcaaagatgtttctgatgtttctcacttggatggagttttcagggaagggtaagtagctaaagttcagatacgttaatattagatgcctatttgacatccagtggaagtcgcccataggtagggtattttgtttgttttttatgaattcaggacaaaaatctgtcctagaattcaggacaaaagactgaagcgaattctggctgttaggtctgagactcgggtgatgtaagcaacttgcaggaccttgagagtgagtgtctgcttaagttttgtgatacagtcttctcacttgcctcatcttactcatatggaagttaagcacgaataaatggttcactaagaagtgagtagagaagactagaaggtcaaagacagatacctgaagtcaccaacatttaagacatggaaaggaaactaagcaaagaggactgaaaataggtgatttgagasgtaaaggcaaaactagaaaagaataatacttttgaactcaaggaaaaaggagaaggtagtgtccaagaaaagagcataagctatggtcaaccatctaggatgaggcctgagaagaggtcacctggtttggcaaattaatggtccttggtggccttgacataaacagtctcagtagacagcaggggactagcgtagaagctaggtgtcagcggtgcaagactgaagagcaggtgagcacagacatcaaggtgcttgcaatcaatatttattggatgaataaataaataaggggacatgagagcaggtataaatacatttacagattacttttcctagaagtttattggtgaaggttaggaggggaaagcagcacggaaagaagctttactttttcttttatcctaggggatacttattaatgtttgatggatgagggaaaggagtcagtgcctagggagaggtggatggtgtggggagtgtcatacttagaattgctgtcccggagaatgggaagtaggtcccctttgtgtgctggtaaggaccaggagctgtgttgaggarcccacccaccagtaatgaagctgtcggcattgatataagaccctactgaccactggtagaggcaaaggcatttttccatggtgggtacttacttttgtgctcaccagaaggataataatgcatgaaggtcrtacactttgtgaaaaattcatcaaaattaaaattggggggtggttttaagaagttaacctaaataaaagcaaatgagaagttttcagttattctgagaactgtttaatcctttgaagtgtaatttcttagcagaaagagagtatgcttytgactgaacagtgattggcacacttaaacaccaagactatttgatttgtaaaattgaaattttaaattgaaaatctaaaaaatctttccaattacagtgttcactcacatctcaatgtttggtatatgtacagagagggtcattccaagggggactaatcttatacttttctgcccttagaactttttcctgctttttttccttcataacattttaattcaaataaaacctggttaaactgcacaccatttcttccttataagtgttaaaggacgggggctgatggccaaaaaggaattaggagcatcaccagtcataagacatcaagatcatgagacacatgtgatgacacactgaggatggcacgatctcatttttgtggtattcttggttaaaaaaaaaaaaaagcataaacttggtccaataaagagaaaacatcaggcctgtaatcctagcactttgggaggctgaggtgggcagattgcttgagctcaggagttcgagaccagcctgggtaacaatggtgaaatcctgtctctaccaaaaatacaaaaaaaaaaaaaaattagccaggtgtagtggcacatgtctgtggtcccagttactcaggaggctgtggtgggagaatcgcttgagactgggagttagaggttgaagtgagctgagatcatgccacctcactccccactgggtgacagagtaagattccatctcaaaaaaaaatatatatatatgtatatatatatagagagagagagagatatgttgttggagatgcagaagagatgagagaaagcatcaggcagtgctaaccagagatgtgtgtgacaacatcggctggcaactctcttgtgtcacggtcactgcaagacaacggaaccactgaagtgctgttgcagactgcaggagactacatcaaaaatatcaacaaggccgggcgccaggggctcacgcctgtaatcccagcactttgggaggccgaggcgggcggatcaggaggacaggagatcgagaccatcccggctaaaacggtgaaaccccgtctctactaaaaatacaaaaaattagccgggcgtactggcgggcgcctgtagtcccagctacttgggaggctgaggcaggrgaatggcgtraacccgggaggcggagcttgcagtgagccgagatcgcgccactgcactccaagcctggggcgacagagagagactcygtctcaaaaaaaaaaaaaaaaaaaaaaaaaaaatcaacaaaatgcaatgtgagatcatgcatacagtcctggaacattccactaagtggaccacagtgggaaaactggtgacattcaaataaggtctttaactagtgcatagtattgtaccaatgttaatttcctggttttgactattgcagtcttgttatgaaagatgttaacattaggggaaggtaggtgagggatatatggaaactctgtattattttttcaacttttctgtaagtctaacatgaattcaaagttaaaacaatttttaaaggtatcaagaatgattgaagagaggctgggcgtggtggcttacacctataatcccagcacttygggaggctgaggtgggtggatcacgaagtcaggagttcaagaccagcctggccaagatggtgaaaccccgtctctactaaaaatacaaraaattagctgggcgtggtagcgggcacctgtaattccagcgactcggaaggttgaggcagggaattgcttgaacccgrgaggcggaggttgcagtgagccgagatcacgccattgcactctagcctggtcaacagagcgagactccgttttttttttttaaaaaaagaatgattgaagagcatgggaatgggctattgctataagccagctaggccatgcaggctggatatgtcttgctggaagagtgaggagtgggtggtggtggtgagggttgtaggctgatgcatgagtgtgggagtgcctcctatcttgaccagcatctgcacggattctctgtcttttctttctttctgccgcgtagtcccattcctttggctcatctagcagcacacctttcttccactttcataccctcaaagcacagctttttyaattgtccatatcccagggacagttctgcttatagtcaatstgcaacttaaccacaatgttttctactaggcagagccacaggaagagaagtctctcttctatcactgaacttcgccgcacttgctcaactccaacctttaccttcagtgatccctcatcctgggttaggagggtgttgggtaaagaaagtgagggtcaatgacagcctttaaaactattcccctctgctcctggatgaaccggcagacccttctggttccttaagcaaggtcgctagcccctcaaaaggcctcaatccccaaattccatatcctcagttacccataaagaagcctaatcatttcctcctcaagctcaccagcctgggctcctcccagaggagctgccctggactaaagcctctgtagcctaacccagactgaccccatcccaatctccagcccaggagctttatgaaaccagcgtgcccagtgactcttctggcagggggcctctgttacaggctggcagaactttctgtaagtagcagcatcacacccaccttaactgctctctgatctggaacactctcaatttcaatcatgctccggtcacagagctgccagcagtttggtgacagaataacatcattcatctgagccatgttctgggcaaggcgcacatcgtccactgcctgaccaatcaccagaaagtggctgtgtgtttcatctccaaagaccaacatgctgatgtggccagcagccagtcctggcaagaaggcaaggaataggtttgcacaagaagttctggattatttcccagcagcacaggtttttggaaaaaccataatcttgrtgggactatactatctcagagcaaaatctcacttctaaaactttacataggaattatggcatacctcttttgggctcgggccttccaaagctccccttcttccaaagctagaaagttctaccactaaattttgcctgtctgtaacattatctcactacatggtcctaccagtccccaaagttatttttaccttttcttcaattatgtatacttaagggcaacagggaatacctttaataattcttattttgggagaatttgcattttagcagagattgaagctgtaactaaaaataatcccttagggttgaattttagacaacaaagggtgggggaaaggaagtatgcatttgacagttacacatcccatcccaacaaccatttctctcattgcttttaagttggtaaatgaaagttttggaacctaagtgacagaagaagatattgtataatatgacatgtacacaaaatatatgtataaatgaactgtaagtgacacacatttctttcaaatgactgtaatacaatcaatgtttattttttatcttcgctctctgctatactgatttgtcagggctgactcccccctgattctacatacagtttgttttctatctgaaacacactgatgtttggacttactctaaaaaaaggtgctgggacccacctcactaacagccaatcagcatgcaagagggggctgggttcccatcattctcaagaaggataacacatcagactccttgggtactaacttagaaaaaatattcagtattataataactttgatttttttttcaacaaaatatttaacttatttgggcttttttttttgagatggagtttcacgcttgttgcccaggctggagtgcaatggcgccatctcggcycactgcaacctccgcctcctgggttcaascaattytcctgcctcagcckcccragtagctgagattacaggcacccgccatcacgccyggctaatttttgtattttagtagagacggggttycaycatgttgktcaggytggtctcaaactcctgacytsagrkratccrcccaccttggcctcccaaagtgctgggattacaggygtgagccactgcacctggccttatttggaaatttttaacaacatcaaaagcgggcctaggttaaagaaggctgagaaacagttaattgtataactgctgatgatcctatcaggtatgacatgtgagaattctaagttttgcaaagtttagttaggcggaagctaacaccaacagcaccaaccataactctgttactcattacttatacctctcagaatctcatttttcatctatgaaatggatacaatgatgcctgtatctcaggactgtcatatagtgtgcgtaatgtttgcacgtgcatagtgtgtaatgtctgcaatgtaataaggaaatatgtgtgactattactatattatatgtataactttaagaagccttgtgtaaagctggagctgtgttgcaggctgacctgttaagcttttcctacacctcattcttatgaggtagggggtgaccagtctcatgtcgttgctgaaactatgtaatggcaagctagtctctattttgttttatactgcacaaccttgacaagcagcaagatggaataataataacagcagtagcagtcataaagactattttattgggtggttcctatgcattaactaccataccaactaatttactttttgtaatagcttattaggtagatattatgattaacccaaattctctcaactggtatgtgaggaagccaaaattcacattctgattgtcctgatgccaaagttcagggcatcatggggctgagccaccatgttctactacttctctttgggagagagagatgccccaggagtcaagaccctatcccagctgccgtaggatttattccttctcaaatgcttacctatcttgactcggatgtctaggccttcttcccactcctgggtctcaaacaatccatggatctccaggctacatttaattaccactgtgataatgtttttcagctgctttcgctccaccctccacagggctagcagtgcatcaccttcagagagagacatgccgcgggcttttgacctgccctggggatcaatctattttgtatgagatctgtatagaaacttactcatcaagcattcctcagcctatctcctggccactcccttctctaggatgcctcctttgtccccaacacagaagcacaggcacctcagcactcctttcttaccccttctatcttagtaagcccccatacctgcaaatttcaggatgtctcctccaaaaatcaacacttctgagaaaaaaaaaaaaaattaaatcaaaccctgattccttraaggtagtaaaaaaacatcattctttcttagtggaatagaaactaggtcaaaagaacagtgattcagagaataggcttatactaaagatctcatcccagacaagccacttaacccatttgagtctgtttcctcaagtggagaatgagtacgtggarccagtttacatctatgctccatttctgtgaatggggaaagacaggagaaaggcagctagggtttctgatgaggtmtgaagacagctgccctcctcccacgataatggaatgcttttaattaatttattgatcaatatatgttataggctggggcttgtgtaagcatgggtgggtggatgaatgacaggactccacaaaaactaggagtcagggaatgggaaaatcacaaccatagtcacttgcatttttggttattaccaactttgtattttgtttatttagacggtatggcataaatggccattctctcttttagttacgcatcatcatggattggttaagcacctgttgtgccaagtcagatgcagaaaggaatcaaccatagttcctgcttttatgaagcattaaattttgtctagtgggtaacatcaagatattactaaggaactcagagtctgataaaacactaggccaggagttcaccataacagagtaaaccgttgtcttcatgaatagtttgaattaayaatgcaaacaagatggcaggcagaggttgacaaggggactaaagttttcagttcactctaagtgcttcagcatccatcattaggagacaaattattgagaagctaattataaatcatttatctactcatacaacaatctcttaatgactatctttgggttttatagatgctggcttttaaaaatacttggataggccaggcrtggtggcttacgcctataatcccagcactttgggaggctgaggtgggaggatcacctgaggtcaggagttygagaccagcctggccaacatggtaaaaccctatctctactgaaaaaaatacaaaattgctgggcatggtggcgcacgcctgtaaccccagctacgtgtgtggctgaggcaggagaatcgcttgaacctgggrggcagagsytgcagtgagctgagatcgtgccactgcactccagccygggagacagagtgagactctgactcaaaaaaaaaaattaataaataaaaatagccgggcaccctggctctcacctgtaatcccagcactttggggggctgaggcaggtggatsacttgaggtcwggagtttgrgaccagcctggccaacatggtgagaccccatctctactaaaaatacaacaattagacaggtgtgggggcgggcgcctgtaatcctagctactcgggaggctgagacatgagaattgcttgaacccaggaggcgaaggttgcagtgagccaagattgtgccactgcactccagcctgggcgacagagcaagactctgtctctaaataaataaataaaaataaatataaatacttggatatataactaaaagtattactactacagttcttttaaaagcagtgtataattcagccctctaacacaaaacatcccttccctcaaatagtctgtattagtgaggtttgattatatttatttcttcagttatactatatcatatttcaaaaaagactggttttatacacatttcatggggaagaggaggagtgctaagcaattgtactctatcaggttataattgacaactacggaaaaaacaatgaattgaaatattctcaagccagaaacctatgggaacacttactctccactattgcacttatgtggtagttgaggatctccaccaactgctcagcccctctgtccatgtacatggcactgctgaacttctcagtcattgcagtaaaacctggaataaatgtgcagctggtttccttggctgcttgggggaatcaaacagagccagaagaggactaccctggaaggcagcgggcctcagctttttttttttttttttttttttgagacagagtcttgctttgtagcccaggctggagggcaatggtgtgatctcagctcactgcaacctccgcytccyrggttcaagcaattctcctgcctcagccttccgagcagctgggactataagcgtgcgccaccatgccaggctcgtttttgtatttttagtacagatggggtttcaccatgttagccaggatggtctcgaactcctgaccttgtgatccgccctcctcggcctccaaaagtgttgggattgcaggcgtgagccaccgaacccggyggcctcagcttttaaaaacaggcagagtttcttcttaaggatctttgtggctggtcaagtgtcagacatgcagcctcctctagctattattttaggggtcaggaaaaggctccagatatttctttcttccaaattctcaactgtacrgtgataactgcaacttctttaactgggaataaaattttcattccgtggtaacaaaaacacacacatttcaaacacttctgaagaggtggcaagtttattagtaagatgtaaacatcatctagggagatcatttcctgaggtcaattttgactgggatgtgtatggggcttggggctggagaggatgagtcagtgaagttggggcagagatactggagcaaagaatgggacttgagcatgttaaagatatgcctatgactggcagtcctgagtaagggaggatgagagagagccagggccacaagctatttcctccctcttgtgttctcagtggagcacatctgctgtgacagcccaagggctccagaatggcctccctactctgcaatcaagctctgcatgtgaattcccacgcgagcctgttgctcatccacattaaacaaacatcccttttgcacttgcctgaaatatcaacaaacatcaggactccgtcaaaataatccataaagggtcgctctggggagaaatgtccatagacaatgaggtctggtaaatgagctgctattctgactatgggccagtcctggaattcttcttttggagtgttcatgttcaagacaaatgttcaggattttatggtgacaggaagcagtctccaaataggtcttctaaaaagaaaattgaaatagaggaaatctgatatattcatttgctcattttcctattgctctttctccatttgttttgttctaacctgcggcctgcttatagtggtgaaaatgccagagttgttgagccacacttcaaaagggccaatttctatacagaggaagaaccctcccaccctgaacagctgttgcataagtgagctccattacaaagaggctggggtgaaagagggtagctgaacggctcaactcatttgcaggaaggggtaggccctcgcagggcaagtccagttgtagtgggctgttaagctctattcactcaggccagacttctttttcttctgtcctcatgtttccttttaccctctctctaccttggtcttttacttttttctctctttaaaaaaaaaaaaagtgtagatgtgattcgtgtgtgtgagtgtatttatatgtaagtgagtattagagttttgtatataggcaagagattaagactataaaggtataatgttaaataaatggaagaaaagagttcagaaatgtgtgtgtgtgtgtgtgtgtgtggcagctggaaagatggaagaccttaagctgtaaatggaaggaaatgctgaaatttcaatttgttgcccagttagttctgagaaaactaggatttcctaaggccttcctgtagctgctggggcagattaaatgctcatgcctaaatgttgtaaaaatcatgctctaccagcctgaacagtaaaagcaaacaccctttactttttcagagcaatccaagttactggaataggttatacagaaaatataagaggatttgtttttttaagaaaaggaactgttatttttggtttaattctgaccagcagagaggaacttgttagtaggtcatattgggatatattagagtattagaggaaaaaattgagacagtcgcttatatcccttagatttaaggggaagtatttaaaaaataactcagggaaaaatatttgtacatttaacagacaaactttaaaatgtatatagtatacatttaaaaatgtatttagtattctaaaaaatgagtgctaaatgttacatattggataacctttaaaaggaaaagtcctggcaaactcaaatgttaagaagtgaacaaaagaaagaaacatataactaaggtttaaaaaaaaaaagggtagcattaaaaatgcagcaaaagaccacagcatgtgccaggaacagtcaatagataaaattaaatcaaataaataacttcagatagtaaatttggtgctatatgaacttttaagaagggtgtgagatgctagatgcagtggtttgtgcctataatcccagcactttgggaggcctacacaggagtattgcttgagcccgagttcgagaccagcttgggcaacatagtgaaatcccatctctacaaaaaaaaaaaaaaaattgctgggtgtggtggcatgcacctgtagtcccagctattcaggaggctgaggtgggaggatggcttgagcccaggaggtcaaggctgcaaggagctgagatcgtgtcactgcactctatcctaggtgacagagtgagactccatctctaaaataataataatgataataaaaagaaaggtacaagaaaattgaatgtcgagaatgaaagacttacaaaaaatgctaaagttaagaaaacctagagggatttttaaaggctttgttgaaaacaaggtaattaataaaagaggaataaggatgaagcttaagtatggtgtaccatacaccttttcttttgtttctaccttctccaccatggaggattgaaaagtataacaagcattgctaagaaagaattgaaatccaagataagtagtgctaaagcacacagtcattttaaataaattctagctagtcccagacaacatatatctacagatactgaaagaactgacaggtgtaatgtcagtaatctcaaaaaaccatggagaacaagagatgggctggaataccatagatgggcacattctcttttgaatttcaaaagatgaggctactcatggatcccagaaaacacagaccagtaaacataatgtatttgttgagataatacaggttatgtttcattatcaaataactttgaaatctcaatggcttgaaataacaaaggcttatttcttgttcatttcttgctcayactacatgtcccttgtgggttgtatggggttctcctctgtttttgccttcactttgggacccaaactggaatattctggttgtcaaggtagtgggaaagaggatgtagtggagtatactcattctactcccagaagtgacgtatttcacttttactcatggcattgaccaaagcaaattacatgaccatgcctagtttcaagtagacagggaagtgcactcctaccatgtgcacaataggaaagagagttggaatatttgggagcagcctcaatggttatttagattagcaagaggtgattaaaaggagtcaaatggattcagagccaagagcaagccaacattatttcctattttggaagagttattaaacttttaaatcaagagactgctatagacaatgtatatattgactttaaggcatttggccaaatttctcatatccttgtgagtaaaatatacaaaattataggaataaagaaaatataattggctggttagcaatcacacctaatggaaattgattagtattctggtgtcaactcagaggtaagcctccatgggcacgatagaagactttgataaagatataattgaaagtacggccattatggaaaataatatgcaggttcctaaaaaattaaaaatagaactaccatatgatctaacaatcccacatctggrtatatacccaaaggaattgaaatcagtatccctgcactcccatgtttatttcagcactattcacaatagccaagatatggaaccaacctaattgttcatcaacatatgaatggataaagaaaacattggataatgtatacaatggagtactattcagccgtaaaacagaaggaaattctttcttgtatgatagtgtggatgaacctggagggccttatgttaagtgaaataagccggccacagaaagacaaaaatattgaacgatctcacttatatatggaatctaaaaaagtcaaaatcatagaagcagagtagaatggtgatgcctgaggctggggttgggtgggkggaatgagatgttggtggctgaaggatacaaagtttcaattagacccaatgaaaaagtcctggagatctaacctagagcaaggtgaatacagttaataaagtattatatacttcaaaatggctaagagagtagatcttaactgttctcaccacacaaaaatgttaagtatgtgagatgatacgttaattaccttgatttaattatttcataatgtatacatatattaaaacatcacattgtacaccataaatatgtacactttttgtcatttttgccttaataaagctgagggaaaataaaatttgaaaatatagtgagagaactaatgcactgatgacagagctaggattttaatacatcttaatcaaccaaaataatgaaatttcaaaagaataagtgcaaagtgctgtgtttagagtttttaacaaaatcaaatgcataagcacgaggtgctaaaaaactagatttactgcaaattagtgctatcttttaaaaaacttttattgaagcataacatacatgtaggaaaatgtacaaatcataagtgtatagcttgaattactctaaggtgagcaaatccgtgtaatacccattcatagcaagaaggaaaacattaccagctttccagaagtttttctcatgccaccttcaagtcactacccttctcttttccctgaaggtaacctttcttatttctaacaacatagatcacctttgccagttttcaaactttatataaatgaaatcatactacatattttgtgtttgtgatattcatccatgttgttgtatatcaataattgttcattttcaatgctatatagtattccatcacctgatggaatataccacaaaacatttatccactatactattgacctgtgggttgttcccacttttagaccattatgaataatggtgctaagaacattcttattcatgtgttttggtgaaaagatgtatgcatttctcctgggtatatacacaggagtggaattgctgggtcatagggtatacacatgttaaactttagtacaggcttgtccaagctatgtcctgtgggccacatgcggtccaggatggctttgaatgcagcccmacacaaatttstaaactttcttaaaacrttatgagatttttttgtgatttttttttcttagctcatcagctatcattattgttagtattattttatgtgtggcccaagatgattcttcctcttccaattgtgccccagggaagccgaaagattggatacccctgcttgagtagatcttgctaaacagctttccaaagtgatggtaccaacttacactccctcaggcaaggtatgacagttcagttgctacatatctcagccaacacttattttgtcaggcttttcaacttttagtcatcttgctaggtaagtggtggtgaggagacaggccatttctcttactgtctcttgtctctgaagagaaagaggaagtaaaagctgaaaaacacaggaatgaagtcagtggcaagamcagccggcgccactgatgaccaggtctgaggttaaaagattaacccccattctaaccacatgtgctatctacagatctcaatctattatgaccctttcacgtggaacccctcacagctctaagcccttaaaagggccaggaactgtttctttggggacctcagttcttgagatgcaagtctgccaatgctcccagccgaataaagcctcttccttctttaacccgggtgtctaaggggttttgtctgtggctcgtcctgctacaatggtatctgtggttttgtgtttccttgttggtactaaggagattaagcaccttttcatatgttaactagctatttggatgcaatgcaattttaagatacataaaagtgttcaaatctaatccagaggactgaagttcattgacctctttaaaattcattgactctggaatgtgaggaatgatggcagagactggaartaagtcagaaaattatgacattttggttaaaatkgtagttgtcttcaaatatttgggctgaactgtgaaagttgtggggtaagtggtggacgtgggctaagtgggggacatgggtgtgtatgcaaggtgtaatgtgggaccctgcaatcaaagaacaacttccctaccttctccttgaggtagaaatttggtttgggttagcaagattaaagttcatgggaagtatgcagtgggaaaggaaagttggtgtgtttttcttcagtggagggagctagttatcaaagaataagtgactgtaaacagtatgttccgtaggcatgggtgctctgaagtggcttccacagatgtgctgagtagccagagaactaagataggactgagcagaactgagcagggcgtagctctattcttccctctcctgcccccagttcactggctcaactttgacttctttagctaccaarcttgtaagattgaaagactgagctaatgaaaacagaggatgctcagttaaatctgaattttaaataaacaattttttagtataaatatattccaaacattgcattctttctagcagccctactatcagccccttcaatcttggcaataccacactctcctcacatgcatagtatagactgttttgctaaagttgttaacactggatggaaagtgggttaggtttattctttgttgctcaggatcaactaggatcaatgactggcaatcaccgaaggacaaatataaacaatgtaagaatgagtgttcaaactgggcagttttaggaagtgttgaatagctatctacctgtgagggtagaggtataaaaagtaaagtagaggttcctcttcaaagactttcctcccygtctaattaggaataaatagtaacttmtcttaaaagcaaaatttattcaaagacctgtgctaacattcttaaatatcygcyagccrtaataaagaaatcaatgtactttatgttcttggctcccacaatgtagcctaaatatttgccctggcatgcttatactggtccaagcaaccattaggtcatagcctgttcctcttccttatttaaaagtatttttacttttctcagcattccacaagttacttcctccttcttttgttctcctctacctttgcctcttttaaaagttctaagttgctagccgatcgggacaaatacagaatgtgaggtcctgttccggccaatgggcagtagggtgaacgtgtcaggttataaatgaccccgtctcctttgttcagtgtactctcgtggcaaaactgctggcgagtataccctctctgcaggaagtaaaaatgcccttactaaataaatttatgttcaagtgctatttctttatggcattggagaacaagcrtttcaaacagaggtgattttagtcagtgtagagatgaattagatgattgttaagattctattgttttaattaaggtgatgtgaatgaacttggacagatttttctgtttatgatgaccaaacaaggaaagtacatgcattttgagattaagatggcatatgtagatgtgaaactaaaagaagaaaatgataggtttaaaaggcagggagatctaaaataaatatctgggagtttcttatgaacacccataaaagacaatagaaattttctatttttgaagatatagttttctgctttaagttctgcaacatcacaaaatgattagtgatagctgtatttacctttctacaggcacataccacattgtaattataatttattatgacctttttatgtgaagcattctattgtaggagttattaagaaattattttaggcagatagagaggaaaaggggtccttgggaaattttcattttttaaagcatctccagaaaatttcttgtaaagccttggctcttagagccaggccggcaacctttgataagcaaatgaaggccattagaaacagggcccacccaacatggcgattccggaggccttctttcccttgccccacatgttcctggcaacatggccacctccacatactcccacgtgtgtagaacatcatggcaccctgcatttgcatattaaaaggctagggtgagagggctagctttttcaagggctttgtgaatgacatgcctggtcaaaccaatcccctgaaccctatgcaaatcagacactgcctcctccagcgtctgtaatatatacctagctgacgtccaccccactgggggttccctctctcggctttggagcccccctccctctgtctctgtatgggggagcttcttccctctttcctcttccttcttgcctattaaactctccgatccttaaaatcactccacatgtgtctgtgtcgttttatctaaaccgggatgaggactaagaaccttggtgttcctccactcatcggagccgtatcaattctacataggttgcctcatttaatcatccaaacagcgctatgaagtagacctgatttctatagatatgaaaactgaagcacagaggtattaacttgctctgggttataaagctggaatatccaggtctgtgggacttgaaagtccctgttgtttctactatatcatgctatatcccatttgtatacgctttatagcactttggggatgtatatgacctagacaaaagatgtaggtttaatttaagagcactttcaatgcatgttgatggtacccttatcaactgttcagccaattctatcacatcaagaatacagcatgaacagcatgggtactgacaaagcrcggaagcaccttggaatgagaaatgaggatacctgagtcaaaaggcaagcaggcgaatgaggcccgaaagataaaccaagaaggattcctgaatgcggagtgtgagtaaagaaaactcagtagtacccaaaaatgaaaagagaaattagggttcgattatattcatcagtttctctaaatctctcctctagaatttcctaatagattttatattcaacttttcacctacatgtaaagtcaggtttcacgagtccaaagagggagatactctgaacttaaaggcacagtgttacctgtcatgaaagcttgcttgcctactctagccatggtaatttttcttctgagctattgtggctcttaatgtctacacttaagtggcttatttcccatacaaatatccttgattatcttttgaattgcttctattttgtcttcatctgaattgtaagctccccgtttggaaccatcttctacatatctttgtttactccacagcaccttgccagagcccccttcaagaggtaggcacttggtagttgttgactgataaaaaggaggatatcacgtgagaaactgcagaaaagaggcaaataaagaaagtaagctagaaagacagagcatccaggttgagaaggtgaggcaatatttaagccttcaagcttctaagctcatgtaagggactgacacagaggtatacacaaacttgaaccctgacttctagccccaggcttcccactcctctgcaatagctgtcttctttcctgacggtcgccctcatcttcagctctgcaatcaatctttctgctgagactcttacttccacatacctccacttcatccagggctgaggaaaagccagacctcagttagggactaggtcttttaagactgcagaagacaggagaggaggccgggtgacattattctgaagacagctgaagcgccatgtctgtctatagctgacccataaaatgacagttttgtctaaaagccgttttccaggccacaccctcatcagtagctcattgttccacgggcaccgaccatgtttctgattgggtggcactgccgtcccctcccccaccaacctgagtggcctactactgtacaaggaaggactggctgtttcaggttctcttatccgcacatttgaggcaagggtcaggggagactgacatgaccccagagtagtttacacaattcttcccttggccatgtggaggatggttgaaattaggcaatagttggtaggtgatcatcagaagtatctccagagcaagcaaacacctaattttagtcaatagtggttacagcttgtaccaggactatgaaatttaccagttataataaattcaatacttaccttcagatatatttgtgaggtaaatttttgtttgaagaattatatacctgccctttctgactggtcaagtgcacgcttttaatcaaatttatcccaaagataacttgaaatccaatgggcactggatttgagttttctttatctgatgtgacactggaaaaatgtattttaagaggctggtgtgttttctaacagcttaaatcatgtgttgattttctaaatgttcttatgtatatcatcacaaccacaattatcatttaggggcacagcttttaaaattggaatttaaaaagtcttatttaaaaagctgtacatgttctcctataaagccccgctctgtaattgtttactgtgtacttccaaatgttgtaaaacacagttgtcttagggaggaaaacaagagggtcatttaattatgttcattgagtgaattttctggtgtgagttgtggaaaccagtcttataattagaatcatacctcatttaattaaacaatccccttagggagagctattcttaataaatgccagtgttttctatttctgcttcattatataaacaggctccagtagagacctttgttttacagaaaggaaccttagctttgaggtccatcctcattaacattcaacctttcgctatgattttataagttaaaaaagaaaatatttactatgaggaaacagcagcactgacataccttggatcaaagtttccttaaaagagatgccataccacaaaaaaagactaaagaatttatctcttattgagcattctccaccccacctactactcctctaccccaagcagcttcttttctgctataaagttattagttcagaaaccgtgcaaataggttaacacagtatatcctttttgtagtaaaattaaaacttcctttaaagtacttaaagaaaagtactttctgggtctaccttcaattaataagattaccattttctgaactttcttcttgttgcccaggctggagtgcaatggygtgatctcrrctcactgcaacctccacctccctggttcargtgattctcctgtctcagcctcccaagtagctcggattacargcatgtgccaccatacccagctaatttttttgtatttagtagagatgcggtttcaccatgttagtcagtcttgtcgcgaactcctgacctcaggtgatccacctgyctcggcctctcaaagtgctgggatttcaggcatgcaccaccgcgcctggcccgtttcctgaactttccatatcttcaatatttactgtggaccaggcactgtgttaaaaccttatctcaatctttagaacaatcctatgaagtcagtactatgattatcctcattttgctcttgaaaatattaaaggtcagagacagaggttaacaaagtctcacagttaatgtgtggcagagttgagttgaaacccagggctgtcagacttggcattgagaaagaaaacttacatagtgaagctatcaataaagacctgtcaaaaagctgtgataaagaattcaactcaactatactaatcgatttgcaccactgtggaaattatttttacggagttcagtaactgcattgatagtaaggacttctaatatattcttactaagtctttgagaatagttgtgaaactgataactaggctatgtgttccaagtggcaatgagagtttttgacaggatacatattgttactttttgagatggagttttgctcttgtcgcccaggctggagtgcaaaggcgcgatctcagctcactgcaacctccgcctccygggttgamgygattctcctgcctcagcctctggagtagctgggattacaggcgtgcrccaccacacccagctaatttttgtattattagtagagacrgggttttaccatgttggccaggctggtctcgaactcctgccctcaggtgattcacctgccttggcctmccaaagtgctcggattacaggcstgagccaccgcacctggccaagatttaatttttaagattaaaaaattggatagattaagagttttggggcagaaaagaaaagaagcatgtgatggttgtttgtcaatgaaacttctgagaaacaagaaaggaggactgcctatgattgtatctaaatgctacaacaaatttgactgacaagaggggcttaggagaccccgcacagaagaggttttaatgaaaaggaagtgaaacaccaagctcacataaatttttaataaacttttttgtgtctatgtcatatttcataatgtttttcctaaatgcttaacctaggaaacacatgtgtgcacacccatgccaaacacacaaatgaatttaacagtgtggtttatgaaatgaaagcaataatagtttgactcttcagaacctcttcattgtggcctatgtcaagctctctaatcttttctcctcaatggtaggccatggttaagggacagatgataaagtacaaggttttcaattgctaactgccaaattttcataggttatagtattactcaaaaagttgttttgtctcatttcttcaaattttgaaataacttgctttgctgactcatctgactatatttttaatgaggactggctttattagcacttttagaaaaaaagctctgcactccacactgaaagtcaaatcaaatagatagttaattatttgtagcgtggagtaatgtatgctcagtctctcctcacaacggagccaaaggtcacaaacatttacagaaaacctacttwtgtcccaggtactctgctaggtactttcctaacttgtctaaagtcacagcataggctgggtatggtggctcatgcctgtattccagcactttgacaggacgaggcgggcagatcacctgagcccaggagttcgagaccagcctgggcaacatgacaaaaccctacctctacaaaaatacaaaaattagctgggtrtggtggtgtgtgcctgtagtccyagctgctcgggaggctgaggmaggaggatcacttgagcccaggaggtagggtttgcagtgagccgagattgtgccactgcactccagcctgggcmacagagcragaccctgtctcaaaaaaaaaaaaaaaaaaaaagtcacaacagataagtcatagagctgggattcaaattcaggtctgtctgaatatagagtattttctgctacattatcagttactgagggtaattgaaaaatttaacacttatcatggaccaggcactatgttaaaacattatctcattaatctttacaatgatcctatttaaaaatctgtagctgtaaaagaattttatacaacatttatacaaaaatcatcaagattcttcatggcaagttaaaatgtttttaaatagtttgaggtcatcttgatagtcattccactacccatttctcagtctcttcagcaaaatttcctttcacttatagctagctacctgaccatcctacactaaataagcagataatttaatcttccaacttcttgaatttgtgtgttcttttatgtacatatgttggctgactggaacagaaggaggcagggggtatatacgagcaagtatggtttattacggacaaatggtagaaaaatgttactaatatccatagataagttccttaagtcatgtagagagactgttattaaaagtttgctgyatttttctattgaatcaagmactagctaccagttacagtgccttctaaacacacagttagctttgctttatcaataaccaaataataaactaggtcccaatggttttgtccacatctagattgttcaggtgatcaggaactcttttatttgtgtgctttagcttttagttcttggttatatctataaagaaaacagaaagaaaaataatcatcaataataatagayaaatttatggtaaggagagaatgggaagcatactccatttcttctttcttggtggtcaagtagctatacagttgtaaacagaatcttcccggagggcttacaggtagaaacaggcagaaaggaaaggattcaaagagttcatttgcatctggattttgtttcagataataagagcacaactgccaaaaactttttttttttttttttgagatggagtctcactctgtcgcccaggctggagtgtagtggtgtgatctcggctcgctgcaagctctgcctccygggttcacgccattctcctgcctcagccycccgagtagctgggactacaggcgcccgccaccacttctggctaattttttgtatttttagtagagatrgtgtttcaccgtgttagccaggatggtctcgatctcctgaccttgtggtctgcctgcctyggcctcccaaagtgctgggattacaggagtgagccaccatgcccggcctgccaaaaacttttaacagcttagctgacatatagtttcctgtgcaaaagtattattttaataaaaatattctcattctggaattctacaagaacgtgacaaacttgtgaacatatgtataaaatttagtaaaatgtggtcacctagaattttaaaatttatactcgcaaagcacctttcctaagaataagatcaacaggtaaagtaaaatatactaaagtaatcactaaagtaaaatatacttctaaccactaargtaaaatatacttctgtgatgcaggcaggctattgggttaacagcctgtaaacacttaagttcacaaacgctaaggaccatttcctcaattctcaatccaaagaagtaaccacagagccatagtctttccttcccttctaccataccttgggcttcatttactattcctcctagcttataatggaatggagagtagtataaaagcataagaaggaacttattccatgaagccaaccatacctcctaggtttctcaaaagatcctgatttcaaatatttgatcataatgtcattatcataaatcactgacaatattaactactgagtaaatagtttaaaaatttccagtgctcatggaacactttccaatgaaagcaaagacctcactctacgtatcatttccaatactacataacaatacacttaagttccaatttattatatacaattgaaagtgataaaaggtttacataagaaattaataaatcataaactgtatatgttgtcttaataaaagagattatgtgagatggttaaccatctaaatgatgcacagttaaatctaaaaactaggtaacatactgcttaactgattttagtcagttaactagttaactggttaacttatttgtaaacccctagacttttctagaaatgttaaatttctactttagatacttcttgtcttagcattatatatgaatctttwaaaaaaattagtgccatctccagcctgggcaacagagcgagaccccgtctcaaaaaaaaaaaaaattagtgccatctaagtagcttttgcaacagttttaaaaatatctctggtaggcttacctccaaatacgaaaaagctgagaggctcctgctgcccccacaaagaaattaacagcaaacagactccaattttttggaataattacaagtgagtatcttgaccaaataaaccctgttgaaacaaaatgttactttaaaaagaatacatactgcttcaataacttcagtgaatacttmatattgagtaaagtaattacaacaataatgtaggatgagggacaaagaaatgctatactctgaattttcaatgtttctgtaacttagtgtcacagaaaatactcaatycttacatgaaagaggaatctttaaagtgactattaactgtaattttcttcccacttataaaaatatgttcatggcaaaaacctgaaaagcaaaagcccattcagatacttattctttctgtgactcctccatccataacttaataacttcctagacataatactgttaattcctttgtgtgtgggtgtatttcaaacactaagccactaaataaactgatataaaagaaaacaraaatcatttatgttctacaagaaacacagaagatatttatttaatttacctgtagccatcaaaacagcagattgagctgtgctaagtttttctgcaggtctggccatatcagccaatccagcacacaccaacccctacacattaacgcatagaaagaaaaaaagtatcacaaatgtggagtaatagttttaactttaaatcaagcacaagacatttttgagatttccgtaagttagcagctataattttagtgtccattcattaagaaaatgtagattacaacaaaaaaaaagcacaatgaattaaaaaactgctttttgaactaattttattttgttaggtacactaagcagtctcacatatctgaaagtcagtagtacatatatagataagatgtatatgtatgcattacacgtacatatatattttgggttttttttggtctacctatttcacatatgaatttatatactctttatatatgtcaggaaccactaaccactagcatggaagatacctaaaagctgttaaggtcatttgtatagattcttcctttgatgttttctgccaatgttatcatttttaaattaaattaaattttagatttggggtatatgtgcaggtttgttacatgggtatattgtgtgatgctgaggtttgggcttctaatgaattattttttaaaagtataaatatcagaaaaacttataattttagttttttggttagatcatttttttttttttagacagtctcactctgtcacccaggttagagagcaatggtgcgatctaggctcactgcaacctccacctcccagtttcaagcaattctcatgcctcagcccccaagtagctggaattacaggcgtgtgccaatatgcctggctaatttttgtatttttaatagagacggggtttcaccatgttgrccagsctggtctcaaactcctgaccgcaggtgatccgcccgcctcaacctcccaaagtgctgggattacaggtgtgagccaccatgcccggccttggctgttacgccatttttctttaacatcagcatatacatggccatttctcttctgtgtttttaacactgtctctattgcactcatgcgtttttgctcccaccagatgagctgtatttttaccaagtcactatgtttgtccccaatctatttatgccagttttacttgttaatgtaatttacatgatttaataaattgtttttttttaaaaaaactaagctggaaattatataggatgcactgtagtgtaatttatccaggatagaaaatgtggagctcagaaatccatacacaaataaaagatttagctttaaaaaagactgattgtcaatgaatatatatttatatcctttaggttaaaataaaatatttaaggtacataggtttttgtttttaggattatccactttgacctttatgattagttatgtggtttcaactaaagtggttacaaaggactctactacagttatatgtttgaaggcatatggtctgagagtcttcatgttatagaacatatgtggcttgcagaagcaactgttatgtgtcatgtatagaattctacagattaattatcaaatactctgggatagtaaaacacagtaagaggtatataaggtaagtatctaatagaagaagtctccccaccagagaacaaaacacagaagtttctattgctatgctgtcatctggagactatgtatgatttcaacatgtacttaaaatagatgttcttaaagagacagatagtcaagaaggcatttatgagtatataatgctgtcaatatctcacaacagtaatgaaccagttcaaataaaccccaaagctattgataaaatcaataaactcctaaactgtggtaaatttgagatcaaagaggcccctaaatttattgtgaatagatgaaatcactcaaactcttttaatgattgaatacttcagcaatcaattccactataaagatatattattactatgtaattttaagtgtaggtagggagagaagaaggaaatggtaatgtaacttccattagtatagggggttttaggatcttttctcaatatgtagatatgaaaaaaaaaacctgctccctagatctctgtaaaatacagctcccgaatgacttatattctaatcttgtcactttatagttgaagagacaaaatgacaaagagactaaacttgcccaaggccataagattgagtcatagccaattccaactctaacattctcaaccacttgaatttacaactgagtttctgaattgttctaaccattttaaaagtacatttaagagaattacaacagcccatcactcaacaacaacaaaaaacaccttgattaaattaaaaaacaggcaaaggacttgaataaatatttctccaaagaatatacacaactgaccaataagtacaataagtatatgttcagcatgactaatcattagggaagtgcaaataaaaacaaagatatctaacacccattaggtgcctatcataaaaacaaaaacaaaaatgctcccccatcaaaagtaacaagtgttggtgaggatgtggagaaattagaacacttatgaattgctggtagaaatgtaaaataatgtagttgctgaggaaaacaaaaaatattaagcagaattatcatatgatctagcaattcaacttctgggtgtatactaagaagaattaaaagtattgacttaaacagattcttgtacatcaatgttcatggtagcattattcacaacagcaaaaatgtggaagcaaaccaattgtccaatcaacatatagaagaataaacaaaatgtggtaaatacatacaatggaatgctattcagcattaaaaagaaaggaaagtgacacatgtgacaacgttaatgtaccttgtggacattatgctaggggaaataagccaactacaaaaagacaaatacattttgattccatttacatgaggtacttagagtagtgaaattcatagagacagaaggtagaatggtggttgccagggactgggagaaggagaatggggaattatgggtacagagacttgcttttacaagataaaaagggttctggagattggttaacaatgatgtaaatgtacttaacgctactgaactgtacactttgaaaatggttcagatagtaagttttatatgtattttaccacattaaaaaaaaaaaagcctacagaccagtggttttcaaactttagagggcattagagaatcatccgaagaggttatgaaaacagagctcactggactccacatctagagtttcagatttagtaggtctgtgatggggcctaacaagttctcaaatgatgccactgcaggtccagagagatgacactttgagaagcacagttatagacccaaactggccctttcaacataaaatcaatgatttgctacaaacagccaccacaattgtttcttttcagctaagtaagaactttaagaaagaaaactttggggaagagtaaaagcactgggcttggagtcagaagtcctaggttctctcatttaccaaatgctaatatttatattcgaataaatccatctactttttgagagtaactttcctcacctatattttggtgatagtaccttcagttctcatactaaattaataataaaagttaacttgggggttctaactagcttaatgttttacttagtaataacattttagaatgaaatttcatgtccatgtggtgcacaattgtaagttttttgataacaagtatgttcccagaaggcctcttatctaaagagttcagaaaaactaaagtagatagttgctttatgtagaaaacgatatgtctgagaatatttgccatgaaatcatctagaggcataccaagaatactctaaagtatatccttcataaaagttacttcaaattagtaaattcctattaaggaatttgtctttcagtagcttccgtaaaaactcaagacttacccatttcataattggagcccagaaraaaactgttctgggacctgaaaaaaaaaagaaaagaaaaattcaggaataaaccaaatatattatacacgtcttttaacagctgtcaccaaattttaaaaaccaaaggatttatcaacctatttttaaccacttttactatgctttttgcatactttgtatttcagttaacatttagagaggcaccacagtatcacagtacagttgacccttgaataacacaggtttgaactgataggttcaactgtatgcaaatttttttcagtaaatatactgccatataaaaatattttagggaaccttgattctaatgtactttcatactagttttacactcaagtaacactctcatcccaaatgaaaatgaacccagtgataacaccccatttttgtgcattttggctgaattactataacaaatagttgggtaatcttaacattaagcagcaaaatttgaaaaatgtaaaaatggcagttgcttccctccaatttttgcttagtatgcaggttttgaaaagtatcaccagatagygcaaactacttgcctttagccttaagtgatggtaatgctacacattctgtcttccacaatttaacatagtccttgatatttttgtccctctcgaattcacagtattcttacagcaaaattcattaattcaatgtcattttaaaatctaccacagtacattttacatattttactccagttatttgtaaatctatgtacctatcaagattatgactttctcgaagctagtggctcaatactattcatacttgtacccctattacctaatagaatgtagaataataaataaaaaggraagttagccagtagagttggaagcagtttatactaacatttattaccctaatatatatgtatgtgtatatataatatacagatatacatatacacrtatatatatatatatatatatatatatatatayatatacatatacacacacatatatatatacacatacaaacaacgttttttttttttggttttttttttggttttttttgtttttttttgagacagagtctyrctctgttgcccaggctggagtgcrakggcrcaatctcrgctcactgcaacctccacctcccgggttcaagtgattctcttgccttagcctcccaagtagctggkattacaggcrcntgccaccacacccggctaatttttttgtatctttaatagagacagggtttcaccatgttggccaggctggtctcarrctcctgacctsgtgatctgcccgcctcagcctcccaaartgctgggattacaggcgtgagccaccgtgcccggccacaaataacttttaaagtactttaaaatcataagttgtttttatcagcctgatacttaaatattgataagtctgtcttatgcttttaatagttttaaaatatgtttgctgattttctaatttaatcctaaagtcctacagcaatctaagtttcattttctcattcttcagagaagctgggtatcattagaataattcttcaaacactagaaagaagatcacggcacaaaccctgtggttccttgtgggactactcagcccattataatgttaaactttattttctcacatacatctggtatctaaccatttttacattttcttgtgtacgttcgaattttccgtattttaagttgtagaataaatctaaaaacagtgctgaaacagctggtgagagaatttaaactatcaaggagttctaaattttgatgttcttacaactgagtgaaaaacctatctatattcagtttctgttatccagttctctaagcagtattgttctgggcacagccaccacacacatagaactctagccacatctttttctctctacaagatagaaaataatttagtttcttctttggttaaggttggaattgaagacatttttacgaagggaaaaaggggaatataaaagaaaacatgaagccactgagtttcagaatatataatcctaatttaactaaatattagccaagtcagcggttctcaaccaggagtgtccccccaggggcatttttagttgccccaactgtggtgccccaactgctgcagatgctgctgctgctgccgctgctgctgccgtctagtgggtagaggcctgggatgctgttaaacatcctccaatgcgcaggacagccgctcccagaaagtagagggttaagaaatcctggcctagggcgactgataagctaggcaaacattcaactagtttcatgctattttatggctcttcagttcatgctgtcccttctcaatatcctgcttagtctttacctaactcctatccatcagaaactcatctcaggttgcatctcctcaaggaagccttaaaaaacaaacaaaaaaactccaggttaggctaaattgctccttctcttaactaccaaagcagcctgtatattcttctatcattttctgttaaaatgattatttatgcatctgtcacattaacccgaagacaaggtccttttcttaatcttccttgacaaataataggtatgtgccaacagaactgaattggatccaccatgttcaggatagatgctaatcaaagatattcaaactttctgtctgacccagatttgcctcgacactgcttcatcctcaaggctggaatttgctgttttctcatctctagggacatcaggttccctttatgccaaggatatattagatttcactcattagttactctactcttagaccacagctctcttcccctgagtctgatgccataatgcattaatcctataagtcagtcttctcaaactctctggaaatttagggtgagattctgggattcctatcattacacctggttcatttttctttgtcatacacagtgtctctggctcatacacagtatcaattactaagtttagtttttatcctcgcatggagtttcgcttcatcaatcaagagtcagtccatgtattgttttagtctctggctgaatgggtgttcatttttactctgaactcttcagcagacttctcttgttctatttgaaagctgaagtttctgtcaccccaaaattgttttctgagtaaagcctctagattctggtttcaagcttaaatggctgacaggcttaaatggttgatcctttggggttaatagtcgatcttttcagtaggtttgcctggtaactaatttactaaactgcctagagctaggtaatagttttacaatattaacaacagcccttccccaccaaaccaaacaactgaaaaaacttcaaacatcaaattatggttgctagaacctggaccaagagaggtattttagtgagtgaataattttaaactatgaaaacaagctctaattttagtttaacaactgctatgtactaaacagaaaaatagcagtagccaatacataaggccttctaaattgctaatttttctgagatactaaaagatgtggacaagtgacaaaaaaatcagtttaatatctataactgcaaacagtgttttcttaactgttaaaaaaaaaggtcggccgggcgcggtggctcatgcctgtaatcccagcactttgtgaggccgagatgggcggatcacgaggtcagaagatcgagaccatcytggctaacacggtgaaaccctgtctctactaaaaatacaaaaaattagctgcgcgtgstggcaggcggctgtagtcccagctactcgggaggctgaggcaggagaatggcgtgaagccgggaggtggagcttgcagtgagccgagatcgcaccactgcactccagaaaaaaaaaaaaaaaagtcacacaatgggttaacaaaattttaaagaaaacttaaccctttcattgtagctaattaacattcaattaacatttcttagcttttttttcctgtaagagtaaataatatgtcaaataaagctagacaggtaaatttagacatatataaaacagatacagaggctgtcttccagaaaacagcaattgatcaacagtggatatggtagcgaaaaaacattccaacttacttcaacatttctaaacataaagttttgacaaaacaaagcatttagaaataggtatcactcaaatagtgacaatacaatgtcacatgtgtcattctagacctggaaaacacaggcttatgttctgtacaatgacacagctattctcataggagagcataaaaatagataattatgacacgtgaagtgattataataccttaatattagaataagcagawgtataaactaacagatacctggctaacatccattatgataaatgaaataacttgattaggtggaaaatttgaactgctgaaaatatactgaagaaaaatctcctcataagacattaatttatagcccaagatgaaagaaattgtccacatcaaacatactatatattcttttagaaaaagaattaatacattttcatcttgtttctttgaacagtactactggatgttgaagaaggcctccaatgctgacaatttagaaacattaaacaagtatttaaaatgtctatacatttaggccgggcgtggtggctcatgcctgtaatcccagccgtttgggaggcggaggtgggcggatcaccagaggtggggagtttgagactagcctgaccaacatggagaaaccccatctctactaaaaatacaaaattagccgggyrtggtggtgcaygcctgtaatcccagctacttgggaaggttgaggcaggggaatcgctagaacccaggaggcagaggttgcastgagccdaratygcaccattgcactccagcctgggcaataagagcgaaactccgtctcgaaaaaagaaaaaaaaaagtctacacattttaaactatgaactatgttcaagaatgaaaaatactgactataagttattttgtgttttattgccttatttttaaagtgaaactcatgtttttaaattctaacttttcatagaatttgagaaattctacaagtgaatatcataagcaaataataacagacataaattttcaaataaacaaatttagttgccttgaacttcaatgaacctattaataaactgacataaacttacttcctaatttccttatttgagagaaattactgttaataaaatattatatgaatcctacccagaaagtaggccacctatcgtatatatgattccctccctaagtaaagactaactttttggaacagaataggtaatttttactctcaagcacatatacacacttacaaatactggattgaggtattcactatatccctctgtgaaaaataaagtttcttactgaatgctaagaggtcataaaatcactacatttccctacctcttcccatccctttcatgccactcctttatggtttgttactttttaacacccctcttaattccttacattacacaagttcacctgtttgctatcatgtgacaaactagatacaaatccttagaatatgtaaaggttaatctttgacatggatactgacggccaaaaaatcattcatttttatttgtgccaaagctagttctgatttaacactaagaacatgactaagctaccattttagagccatataattttaatattttccacaatgccttggaaatagctatcactaaaatagtacccaaaacatcatgggtagataatgtttttaaaaatgttgactgaaaatacactttggtttgaaattccagagtaaagaacaggtaaagagactaaaatagctaagatgcattgtagggatgatacgttttaaatttacttatttcttcaggtacaaagaatcagttacttttagatttagaaagactgttgaaatcatctactgtaggcactcataaatcaggcaaatgaggcccagtaaacaaattacttgtttaaaataaataatccaacaaggataaaaaactagatccctaaatcctaatctaacaataattatatgactttccccaatgaaatctgagtttcctgaaggttctgaatgtaagaaaagtcctaagagaataccaaattatagattattagctggaaaagactttaaggaaagtccaagctccctcatttttataaatgaaaaagatgaggcacttacaagttaagtaatttgtcttacactcaggagagttctggatagagcaacgactagaacacagtttctttgatcctagtcctctttctactgtaccatacagcactttaaacatatttcattctctgttataagcaaaattaatatttttacatgacctggaaatgataaactatttatagcttagggctttcttctcctttagcacatctgcataaacagttctaatttcttaaagttagtttaaaagcaggatagcacacaaaaaatatgttaagtgttgaacaactgcatcaaggatgataatctgctctgttgcccaggctggattgagtgcagtggcacgatcttggctcactgcaacctccatyttctgggttcaagcaattctcctgcctcancctccagagtagctgggattacaggtgtgcaccaccatgcccagctaaatttcgtatttttagtagagacagggtatcaccatgttggccaggctggtctcgaactcctgatttcaggtgatccacacgcctcggcctcccaaastgctgggattayaggtgtgagctaccgcgcccagctgatattcctttttatgaattcttctgagaatacaaactctgtgtgggtgggtttcgttattttatccactgctttatcctgagtgccagaacagtgtctaatatacaataggccctcaataaatattgaataattcaaccttcttggtagctgattgtttgaagatattctatttttcaccaatattttacaattgtatttgaaattctaatcttacatctattttagttatctcttaactttaaataagttattactttaaaaaataatatatgtatatttagtgtatttaaacttaatatattaaatatacacttaagaatatatatggacatatattaatatcttagactggcattaagattcttcactgacaatctgtggcaacaaaataagttctaacagagatgctaaagaactgtgtaattcaaactatgtaggtacgtacactcattatttgatccatattagattttatttacatataatagaacaatatatatttgcactaagttgtatttaaccatctattgtaacatcaattctcttagcattgaatataaaatttttatgatacagatatttccttataaacactgataacattggttcatttagtttatttttatttaaaaagaaatatcctctaggtctttaaaattaaacaagctaattatctaggaaaaatgcaaatattattcttatttagactttaaagtaacttttcccatgagtcttcagagggaacccatgtaatgttaagaatgatattctcagcaccagcacattaagcactgcaacaagtttcacagaactattttttcaaaagctcttccatgtaagccaaaatgtaattcagtaaaaggagagctataatgcgttaaaatgatatggttcagatagctgtttttgggactaacttcaccaaaggatagtttttagactctttagagctgtggtcttccagctcctcttgaacatatgccctatcagtaaaaaacaatttgagtatacatcctgtttataaatcatttatatatttataaattatatagaattactgcaataatatatttttgtattacagaatgtatacacaatgaaaaatttaagtggatgaaataacagtaaacgttactggaagttctataattttcttcctacattccagtgtttcattgtgtgcaccccttgggatgacttaccccattttggaactcacaaatacaaataaatgacactcctccactgataatttttttgttttccttaactaagcttttaagaaaacattgggccgggtgtggttgctcacacctgtaatcccagcactttgggaggccaaggcaggygkatcrcctgaggtcaggartttgagaccagcctggcmaacatggggaaaccccatctctactaaaaacacaaaaattagctgagcatggtggcrcatgcctrtaatcccagctactcrggaggctgaggcaggagaatcrcttgaacccaggaggccaaggttgcagtgagcccagatcacaccactgcactccaacctagggaacagagcaagactctgtctcaaaaaaaaaaaaaarraaagaaaagaaaagaaaagaaaaaataacactgggcaacataacttcaagattatttctttgacaaacactggagtacagctatgcaactggctagggtggagtcacatatttttatagtcaggtgggggataatgcggggactgacatccttttttgtgagttgaggaacttgaccaggacacacatttggctagaactctattccttctctacagtggcagatcatgacatgccagcaaaaacacataggcaaatggataatgagagcctcaaaattctggctcacaggtcagagatgcaatactgtaactaaaatatgtatctatacataaaaacacattagtttttttttttttttttgagacagaacctcgctctgttgccaggctggagtgcaatggcaygatctyggctaactgcaacctccacctcctggtttcaagtgattctcccgcctcagcctcccaagtagctgagattactggcacccgccactacacccggctaatttttgtattttagtagagatagggtttcatcatgttggtcaggctggtytcaaactcctgacctcaggtgatccacccacctcagcctcccaaagtgctgggattacaggtgtgagccaccgtgcctggctaaaaacacattcttgttacctgtcragacatacagtgtcagtgataaaattaaatctcaaaaatctagaatcagcaatgtatgatttccaactgttaatattgtagcatttcatatcatttaataaactccttgtaggtgaatctagaaaaatgtttcaatgacaattcaataacaaatactgttaggcaaaatagtatgcaaaatccttgaatattcactctggataaactcttaagacaataatcagtgtttccttagattttattcaatactcatcagtcaacgtatttttcaagctcctccatttctacactggtgtgcctccaacttgtcgatcataaataattctgctgtaatagatatccttactctktatgttgctcaaattttagaactgacagttattgagagtctaagtgcaaacgctgtgctacatgttttagagacattagatcatctgattttcacaacaatcctgaaatgattacaattactcccattttatagatgagataactaaggcaggaatttagggtcaaggtcacacagccaagactgaaacgtaggtctatttcccttcaaagcctagctccttttactacactgaaaaagggggttaaaataactgaacgaatccaaggattttcaggtgaaatgcacatcctgcaagtgaaaggtaatccctcttcattctgaaagctgagtagtattttaagcagtaattacaggtggctaaaaactaaaggcttggaaaggatcaaggtaagactaccctccaattttgtattattttaagtagtttaaaattactcttactctgtcatgcccttatcctacagctaaaacacaaagcttatgaaggtcagggttgacttcacattcagttgactctgtaaagcccagattattacaaaaagcatagctcaaccctccttcccgaaaatctttgccacaaaacacagcataattccaaaaaaattgaatgttaaaagaactaaaaggcaaataaacaaaaactttttaaatcagtaacaaactgtccttaatgatcagttttataatgggttcaatgttgcagtaaataatattaagggttagagtataatccagatgttcaattcattccattatcaaactggaaatcagatttagtaaccagttcagactccagagagctggttcataatcagataatgggggaactagacaactttcctaatgataccaactacagaatacagattttaactatgtaggagaataaaagccacttttcgggtagcacttcagtctttcaatttacaacacattttctagtttgccaagtcttaggcttgaaacagacctcagaatatatctgatgttagcccctagcaaataagtattattacaactcactttatagaagaggtaacagaattctagatctttaataaagggattggaatctttcagtttcttacagttttttttttcaaccacaagaacacagttttccagtaggcaaagagagatgtaacgtttactgagcatttacaaagagtcaagcacatatgttatctgtcattctcatagaccgcgtattacacaaacagagatctaggcttttgctcaaggtcacaactataagtggtagaagagaatgatatccaggtctgtccacacaaaaagctctgggtagagcttgttcaacaatttcataaataaggatagacttaaaaaaacacactggacctatgggatgagaaatgacactgactcaagcctggatgaagtaaagcatgcagtttgggggagggctcagtctgcaggcctctgccagcagcagctgaagaaagtgacctttactccaaaccctacagtgcgacaaaccacccatccagctctgcctagagtgggtatgccacaattcgaaaagagaaagagaatgagtgtttcatggtggccccagacagtttggtggccgcagaagttgagaaggctcaaatctggagatcaggtttgggttggagtcgtgcgtaagggagcggatgtcacataggtggggaagggagctgacttgagatacgttggcttaggaagagatgttgcaggagagagggtgaaatgcacaggctaggagagtagacggcttcacttgaagggaagggattggggctgtggatgcctctagaggcagtygtcagagggcctctaaaaggtccattttagaggaagcgagaaggaaggtctcgataaggagccattcagggtccattacctgctggatggttgtacaacggcctcaatttctcgggcagcatcagctccactttatcgaggagccggtggtaggtggcccgcaggcctcgggcaccggcggccgacatcgccgccgagggatcgttggcagccgggtgggagcgtggctgtgttctcgtccctggctgacaacgaaggggagctagtcacttttcctgccacgacgactcgcgtccgcctctcgcctggagtacccttcccgcggctttccctgcccgctgtgaaccgaaaagctgcggcccgcgccccgcgaaggttgagggggcggaggctgccgactgccagcccccggtccgcctccggcccccggcaggagagagggaggagccatggcaacaggtgccaaaataatcacctcaccaagtctgcgctgcgccctgctggcagcgcgcttgcgcargccgagctgcccgccatgattggcccgccccgaggcgcgggcggggtcgagcggaaacctcctccttctccccatgccctcgaggccatgttggagaagggaaagtgaagctgcgctggttctactgccctttcactttgattaagcaggcccgtagttaaaatgggtttttgggccttcagtgcctaaagatgatgccgcacaattctcttgcttcttttcactggagactcgtgagcgagagactacagaattgagtagcttctctctctactcgtcttttatccctagcgacttaaggatctggttagagtggcccgaatgcattcttccagggtgagggcagccgcagcacacaccagcctcagtccccrgggtggtcgtcatctcgcgagaaagggttggcggggagggtatccaggacgaggagagggaggagtcgccatcgcctccgcctccgcctcctcctgttggaggggggctgagggaggagactgttgctgatctttggatgttctggttagtctaagaaggagagtatgaggcgagctccggcccgggtgcggccgggcttcrggggcccaggcgccgctgctgccaccgccatctaacgctgcgccctggaggyccggcgcgcggatggtgccggtgcggctcgggtgttgaaacgggtgtcccctccccctcctcccctcccccacgcggtggtctcccctcccacccggctcaggcagagccatgtctcggggtggctcctacccacacctgttgtgggacgtgaggaaaaggtccctcgggctggaggacccgtcccggctgcggagtcgmtacctgggtgagcgggggccccggggcggaggcgctgaggtcgccgcctagagtgggggagggggcacgctgccgggtctgttggaggtgggacggcgtctcggtgggggcgcccggagactctggggtgttgggtggggccttggttgccgaattccgtgccggtgcctcccccagtcaagccccctgtgcatgctgccagccgccgcccttgctgggtttttctcggagggccgggccgtgggcagaaggtactggcttgtaaaggtgttggggtcgctgatgggttgggactcgggagacttgcggaacctccaggagctgccgcgtttagagcaaaagttagctcttttgctcttttccagcgcgctttccccgctcagccgaagaacctaagttgttgcccaccctctccttcaatctccagagggtttaggtgtcggctgcgacgcgttgaccaccctcagggacttcacgctccagacagaatccgtgtaaactgtttttgcggcgctgagccaaaacctaaaagtgatagctgagctctccccacccccgcgcgctctcccagttccactctgctcttcagttcgttttgaccgcttaaaggtggtgtagggtttcacgttcctcttcccacccctggaaaacacacttggcatttacagtttcgtagttaagctttctaaaaacaaccttcagtacttgggggaacagtattccacttttttcgttttgcataacattttttttttgaggattctaggtcacgcccgagtcaactaaaaagtttggtttcttaaaaatggacgtacttagtaaaggtcttttttgtttcttcctgtatactcttcattactctttctttctatttggagatacggcaaacaacatcataaaatttttttctttccagttttgccacttgctagttaaaaagtgtttgttgctctcatttgtttttgatttcaagtaaagagaagaaaatgaaatctcattacaaccaacagttctggtttgtaaattatttaagaaaagttagcatgcaattttttaattctttttagtgtctcaagtaaaatacgaatacattttgtttataaaaactcaataaaaatgaagcaaaaatccctttgatccctcccattcaatttcactccgccacccttagaaataatattttctgttttctgaatattcttccagacctttttgtttgcattcttacaagtacatatgtacatgtacaaatgctggggtgtgtgtgtgtktktgtgtgtatgagagagacacctgagtgcatggtgtcatattgtaaacattgttttcacttctccacattttggagatctttccatggcagtaaaaatagattgattctgtcttttaaattattacatagtaggtaacattatgaagtaccatagggtactcaacctttcttctttaagtagacgttcgcccttacagcattttaatgaacatcattctacaagcttctgtgcatttgttgtaggataagtacctagagtggtgattaatcattttaaaattgaacatagctggagtctggtttttaaaactatttaccaaaaaaagtgtgcagtatttcttttagaatttatttgcggagaaagaacttaattttagcttaataaaacaaacgttaacattgttttgcatggatacatttataatttggtcctttatctcagttggacagtttaagtacttgtatatagttctatattttagtgttttcttttggttcagttacttcagctatatctacaaacgagttaattaaaatataacaaaaccatatacctgcttttccccctcctactccaactccctaatggaaatggaatttgtgtattgggtctaggggaattgaagggttcactgactatattagaaagcctgaattacagtttttcaaatgtgtatgtatacatacagggagttctttatcttaaataatattttagatatgataatatatactcttaaaataggacatttttggaatgacttcctttaaaagtggttttctaagtacttgaaaatactttttgaaagtatcgaaacttgaaaatgtttgcaaagaactaatttattggcctttacccttagtagacctttacactgttattcagctcttctatactacagtgctaatcctggctttgcattcaggaagcagcaaaatccacattggtaatgtttgaattagtgatggttttttttaaaaaatgactttccctcccagttttattggggtataattgacaattaaaaattgttatatttaaggtgtaggacttgataacttcatatacaatcaagttaattaacatatccatcatgtcacataattaccatctttttttgtgtgtggcgataaaatgactttatcattattattaattttatttttattattagataaaatgactttttaaagtacagtactcttggccgggcgcggtggcttacgcctggaatcccagcactttgggaggccaaggtgggtgatcacttgaggtcaggagtttgagaccggcctggccaacatggtgaaaccctggtctttactaaaaatacaaaaattagccgggagtggtggcgtacgcctgtagtctcagctccttgggaggctgaggcaggagaatagcttgaacttgggaagtggaggttgcagtgagccaarattgtgccactgcactccagcctgggcgacagagggaaactctgcgtcataaataaataaataaataaataaagtatggtacacttataaagccttccttttaaaagtcaaattccaagttaggattttcctaaggaaatagattccttttttaaaagacttcaatatttaaacattacgattgtctatctacagggttgtagatttaagtatttttctgatacattttcattatttgtatttctacagattttttagcagtgaattactgctaaatagtaaaattgggatagaacaaatagataaatttttcttgtagcctttacatttccagttatttcaccatagcatgtgccctttcaatgttaatattcaagctttgtaattgattttacttaaactgattaattatctcctttcttcccatcaaagaaaattatacttcagaaaacttcctattatgttgtgggaatgaagatgaataatttcccagatgttatttatgattaaaagatatgtttacttagagctcccaaatccacaagattcacctgggccaacagagtgttgttttagactagcatggatttagaggataggccagggattttaatctttgtgagccctatctaaatttcaatgtaggattcttttttttggtgggaggyggggggcagggtgaggcagggttttgctctgtctcccaggctggtgtgcagtggcaccctcatggctcactgcagcctccacgtcctgggctcaaggccatcctcccacctcagcctcctggaatttttttttttttttaaagaataattatcaaagtcagagatacctgtaggtttaaatgtttaaatgtaatagtttctcaaattactgtatactaggtgtagagtagtgcttttggaaatcagtgatttattagccacacagattttattatcccatatatatacggttttgtaaagataaacattgttaataaaataaacttatttcaatacattgcttgtttctactcatatttctttccttttggacagacactcctacaactttctaacccttctaaattaaaagatagtaattgataaaaaagtaattttaaggtacttctcaagggagttatttattataatgtataaaatgtgtaaattatgattaggcagccagtgacaattttttagtggagattgaatctcatctttttgtaaggagtttatgaagtcagtgtcctttgaatatcattagagtcagtatgtactgaaatggataattttgcgtgtcgattactctttagtgcatcttgaatacatctgcattctagattaccaggttcttcataatatgttgccaagttacagtgtatttattatatgaagattagtaacttctgacttttgcctctttttttagccattggggaaaagttagtgaaatatttgtattttgtttctttagtcttgaaatttcagtgaaagctgaaaaatgtatgattttagtattgaaaaatgacggtcaattgtgacaaacgtaagatatactgataattccttaaggcaggacaccaaaggcatataagtaatcataacaaccatagacactatgatagctctactgtgggtttcattgcttcctaaaataggatgaatcaagttataagtgcttagaaggtttagaagcttctggtagcatggagcttatgttacaagtatgctttaggtcagtgtttttaaaatgttttaaaaatgatccatgataaaagtacattyatgtggcaacctgtgatatacacaacgaaaataaaggattctctaggtgtatatataaaccttactagatgggatgcattctgttttttttcatattgttacaactgttggtgttgaactggtagagtacgcactaatgagtctcagcttgaggtttggaaaattgttctagatggtgtgtagttcttgtaatttaatgttgcttcaggtttaaggtgggcaggcttccccaagtacttgaaggagattaaaaaaatttttttttaaacactgctgatggctccacagggaaaatgtaaatagtgaaacttcatgtacatcttggacaaaataactagggtcgaacacttttaaatagatatctattgtgggattgctgacttgtatggtaagtatgtttaactttataaaaaacttccagactgtcttccaaagtaattctaccatactgcattcccaccagcagtatatgagagttccaattgctccacattctcatcagcatttggtgtagtgagtcttcctaattgtagccttcatggtaggcgtgtagaaatatatcattgttttaatttgcatttctctttttttgtttttgagacggagtttcgctcttgtcgsccaggctggagtgcaatggcatgatcttggcttaccgcaacctctgcctgctgggttcaagagattctcctgcctcagcctgccaagtagctgggatatgggcatgcgccaccatgcccagctaatgttgtatttttagtagacatggggttttgccatgttggtcaggctggtctcgaactcctgamctcaggtgattgacctgcttcggcctcccaaagtgctgggattacaagcatgagccgctgcgcctggcctttaatttgcatttctctagtggttaatgatgttgagtatcttttgtggcttttgtttttgtcatccatatagtctggttaaatgttcaggtttacctttttaatattgtaagaattctataattctttatataacagtccttaatcagatatgtactttacaaatattttctgtcagtttatgtctttttcttaacaggttcttttatagttcatactttttatgtcctatctaagaatctttacctaatccaaggtaacaaagatttttactttttttttcctggagattttatctttttacctcttacatttaggtctgtgaacaatttcgagttaagttttacatatgttgtaagagtcaagtttcatttctttgcatattaatgtgcaattgatctaacagtgtgtggaaagactacttttttccctttgttgaaaatcaattgaccataaatgtttaagtcaatttcctagccacattccattgatctagcttcatgtctttataccgaggattgaaatcagctagtgtgatactttaaacttggtcttttttttgagacagagtcttgctctgtcrcccaggctggagtgcagtggckcgatcttggctcactamaagctcygcctcctgggttcacaccrttctcctgcctcagcctcccgagtagctgggactacaggcrcccrccamcaygcccrgctaatttttttgtatttttttagtagagatggggtttcaccgcgttagccaggatggtctcgatctcctgaccttgtgatctgcccgccttggcctaccaaagtgctgggattacaggcgtgagccaccgcgcctggccgaaatttggtcttttttaaaaaaatttatagttatcctggctattctgaaccctttctatttccataaaaattttagaactagcttgtcaatttctacaaaaagacttgggattttgtgttgaatctatatattatttcagggagaactgacatgtttacaatatgaatcttctcatctgtggttctggtttgtctccgtgtattaagcattctttgattctctcagcagtgatttgtattttttggtgttaggtttatccttaaatatttcatatttgtaatgctattttagatgatatttttatttatttttactttttatttgtacaaatttatgggtacatatgcagttttgttacatgcatagattatgctgcagtcaagtgagggcttttaaggtatccatcacctgaataacgttctttgtcctcattaacgaatttctcatcatsctcccacctcctcattcttccactccattatgtatcattccactctgcatctgtgtgaacacgtttgtttagaacacacttatgagtcagaacatcatacttgtctttgtgtgcctggtttgtttaacctaagataatgacctctagttccatccacgttgctgtatatgtcatgatttcattcattttttttttgagatggagtctcactctgtcgyccaggctgtagtgcagtggtgagatctcggcttactgcaagttccgcctccgaggttcacgccattctcctgcctcagcctcccaagtagttgggactacaggtgcccgccaccacacctgactaacttttttttgtattttcagtagagacagggtttcacagtgttagccaggatggcctcgatcccccgaccttgtgatctgcccgcctcggcctcccaaagtgctgggatcacaggggtgagccaccacgcccagcctgatttcattctttgttatggctgaatagtattccattgtgtatatataccacattttctttacctgttcatccattgatggacacttaggttgattccatatctttgctgttgtgaatagtgctgcagtaaacatactggtgcacatatcttttagatatattaatttcttttctttttgtaaaaatctagtagtgggattgctagatggaaagatagttctatttttaattcttggagaaatctccatactgttttccatagaggctgtactaatttacattcccaccaatggtatataagagttccctttttttcacatgataaccaacattgtctgtctttttaataaaagacattctgactaggataaggtgatatctcattgtgaatttgatttgcatttctcttatgactggtaatgttgagcattttttcatatacctgttgggtgtatgcttttgaaaaatgtctattcatgtgttttgcctactttttaataggattgttagatttttttggttgttgaatcgtttgagttccttgtgtagtctggatattagtcccctgttggatgaataatttgcaratattttctgtcattcaacaggattggttgtctcttcaatctgttatttcttttgccatgcagaagctttttagtttaattgagtcccatttgtctgttttctagtatctttatagttttgggtcttacacttaagtctttaatccaccttgagttgatttttatgtattagtgagagataagagttcaattgcattcttctgcrtatggatatctaattttctcagcaccattgattgaagagggtttcgtttccacagtgtatgttcttgtcggctttgtcaaacatcagttggctgcaagtatgcggctttatttctgggttctctatgctgttccattgacctgtgtgtcttatttttataccagtaacctgctgttctggttagtatagtcttgtaatataatttgaagttagataatgtgatgcctctagctttattctttttgctcagcattgctttggctattggggcttctttttggttccatatgaattttaggattgttttttctaattttgcaaaaaattaacttggtattttgatagggattgtatagaatatgtaggctgctttgtacagtatggtcattttaatgatattcttctgaatatccagtgatcatgggatgtttttccatttgtgtcatgtataatttcttttagctgtgttttgtagttctccttgtagggattttacctctggttaaatatattcctagtttgtgtgtgtgtgtatgtgtgtgtttataatttcttttttctttttttcttttttgagacggagtctcactctgtcacccaggctggagtgcagtggcacaatctcggcttactacaacctccggctcccaggttcaagcacttctcctgcctgagcctccagagtagctgggactacaagtgcgcaccactatgcccagctaatttttgtgtgtgtgtgtatttttagtagagacagggtttcaccatgttggccaggatggtcyygatctcttgacctygtgatccacccacctyggcctcycaaagtgctgggattayaggcgtgarccaccacacccggcctttttttttttgttatttgtagctattgtaaatgggattgtgttcttgatttggttttcatyttgaatcattattggtgtgtagaaacactactaatttttgtatgttgattttgtatcttgcaagtttactgaattcatttaccaaatctaagggtttttttttttttttttttgagacagaatttcattctgttgcccaggctggagtgcaatggcacaatctcagctcactgcaagctctgcctcccgggttcaagtgattcrcstgcctcagcctccyrmgtagctgggattacaggcatgtrccaccacacccggctaatttttgtakttttagtagagacagggtttcaccatgttggccagctggtcttgaactactgacctcaggtgatctggccacctcagcctcccaaagtgctgggattacaggcatgagctaccgcgcctggcaaatctaagagtttttgtggggagtctttaggtttttctagatataagatcatatcatcaggaaacagggataatttgactccttcctttataattttgatgccttttgtttcattctcttgcctgattgctctggttaggacttccaatactatattgaagagtggtgaaagtaggcatccttgttttcttccagttcttaaaggaatgctttcatcttttccctattcagtatgatgttagttacaggtttatcatatatggcctttattattttgaggtatgatctttctgtgcctagtttactaagggtttttcttatgaagggatgttgaattttattaaattcttttttcgcgtctattaagatgatcatatggtttttgcccttcattctgttgatatgatgtatcacatttattgatttgcatatgttgacctatccttgcattcctggtataaaacccacttgatcatggtgtattatctttttgatttggtgttggatttggtttgctagtattttgttgaggatttttgcatttgtgttcattaatctgtagttttctttttattctgtatcctttgttttgtgtccttctttggttttgttatcagggcgataatggccttatagaataagttagggagaggcctgtccttgattttttggaatagtttcaggagtattgatattacttcttctttgtacatttggtagaattcggctgtgaagccatctggtactgggcttttctttgttgggagattgtaaaaattactgattaattcttgctgctcattattggtctattcagattttctgtttctttctggttcattcttggtaggttgtgtttttctgggaatgtatctatttcctgtaggttttctagtttatgagtatatagttcattatagtctgtgatgatctttgtacttctgtggaatcagttgtaatgtctcctttttcatttctgattttatttggctcttctcccttcttttcttggttagtctggaaagtggtttatcaattttttttatctctttgaggaaccagcttttcatttcattgaccttttgtgggttttttttttcagtccatatttcatttagttctgctctgatctttatttcttttcttctgctagttttgggtttggttttttcttggttttctggttcctcgaggtgcgttcttagattattaacttgtaatctttctcctttttgatgtaggaatttattgctgtgttcttcttagcactgcttttgctgtatcccacaggttttggtatgttgtgtttacattttcatttgtttcaaaaacatttttttaaatttctgtcttaatttcttcattgaccctattgtcattcaggagcatgttgtttaattgttgtgtatttgtaaggtttgtaaattttctcttggtattgatttctagttttattctgctgttgtctgagaaggcacttgatgtgatttcagttttaaaaaatttgttgagactttgttttgtggcttaacatatggtctgtcttggagaatgttccatatgctgatgaaaatattgtatattctgcagttgttggatagaatgttttgtaaatgtctgttaagttcatttggtctaaagtccagtttaagtccagtgtttctttgctgattctttgtctagatgatctgtctaatgctgtaagtggggtgttgaattttcacactattgtgttgcagtgtatctctttctttaggtctagtaatacttgttttatgactcttagtactccagtgtcgggtgcaaatatgtatttagaattgttatatattcttgctgaattggtctctttaatattatataacgactttcttagtcctttttttttttttttaactgtttttagatggttttttctcttgccatttttaggattcactcttcactttgacttcagacagtctgattataatgttgccatggtggagacctttttacactgtatttgtctggtgattgctgagcctctcatatctggatctctaaatctcttaactagcagtcatctgtcctgtgccaaggatgaaataattttgtgttttgtctctccttggtagagtttgtcacccccaagtaagaactaaggctctgagaaaataagttttgcccaacctaagtgtagtatgttcaagtcagatatttaaacctaatccaacatttcttgccccaaccatctctataagtaataattctcaactagtctagtaaaggagataggtatgtgaataaataacttacaaagttgtaatttatttaatggtttaatgattacacaaccattaaaaatgagcaatagctgtatatttattgtcattgaaatacattcaccatgtgttattttattttatttttttgaggtggagtctcactctgttgcccaggctggagtrcagtggcatgatctcagctcactgcagcctccgcctcccagkttcaagcgattctcctrcctcagcctcccgagtagctgggactacaggtgcccatcacyacacccggctaatttttgtatttttagtagagatggggttttgacatgttgatcaggctggtcctgaactcctgacttcaggtgatccacccacctcggcctcccaaagtactgggattacaggtgtgagccaccacgcacagcaatcaccatgtgttattgagtggtaatacagattccagaacagaatgaatatcatgatcccagtcatttattcactgattcagcaaacgtatattgaatgcatactttgtggcaggcactgtattaggtatttggaatacatgggtcaataaagcagtgttcttatggagtttataacctattaatataaaagaatgccagagtagagtcagaattataagaggcagcttgaagtacagaaagacttgagttggaagccacaatggtaagttcatccataacaagtgtgtaattcttgggagaagattcttcatagctctttggatttctgaacatcttcggagcagaggcactagtcgttttgttctggactatcttctcagtgaggtttatatagtgaatagccttggaatatataacaattctaaatatatatttgcacccaacactggagtactgagagcctcttgagccaaggacaaatttgttgttcagtttaataatgtctccttagggataaaggtcgggcaggtttgcttgataaaagatttaggttccccaagttcaagattcctcagctgtgattaaaacccattacatgcacagcatctatccaggcatcttcaagtttccctatgagacttggattacaggaagaaccaatgtaaacctgaagctcatactgcttgccatacatgagtagtaaatttttttgcctctgacttaggagtttggtgtcttttgctagcatccaagaaaggtagcagtccaattggttaccttgcaaataggccagactcttcacagcttttaatagcattcagatgtgagtttattttaattttaatttgaggaggctcagttttattaaggtactgttcttattttgtggtgggtttttgcttctatttcttggtattacatttaattactaaaagggtagtggatgtttttgctagtttgctctagaagcacactttatgagatgtctggacgatgcaataaattttatctccaaagtcatgtataaaaatgtcattcaaaagctatctatttaaccacaatgtgttatgcctctatacatgttctaatgtgcaaacgtcatatagaagagttcttgctaaaacagcttactttatcttctattcttaggttctgccaccattttctccagactgaagtggctagagccatgtttcaaacgcaggttttaaaattttgacaaaaaagtttccaatactttaatattttaatgtgttttaattgctgtcatattgttaatttgaatactttgtttcttaactcstataactcaatgagattaccaatcctttgaccaaaatgaaatgagtttttaaaaatttatcttttttactgaagttagaatctttttacaagcgaaaatcagatttgaaaagttaattacctgaagtacaacctacttcatgaaaacatgttactgaatttctctaggttgttttatttcagtaagtttagaaaccatagagcatctccctccccaaaataaaagcccccataattatccataatttttttttaacttatatgttcatcctttacctagccatcttaccagttaaataacatggagaaagaagtaaaacaaattggcttcaagaggctcttgattttgacatggaatggcaagaaagtgcaatagagaaatctgccctttgtgacagtatacagaaagtataggcagatacaattttatgagagatctcatcagcctgattacttaattattgttctttgtygtaaattcagccttctttcattacagcttctgaataaacatgctttttgatctgtgtttggtaaagatgattcattccttaaagggacagatttctctttttcaaagaaggaacttactctgtttttgcagtatttaaactgttctgctattgatggacatttatgctgatttttaatgccatatttcatcattgtaatgttaactttaacgtttctgaaattgagaaatgcttaaaaatagttggtacttactattgctgtttgccatcctatttaaaattaaaaaccttactccctacctgcagtcatcttttatctctttttcctgctttatttttctgcatagcactatactaacttatagcacttacaccgattattgtttttctcctctcataagcaggcagaaatctttttgttttattttaccaccgtaaaatatactttacctgacacagagtgagtactcaataaatatttgttgaatgaataaatgaagaaatgtacgagtgtttattgtggtccagatactgtgctaagccctttctgtccttaaaataactacaggccgggcgtggtggctcacacctgtaatcctagcactttgggaggccaatgcgggtggatcagttgakgtgaggagtttgagaccagcctggcccacatgatgaaatcctgtctctactaaaaatacaaaagttagctgggcgtggtgctgtgtgcctgtgatcccagccacttgggaagctgaggaaggagaattgcttgaacttgggaggcagaggttgcagtsagctgagatcatgccactgyactccagsctgggcaacagagtgagactgtgtctcaaaaaacaaacaaacaaaaaactgcgtgaggtagaggtattctaatgaggaaactaagtcttaggcggaggttaaattgcccagtatcactcagtttataaatggtggagctgaaattagagcatgaatttacttttcatgccagatcctaggctcctaatttctgtgttatatttttctcagtatttgtgtgatttatttaatttgttctttctttttaaacaggaagaagagaatttatccaaagattaaaacttgaagcaacccttaatgtgcatgatggttgtgtaagtaatagttaattctcaactctgaagggatttgatactaagtgtttaagtgtttgatgaaatgtcccaatcctcccagaaaggattgtgactataataaaatgggagaataaagttttacattaaaatataaaattatattttgaatctagaagagtgtatgcaagattttttaaagtgcagatgagttttctaatattatcgaaaggcttccatctcattcactgtactgaaactgcttttgtgacttcatgtctccaaatgtggtgttcacttcttagaaactagacatatcactcaaacatatcctcttttttttcatacttttttttgtttgtttttgtttttgtttttgagacaragtctngcyctgttgcycaggstggagtgcrgtggcgcaatctcggctcactgcaagctcagcctccctgcaagctccgcctcccgggttcacgtcattctcctgcctcagcctcctgggtagctgggactacaggtgcctgccaccacgccygsctaatttttttgtattttttagtagagacrgggtttcactgtgttagccaggatggtgttgatctgacctcgtgatcctcctgcctcagcctcccaamgtrctgggattacaggtgtgagccactgtgcctgtcccatatcctcttttttgaaatactttttctcttggcttttgctaacaccatactctcttggttttcttcctatttcaatccattgacttgctacatcttctctgtctcagctgactcctccgcatatgttccttcacatgttggttgcacgaagaccctgtcttggtatctcccaccctcttttctctccagctcaaaatgaccctatctagtcccatggctaaagaaaacatgacttctgcctcttcccagagtttttatatccaactttctacttaacatgtccagttgcatgtctaataggcatcccaaatttagcagatccaaaacagagctcttttcaatttttattataaaaatttcaaatgtacttttcatgtacttgtgacctagacttagtaattatcaagattttgccatattttcttttctattttattttcttcccccatccaccttgctgaagatccaccttgctgaagatccrccttgctgaagatatattattttaccttcatatgtaagcctaaaaagcgattgacattttcttatataaccaaaatgccattaggtaatttaataatattgactgttttttcggtattaatctaatatatagtccatattttctttgttttaaaatgtctttttattgttatttgttcaaaagatgatccaaggacacctctgccttgtatattttatgccttatacctagaattctcttctctcacttacctgtaaagcttaccttctcattttatttagctctcttttcaaatgttgcctaccaaagcagcattccctgaacaccctaattaaacagcatgccacgcctggtcagtatctttctccttacattattattattattgatagtgcttactatctggcattataattaacaaaccaatttatttgttcatagtctacacttttgcccccctgccttggcatattggaccaaaaaaataccttcacaaatttattttttaaatttactatcaacaggaatgcctgaaacagatgtggcactttatgaattattcattgatgagacaaagagtatattatgtgttagattaattattattattattytttgatatggggtcttgctctgtcaccaaggctggagtgagtggtgcaatcttggctcactgcaacctccgtctcccgggttcaagcagttctccgctgcagcytcccgagtagctgggattacaggyrcccaccaccacacctggctaatttttgtgtctttagtagagactgagtttcaccatgttggccaggctggtcytgaactcctgrcctcaggtgatctgcccgccttggcctccaaaagtgctgggattgcaggtgtaagccactgttcctggcccaacatttttttcaagtttaaacatacctttgttctctgctttcgtacttcattggtgatctgagtggatacaggattctaggttggacattattttcactctgtagttttttgtttgtttgttttgagactgagtctcactccgtcttccaggctggagtggagtggcacaatctcagctcactgcaacctccacctcctgggttcaastgattcttgtgcctcagcctcctgagaagctgagattacagtctgcaccaccatgcctggctaatttttgaatttctagtagagacggggtttcgccgtgttggctaggctggcctcgaactcctgacctcaggtgatcctcccaaagtgctgggattacaggtgtgagccactgcaccccacccactctgtagttttcaaggtcttacacaaatgttttctagtattcacttcagctggtaagactgttgccagcctaattactttttgttattatataataactttaattacttttgtgaattacccctagatttgtgcttaaatttttattttttatttttttatttttttatttttttgagatggagtctcgctgkgccacccaggctggagtgcagtggcacaatctcggctcactgcaagctccgcctcccggattcacgccagtctcctgcctcagcctcctgagtagctgggactacaggcacccaccaccaagcgcggctaatttttggtatttttagtagagacggtgtttcactgtgttagccaggatggtctcgatctcctgacctcatgatccgcccgcctctgcctcccaaagtgctgggattacagkygtgagccaccgcrcccggcaaatttttgtatttttaagagctttattgagatatgatcagctgtacatatttaaagtgtactatttgatatgtttaacacatgtaaacatacacaaagtcatcaccacattcatgatgataaaatatcaatcatcccctaaaagtttgcccatgtgccctctcattccttacacatcaccctcaaccccagtcaaccaatgatctctattctgtcactataaatcagtttgcattttctagaattttaaataaacggaatcattgactatgtatccttttttcatttggctttttttactttaaattttacttagaataattattttgggattcatgttgttgagtgtatcaataatttattactttttattgctgaggagcatttattgtatggataaatcataatgtttatctctgttcacctgtcagtggacattgggttgtatccagttgaggactattacaaataaagttgccatgaatattcgtgttgcgtctttgtatgaacatatgcttttattcttttttgataaatacctttgagtggaatgaatgggtcatatggtaggtacctgcttaactgttaagaaaccagttgttttccagtatcgttgtaccgtttaacattcccagtgttagtatgtagaaattccagtgggtccatgtcctcaccagcatttggtgtggtcagttttttttttttttaaagacattctaacaggcatctagtagtatcatgttgtggttacatttcctgccccgttaatttttagatattcatctgtattctggaaacttcctgaactctcatattcattcaagtagcttttttttttccttaagattttataggatattctatgtaaataatcaagtcatctgagaattaagttagttttacttcttttctagtctggattccttttatttcgttttcttgacttatttcactggttagtattctattataagattgamtagaaggagtggaatcaggcatccttgtcttgttctgatcttagaaggaaaacagggtctccctctgtttcccagattggagtgcagtggcacaatcatagctcactatagcctcgacctcctgggctcaagctatcttcccacctcagcctcctgagttagctgggaccataggtgcatgccaccaccccagcaaatgtgtttgttttttgtagaggtggggtctcattatgttgcccgtctggtcttgaactcctgggctcaagtgatacctcccacctcaacctcccaaagcaaagtgctgggattacaggtatgagccgctgtgcttagctaagaacattgtctctttctatttagtatgatgtcatcagttttttcatggatgcttgttgtcaggttgaggatgttctcctctattactaacttgctaagagctatcatgaatcattgctggattttgccaagtgtcttttttttttcctgggaaatgtctaactataattccatttatttagtaaaaataaactattcagggtatctatgtcttgagtgaaccttgtttaatatgtgtgcttcactgaatttattttatgtaaattattgaatttattgacataaaattgttcataatattcccttatgtttttaagtatctgtagaatctgtagtgtatgttactgtgtttctcattactgatattggtaatattttctccatgttttttcctgattagtttggctagaggcttgttaattttgtcttctccaagaaccaacctctggtctcattaattgtctccgttgtttttctgttttctatttcattgatttctgctaatatatttattatttgagtcttctgcagactttgggtttcatttgctctttgttttgtaattttttgagtggaagctgaggtcattgatatgagaccgttgtcttttctaaaatagaggtttctttggtgctgtaaattttcttctaaatattgttttagctgtaatccataaattgagatatgttgcatttttattttcattgagttcaaaatactttttaatttattttgtaatttcttctttgaccatctgttatttctatggccatctgttatttcttagttttccaacgtatctttatgttaatgatttctgatttaattccattttggtcagagaacatactttcaatgacttgtagtcttctatttaaatatattaaggtttgttttgtggcccagaatgttgtctctattggtaaatgtttcttgtacacttaaaaaatgtatattttgctgttttttagttgttacaagcatgatgataaacctggtccatgtgctgacatgttgactataagtggacatttwttttttttttaatttagatgtgctcacatactataaaactgacgcatcttaagtgttcaattcggtggtttttagtgtatttgtaaagttgtggagccatcaccactatttaattcctctaattttatcatctgaaaaagagtaccaattatcagtcaccatttcccctctatttagcagttagcaatcactaatactttctgtctctaccaatgtgcgtattctgacatttcatataaatggaaccatacaatattggctgttaatgtaagggttctttcacttagtgtaatgttttcaaggttaatccatgttgtagtatgtgtcagtatttcattcctttttatgattgaataaatatttcattgtacacatataccacatttaatatttcattgtacagatataccacatttaatctgttcatcagttgttggatatttgggttgtttccattttttggcaattatgaataatgctgctgtgaacatttgtgtacaaatttttgtgtgttgtaagttttcaattatcttggctgtatacctagttgcagaattgctaggtcatatggtaaactgatatctcactttttgaggaggtatcaaaactgttttccaaagagctgtaccattttacatttctgacagcaacatacagggttccagtttcttgacatccttgccaactcttattttctgtttctttaaaaaattattataatcatcctagtggatgtgaagtggtaatttgttgtgattttggtttttatttctctgatgactaatgatgttgagcatctttctatgtgcatatgaaggtatgagtcatttacataccttctttggagaaatgtctatttaaatcctttacctatttttaattggattgtttgtctttttgttgttgagttgtgtttgtatattctgggactcttgtcatgggactcttatcagatatatgatttgcaaatatttcccttcattctatgggttgtcttttygccttcctcatagtgtcctttaatgtacaaaagtttttaattttggtgaagtctaatttctttttgctgtttgcttgggctgttggtgccgtatttaagaaacttgcttaatcactggtcgtgaagatttatacctgttttcttctaagagttgtatagttttagctcttctgtttagatatttgatctattttcagttaatttttatatggtataaagtaggggtccaaggtgtttttttttgttttttttttggtggcgattatctagttgtctcagcaccatttggtgaaaagacttttctttcattgaatggtcttggatctcttgtcaaaaaatcacttgaccataaatagaagagtttatttctgaactcttaattccattacattgatctgtatgtgtttgtttttgccagtgccacacagtcttgattactgtagttttgtaataagtttttctagttttattttaggtgacttggttttatgcctgtgaacactaaataaattcaaataagtaaatttacacagtgaaacttaatggctcagacatttcattgtaaaatatcagaacattgtgtttactaaatgacagtcaatatttaacgctttattttgaatttttttagagcagttttaggttcatagcaaaattgagaggaaggtatgggaatttctcatatatcccctgcccacatacttgcatagcattttccattatcaacatcttccacctgagtggtacatttgctgtatttcatgagcctacattaatacatcataatccatccaaagtccatagtttacaatagggctcactcttggtttcaggcatcttatgagtttggacaaatgtatagtgatatatatccaccattatagtatcatgtggagttgtttcactgccttaaaaatctcctgtgctctgcctatttatcacccaccttctgaactcctgatgaccactgatctttttatagtctccatagttaagccttttccagaatgtcatataattggaatcacatagtatgtagccttttcagattagttttctttcacttagcaatatacatttaggtttcctctatcttttcatagcttctagctcatttctttttagagctgaataatacttcattctgtagatgtaccacagtttgtccattcacttgctgaaggacatcttgggtgcttccaaaaattggcagttatgagtaaagttgccataaacgtttgtgggcaggtgttggtgtgcacatacgtttacgttcgtgtgcaggtgtatgtgtggacatacgttttcagctcctttggataaataccaaggagcatgctgtattgtgtatgtttagtttttataagaaatcaccatttgtccttcaaagtgactgtacaattttgcattcccaccagcaatgaatataagttcctgatgctccacatccttgccagtatttgatgttgtcagtgttctctattttggccattctaatagatatgtagtacatttccctgataacataggatgtggattatcttttcatatgctcgtttgcaatctgtgtatctttgctgaggtgcctgttatggcctttggctcatttcttagatgtttcttattgtagtgttttaagagttctttatttaytttagataacattactttatcagatgtgtcttttgaaagtatttcccctgtcttgtcttcttgttttcttgacattgtcttttgcagggtggaagtttttaattttaatgaagtcagtcttatcaatgatttcttttatggatcttgccttggtattgtacttaataaattatcaccatacccaaggtcatctgagttttttycctatgttatcttctcagaggtttatagttttgtgtttatatttaggtctgtgatctattttgaattaatttttgtgaagggtgtaagttatgtgtctagattttatttttatttttattttttttgcatgtgaatatccagttgtagcagcaccatttgttgaaaagactatctgcattgtattgactttactcctttgtcaaaggtccgatgatcgtgtttatgtgggtctgtttctgggctctgaattctgtttagttatctgtttgtctgctcttttgccaataccacactgtcttatttggtgtagccttacagtaaaatttttattattatttatttatttatttatttttttgagatggagtctcggcctcttgcccaggctggagtgcaatggcgcgatctcagctcacggcagcctccacctcctgggttcaagtgattctcctgcctcagactcccragtagctgggattacaggcacgcgccaccattcccagcttatttttttgtatctttagtagagatggggtggtctcgaaccaccagccaggctggtctcaaactcctgacctcgtgatctkcctgtcttggcctcccaaagtggtgggattacaggcactttatagtaagtcttgaagttgggtagtgtcagctgtcttgggattctccacttatctttctgttactgattttagtttaattccattgtggtctaagagtagacactgtatgatttttattcttttaaatttgttaaagtgtattttaaggcctcaaatatggtctgtcttggtaaatgttccatgtaagcttgagaagaacaactttgttcttctcccttaatatgtgttggctagcccgagtctttggcatctcttataaactttagaatcagtttgtcaatacccacaaaataatttgctgagattttgataggaattgcattgaatctatagaacaagttgggaataattgacatcttgaaaatactgaatctttctatttattaatatggaatagctcttcatttattkaattctttgatttcttttaccagagttttataattttcctcatagaaatcttatacatatttcattcaatttatacctaagtgtttcatgttttggagtgctaatgtaatggtattgtgttttaaaattcaaattccacttgttcatttctggtatttaggaaaataattgactttttaatattaaccttgtatcctattactttgctacaatcacttattagttccaggagggttttattttgttttgttttgtttgttttgaaacagagtcttgctctgtcgcccaggctggagtgcagtggcgcgatctcggctcaatgcaagctccgcctcccgggttcatgccattcttctgcctcagcctcccgagtagctgggactacaggtgcccrccaccacacccggctarttttttgtrtttttagtagagatggggtttcatcgtgttagccaggatgtcttgatctcctgaccccgtgatccgccctcctttgcctcccaaaatgctgggattacaggcgtgagccactgtgcctggcctccaggagggtttttaaaattttattttccatatagatgatcttgttatctacaaagaccgttttatttcttttccaatcttcatacttttcctttgcttttccttccttttcttgtcttactgcattagctaggacttaaagtatggtgttgaaacgaagtggtgagagaggacatccttgtcttgtttttgatattctacaggttgagtgtctttaatttgaaaatctgaaaattgaaatgctccaaaatttgaaactttttgagtgccacatgatgctcaaagtattttggatttcagaaatgctgtaaaatttcctctgagaactactttgttgcacctcacagattttaattagtcttgttttgatttcattgaattcagaatcttttaaaatttctcttgagatttcttctttgaccgatgtgttattttgaacttgtgtgtattttgggattttccagttatctttctgttactgattttagtttaattccattgtggtctaagagtagacactgtttgatttttattcttttaaatttgataaagtgtattttaaggcctcaagtgtggtctgtcttggtaaatgtttcatgtgagctttagaggactgtatattctgctgttgttgaatgaagtagtctataaatgtccgttatattcaggtaattgatggttttgagtttaactgtgtccttactgattttctgcctgctaggtctgtctgtttctgatagagggaattgaagtctccaggtatcatactagattcatctgtttctctttatagttctgtcagtttttatctcacatatttcgatgctctgttgttaagcacatacatgttagggattgggaaactatgttgtcttggggaaactgacctctttatcgttatgaaatacccttctttttccctgataatttttcttgctttgaactctggtctgtctgaaattaatgtaactactcctgttttcttttgatttgtattagtatgatatatttttctcaatccatttacttttaatccatatggatctttatatttaaaatggatttcttgtaaacaacatatatttggatcttgttttttgatccactctgacagtctctgtcttaatttttaggctgggtgcggtggctcacccctgtaatcccagcactttgggaggtcgaggtgggcgatcacctgaggtcaggagttcaagaccagcctggccaacrtggcaaaacyctgtctctactaaaaatacaaaaattagccacgcatggtggcacatgcctataatcccagttacttgggaggctgaggcaggagaattgcttgaacccaggaggcagagggttgtagtaagcggagatagcaccactgcacgccagcctggcgatgaagcgagactccatctcaaaaaacaaacaaacaaaaatgttgccaggcgtggtggctcacatctgtaatcctagcactttgggargccaaggcgggtggatcacctgaggtctggagttcgagaccagcctgggcaacatggtgaaaccctggctctactaaaaatacaaaaattagccaagcatagtggctggcaggcacctgtaatcccagctactcgggaggctgaggcgggagaatcgcttgaactcaggaggcrgaggttgtagtgagctgagatcgtgctgcttcacttcagcctgggcaaaagcgtgaaactctgtctcaaaaaaaaaaccaaaataataatttttaatttagactattgacattcaaagggattactgktatagttggattaatatttcctatatttgttaactgtttctgctttttgtctttgttccttgttcctatttttgttttccattcttctgccttttgtgttttttttgtttctgtttttttttttttcccttttgagatggagtctcactctgccacccaggctggagtagagtggttcaatctcagctcactgctacctccgyctcccaggttcaagtgattctcctgcctcagcctcctgagtagctgggatgccaccacacccagctaatttttgtgttttagtagagatggvgtttcaccatgttggccaggctggtctctaattcctgacctcaagtgatccacccacctyggcctcccagagtgctgggattacaggtgtgagtcaccatgcctggaccttttgtggttttaattgagcatttcatatagttttttttttctccttccttagtatttattagttacacctattttttaaactttttaattatttgccctaaagttttcactatacatgtacaacaaatctaagtccactttatttcaaataacactataatgattcacagggagtgtgagtacaaagtaattttaaatcttccatcttataccttgtactatttctgttattcatttcacttatttataagcactcataagcatatttttgtatatgtgctagatataagcatagatgatcaaatacattgttgctgttattttgaacaataaaataatttgttagctcaattaagaataagtaaaatgaaagtttgtgttttatcttcacttattcctccttcagtgctccttctttctttatgtagatatatgtctctgacctatgtttattttccttttctttaaagaactccttttgtaatttcttgcaaagtaggtctgctggcaacaaattccctcaatgttaatttatctgagaaaagttttatttctcctttagttttgaaggataattttgcggggtacagtattctaggttggttttgctttgttttgtttccgttactgctttaaatatttcactcttcttgcttacatgatttctgaggagatgttggatgtaattcttatctttgctcctctatagataatgttttttcctccagcttctttcaggattttttcttatctttgattttctttagtttgaaaaatgcttgcctagctgtagttctttttgtatttatcctgattattgttctctgagcttactggatctatggtttggtttctcacattcatttggaggaaattatcagtcattattatttcagatattctgttcttttctccttctcctctggtattcacattatacatgagttatgccttttgtagttgtcccacattccttggacattatgttttgttttgctttttttcagtctttgttctttttgcttctcagttttgtacgtttttattgatatatcctcaaggtcagagattgtttcctcaattgtgtctagtctactaatacgcccatcagaggcattgttcctttctgttacattgtttttgattgctaccatttcctttttattcttaggatttccgtctctctgctgacattgcccatctcttcttacatgctgtctactttatccattggaactcttagcatgctaatcatagttgtttcggattcctggtcttacagttccaacagtcctgctatgtttggttctgatgctggctttatcccttcaaattgtatttttgccttttagtatggcttgtaatttttcttaataactggacatgaagtacttattaaaagtaatggtataaataggtccttaggaatttactggtaaagtgtaggaggagaggaagtgttctacaggcctatgattaggtgtctgtcacttaaagagcctatacgtctgaactgtgggcttcacaagggattatcagcacctcctattcccaactgaggtggaacaggttagtagattaggctggagttatgtattttccttccccaatgyggaaggctggaattgggtatttctgtttgtctaggtcagttaggctctaataaaacctcagtgggtaggctgtggtgaaatagcttttcttaagggcagatcttgttaagaaagttagagtactctgggatacccaaaatggtttctttttccctccctctgctggatgtacaaggtgattttaatctgaaatttattgtgaaaatctggttgagctctgaagttaaaatcaaatcacaaaaacaccctctgcaccatacccccaccgcatgactgggttccctggagtttttttcttttttgagacagagtcttgctctgtcgcgtaggctgggtgcagtgacacgatcttggctcactgaaacctccacctcttgggttcaagcagttctcctgtygggaggctgaggcctcccgagtagctgggattacaggcgcatgccaccatggccggctaatttttgtatttttagtagagacggggtttcgccatattggtcaggctggtctygaacctctgacatcaggtgatccacccgctttggcctcccaaagtgctgggattatagacgtgagccaccgcgcccggccttccctggagtttttaacattcagacttaacgctttctgaacctccaacaattcatcaattatagttcaggttttcctaccctagctctgtttctcacagaggtttctgctcatgagtctgtgctctggtaagccaagactccttgtgtttacctgttcatctctgcaatctagggggtagcattttgtcctgtgtccttacctctctgaaggatccaagatcagttattgattttacagtttgttaactttttatttgttgttagkatggagtggcaactgctaagcttcttacgtgtggaactggaaactggaagcttgtttttttaatacatcaactattaaatcaagcttgtctaacacacggcccgtgggctgcatgaggcccaggacagctttgaatgtggcccacataaattcataaactttcttaaaacattatgagatttttttgctatttatttttagctcatcagctattgttagtgttagtgtattttatgtgtggccggagacaattcttcttcttctactgtggccaagggaagccataagattggacacccctatgttaaatactttttaacgtataacctcattagtggtaaaaattttgtaccgccaggtgagtgaaagatggcatattttcttttatgtccaatttgcttatatttcttttttgctttctctttaggttaatacaatctgttggaatgacactggagaatatattttatctggctcagatgacaccaaattagtaattagtaatccttacagcagaaaggtaaagtagtttaaaaaatctgtaatttaatgagagaaaaaaaatcaagaaggcagaaatgaagaaactgtgaacagtcatagaatgggcatttatattagaatatcctccctattttgctgaggtttattgtataatttagaggttcttaggtacatgtgggtctcttagattacttagggaaacaagattttattcagccttgggatctagaaaatttaaatatactttatttaaatggttaataattggtacaagtgacattatttcaataacattttttgggggaaaatgtgccataaataaagtatgagttaatgagaaaattacttttatgtgttaycttaatatattatcttaacattctaaaaagttacttattttaatgttaagaatagtgtgggtaaagctgccaactttggtcattgtttcgttttcttaaaaatttgaaatttagtcttttagaaaatttacatttaaaacttttaaagacaaaaacagccaaatgactgcggtgtgaatagttcttgaggtactgagaaaattaaaatggtttcaatgaagaaaaaaattaccataagctaataaactccctcactagaaggcaagagatatctaagaattaaataattttctaactctcaagtaactttaattactgtttcaaatagcattccattttatccacagaatgtttcctttacaaggatggtttcagagaaattaagatactgaatgataaagctataaacagctgactgattgtaataaaaagaaagtgtgtgatgttctttacacttgacataacagttaaatgagaaaccttctgttttagaaatatgactaaatagttattttaaaatttgtaagatcttaaacattcaacacatcatttaaagttccagttaagaataggaatatgtatatttcctagctgcctcccaactcacatgatacatttttctctcctgattgtcttaaatttcctgtatctttttttttttttttttttttttttgtggcaaggtctcactctgtcacccaggctggaaggctggagtacagtggtgcgatctcggcttactgcaacctctgcctcctgcgttcaagygattmtcctgcctcagcctcccaaggatctgggattacaggtgtgtgccaccatgctcggctaatttttatgtttttggtagagacrggstttcamcrtrttrgccaggctggtcttgaactcctgacctcaagtgatctgcccacctcatcctcccaaagtgttgggattacaggcatgagccaccacgcccagcccaaatttcttgtatctttaagtcttttaacatctattattttaatagtaattccaaaaatgtactccagcttttaattttttatggtagtagcaaccgtgtattggtgattgtatcagtcgggttctagtcaaagaaaccacacagtaatttcaatagggaaagtgtaataaaaagaattactacctatatcaggagattggagtagtaaaggcttggctgctaaaaagtaaaaaggtctctataaaatacagaaataacagatactatgaaccgccactaaccctgggactgagataaaccactgaaaagaagagacccccccgtgctgagtgctgagatttagaccttattgaagagggtgtcatggctcactggatggcagggaagtctctgtgatgtcatgctagtgtaacttgttgcgaattcccctctggaacttggtggaacacctctctctagagcactgagaaatactttttaaggagaggtttctcatcagaggtagtatgctacaaaatgtctagggacgtggggaaatgaggcaggagaagctgtcgggtgttgaactgttcatttagtaggtgggccctggtgaaactgcaggactctggtgctatggtgttggggaaactgcccgtgctggaagaccctggcactggaaaacctgtgcatggttgcaggagctcccattagagataggaagcaaactccgttttcctgcattattctttcagtgctttttactggcaaagcttaacatcatgccaactggcaaaggaaaaatatttgaaggactcagttccattgcataatctataaaagtgaagggtaaatttggaactgagaggaaataatttgataagtggcacagtagtcttacctttatctgcttcttggtattattgcaatgtgaaatttacttcattaatatttaggtctttgaatgaagaagagttccatgaaaattttaaaattatattatgattactataatggcaaatatagatttatatgttggtttttttttaccattctgaccaagttatttaaactttccttagcctttttcttcatatattaagaaagtcattatgtctaaagtcctttctaatattaatattttatatttgtttctaaaaatgttttaaaacatttttgtctattaatttaggttatatagtgatgtttgaatgggcctggctggctgtttgaagctggatcttacaggttatgacttactcttttaggctcatagaatgtaatcttcagccaagtagtttaagaaactggatttttatcagtttacaaacagtggctaggttctagtgaaatgcttcatgatatacaattcgataagctgggataacataygagttctaattaggttaggattatgttctgattttcattggcttttagcttctgagttcatatatagaggaagtatacagctgtttttatatctgaaaacatggtattagcagtccaaagtgtaatttaaaattttcagttttacagaataaattgtttatttcttgtttttccacacttaataagatatttaaataagtgtgtatcatctatcagctgaaaaagaagttcatattgaggctgtctttaatgggtcgtagttttatttcattaagttttacttaattgtcctggcttagcaaaaaaagcttgatgttttcaaatcctacttctcttaggtcagtaattacaagggtaacacttttcattttattttttattattcttttttgagatagagtcttgctctgttgcccaggctggagtgcagtggcacgatctcggcccactgcaaactctgcctcccagattcaagagtttctcctgcctcagccttccaaatagctgaggctacaagtgtgtgccaccacgcccggctagtttttgtattttttgtagagttggggtttcaccatgttggccaggctggtctcgaactcctgagctcaaatgatccacctgtctccacctcccaaagtgctggggattacaggcgtgaaccattgcgcctagcccccttttcttataatagagaagatttcctgaaataatgtatatgtagaaagctttttgacgatcactattcagaattttaactcttacattatacaaaataatcacttgggtaccaaaggaatgattgttaaaagacctgtttctgttttatttgcttatttttaaagaaatgacgatccctttgatgtatgatttccaatagaatatgtatatttgaaaaaatgatactctttctcatttccagcttgagaaatgattagtcagattttctttttaaagattataatcataggccaagtgtgtggctcacgcttataatcccagcactttgggaggcccgaggtgggaagatcgcttgaggccaggagttaaagaccagcctgggaaatgtagtgagactctgtctctacaaaaaatttaaaagctggatgtggtggcacatgcctgtagtcccagttactcgggagggagtggcaggaggatcacttgagcccaggcgttccaccactacactccaagtctggatgacagcaagagctgatatcttaaaaaaaaaaattattatcataagcctttatagggctttttaaaattttaaaacaccaatgattcattatataggaaaaaaagctttttgaccatgagtcaaataytacctgtttttatagtttgattatttttagatcctatgattttgtgggaacattaatttattgaaaataagagttttgaaacacttagttttttaaaaaaatagatttaagagactggagatattccttattaatgcaattatattttaattatatatagcatagagactccccatcatatactggggagtcccattagggtaccctattatggcataggtgaaagagaaggaagcccagagatggtcttgcaatatcttttgtaaaataaattccaaatatatactgtatacatgatttttcttgatttggcctcagccagctacttatagtcctcagagcttaaaaagttttcattactgtgtgcttttgcttatactcttctttctttctgagatcacctgctttctcgggtatctcccatctacttggtaaatttaaaattcattcttcaaatctcagctcttttttgtgatatttctctaacatttcctggacacatgtagccactccttcatctgtgttcctgtcttgtggataactctattattatattgtattatatttgtttgcatgttgtgcttagatggcaacttctttgagataatgacaatttcttttttctttttgcatcctcaacacttaayattatttatttacctctcatatagttggagcccactaagtcttagtaaaacgagtgtataaatctgtatattcgatacctcagacagggttatgggtcaggtttgaaagggggttgtttttaccaagggattaaaaaaccatcctctactatttggatacttttggactgagcttcaagttttgggagtgttgtacgtgacatgattaagaaggaaagagatgccaactttggccagctatttagtcaaaataaactggtaatcagcagaatgacagatgttacaactagaccaccttaacgtatagtaatcattgcaattatcaatatgttattttcatctcagattaagttactctggcaattatacctctctagggcattatccttagggtgttttcagaataactcataatgcattgatccaaggaaagcacaactaagaagataaatccatcaataaaaagttattattgttattgtaatttttttttttgagacagagtcttgctctgtcgcccaggctgcagtgcagtggcgtattctcagctcactgcaacctccacctcccgggttcaagtgattctcgtgccttagcctcccgagtagctgggactacagggatgcgccaccatacccggctaatttttgtatttttagtggagatggggtttcgccatgttgggcaggctggtctcgaactcctgacttcaggtgatccagctgccttggcctcccaaagtgctgagattacaaggcatgagccgccatgcctggcccagctatcaaaaattataacttcccaagtacacataaatatttttaatcagccttattgctgtttatctgcagtatcatacatacccatattggctgtatagatttggtttcaacaattaaagaacaaattctaaccttcattgaaattaccaactatacatacataacacgaataataattctttgaacaattattcattaataaattagagagtggtacaaaatgaagttcaaatgataggaatcagataagcttattaaggagtttacattttagtgtgatttttgtggacagtcactgtagggttttaaacatgtactgatatgatttatatttttaaaagatagctctggctgcttttggagggtagagtttgaactagattggaagtaggagataggaggccattgaaataatccaggtaagagggaaagatgactcaggcacagataatgacattggagttggtgaaaagtaatttgggatgtattttggcatggctctgctggtggatttgatacagcagatgagggaaagaaaaatgaaaaaaggttccttagtttttgacttgatcaactgtatgggtggatactgatgccattgagatggagaacactggaagaggggagtgtattttgagaggggcatctgaaatctagagatttgttcaaaggaacgggcccccaattttttactcactaaattttaattagttkatttaataagggaatgcttttcaatttatgagtgactgatgaagcagtgaggctcctgcttttgttactgaaattataaataaacctcttaagtggaggtaaatcataaatttttaagagtaatgtctgctgaatgttactaatgcacagccaaagccaatggcctaacaaacgaagtaactaatggctgtatgtagtgtgtagttagctacttggtaaaccaccctaaatctctgacagcgttaaagaacatgatatttrtcttgtttaaaggctttacgttaattactctctctgtttcatgacattgacatgtcaggctagttattttacagaatgttgctccatttggatttgtctgattgtttcttcatgagtagattcagattaaacatttttggtgagaattctcaggtgatattgtggtacatgatgttatataatttattcccttattggagatgttgtttgatccctctattttgggttaccctttgtaactaacaagctgtctgtgaagtggcatgttgagactgaatattctttcctaacagtctttcccccagtggtttttatattaattgatgacttctgtttgaatcggttgttgtaatgtcacaaaacagtgatttttaaattgtcatttcttctacatttattaatttacattcttcagtaaataagagcattttctctgtccctagcaccttaaacatttttttaattcagtgttttatagtcaatcactgatgttattctttttgatactcaaattgtcctaaatttgttccatggagatttcaagccaacttagtgttggtgttttgacatttctcttttttcttagcactttaaaaaagcacaacagatattccccactcaccyctctattgtatatctgttatggggatatactgtagtttattcaaccagtctcctgtgttttactgttataaataactcagtaaataatctttgacattttttttggtcttattggaagcatatctttggggtaaattcctagaaatagatttgcctagtcaaagagtaagcacatacgtagttttgtgagatattgctaaattcccttccactggtattaccgtttagcattcctaccaacagtgtttaagagtctgttttcacataagcttgtttgtagagtctgttgtcaagctcttgaatttttgccagtctgttaagtgagaattgatatctcagcataatttcaatttgcatttcccttatgaatgatccaagttgagtattttttactatttttaagggccatttgtatatctgcatgtatactgtctgttctggtaccttgcccattaaaaaaaaatcaggtcttgtcagttatttttcctctcaattttaaaacactactaggagaattagtcctttatctgcaacaaattatacaaatattaaaatatcaattttaaactttattactgtcacagtaattctggtcttttaaatattattaattggatgtagggacttctgctgtgtcttatgtgtaccatttcattactttgattttatgaaaataattaaaattcagtttattgttttgtcatcctgaaagggaataacttaatcatttagcatacagtaaatttcaaaagtcagtcaaagtagttcgttgttatttattgagattttatgagtgagtcagataaactaaataaatggaaatatgcatgttttattttcatgatactgttcctgttgatggtactcaatcttattcacatctcacagggaacaaaagaaaatatatgggattctgatttttttaaattataatagcttgcagtctagtgataatctttcactgagatgagaatgttaatgagaatgtattactggctatgattatattaaaaatgaatatttctaggaaataataagttaccattaactgctttctttgtgtgttttaggttttgacaacaattcgttcagggcaccgagcaaacatatttagtgcaaagttcttaccttgtacaaatgataaacagattgtatcctgctctggagatggagtaatattttataccaacgttgagcaagatgcagaaaccaacagacaatgccaatttacgtgtcattatggaactacttatgaggtatggtattattatgattatatgatatatatgtaagtatgtatatttttgattaagtacatacatgtgtagatgcatgtgtgtacatgtacagatgtgtgtgtatgcacatttgatgcatataaattattgacaatatctaggtgtcagcagagcatttgagaaaatgtatcttgataggcttctggataaagttaagaaataagatgcaagtaatagtactctaagatgggtttgtaattgcttgagcaaccatgctgtaagcaaacagacgtttacctttaaagatacctctgttattgtgctgcatgactgtactaggctttacccttttaaacaatcgcttgcttgtgtaaagtcatagccaacatgcttatcaaatttttgtaggatagaagggactccagtagacaaaagaatcagattcctaaaggatattaatgagcttaagacctgagctgaattaaataaggtggaataaatttaagactcaattttagtgctttatgtggttcagaaaaaatgtacaactgagttctcttttatttatgatacagggtcacactgtcactcacactggagtgcagtggcatgaccatggctctctgcagcttcaaactcccaggctcaagcagtcttctcacctcagcctcttgagtagctgggactacaggcatgtgccaccatgcccaactaatttaattttgttgttgttgttgtggagacagggttttgctatgttgccagggctggtctccaactcctgagttcatacaatcctcccaccttggcctctcacagtgccaaggttatagatgtgagccactgtactagcctccagagtgttcttctgaaatacttgcatgtcatttttttgtatcaaattattgataggtttcccattttttgtgttaaactggtatactttttccatcatttgaattccagttcttttatgtcctcatgtttttgtatgtacttatatatatagctagattttgttttcttatccagtctcacagttttggggttttactggagatttatgaatttacatttattgtgagttctgatatatttggatttgtttctatccctttgttttctactttttaaaaaaagtttccaatctccattaaccctcctctccttttaaaagtccacctttggaggccagacgtggtggctcacacctgtaatctgagcactctgggaggctgaggtgggcggatcacttgaggccaggaatttgagacyggcctggccaacatggtgaaaccctgtctctactaaaaatacaggaatcagctgggtgtggtggtgcacgcctgtaataccagctacttgggaggctgaggcttgagaattgcttgaacaacctgggaggcagaggttgcagtcagccaagactgcgctactgtactccaacctgggcgacagagtgagactgtgtctcaaaaataaaaaataaaaataaagtctacctttcgaattacttgagtattttactttttgtccattgtgtttctgtttcttgcttctaagatagacattcatttttgttattctggaggttaccccagctactttcacaagaatatcgaacaaagccaaatatcagtaaatatttctactcttctcttgaataaaggaacttggaacataccttgttccattttatgtgattatattgttcaggatttagttatattctgttttctctcatgaattagatgttattggtttactgttagtgttgtttgtttagatttacctgcatatttactaatacctttggtttacctttccttcttcccatcacacattttccatgttgtatcattttgtactgaaggtacatcctttagcagtttttttttttttttttttttttttttttttyttgkrayggagtttygctcttgttgcccaggctgaagtgcaayggcrtgatcttggctcaccacaacctytgcctcctgggttcaagtaattctcctgtcagcctcctgagtagctgggattataggkgcataccaccactcctggctaattttgtattttttttaggagagatggggtttctccatgttggtcaggctggtctcgaactcccgacctcaggkgatctgcctgcctytgcctctcaaagctytgggattacaggcatgaaccaccgtgcctgggccacagttttttttttttttttttacatgaragtttgttgataraaaacaatttcagttyccttttctttccttcattcattctttcctttcttccttttctttcctttgtgaaaaatgtcttttttttttaaatgccagttcttcaaagatagttttgctgggcatggatttcatttgatagttactgtatttcagatggtattccattatattctgacttccattgttgaagttgcaaagtcagacatcagtctaattgtggttcctgtataggtaacctgtttcttttccttgactacttttaattttgtttttctttgccgggtttttttcttattttatgtcagaacagtgtgtcttgatgtgcattgttttttattttttatacttgggatttgttgatgttcttgatgtgagcaattggcatcttgaaaaatgtaagaaattttcagtcagtaggtctttggtttactacttcattattctctccatttttttgtagtctggggaaattctgattagccatatcagacctgcttattagaccttattccatccactatttaaaaattttaaaattgaaatatagaacatataggaaaagtacctaaatcctaagtatatggcttagtgaattatcacaaagcaaatctattcatgtaactaccacctagcacattaagtatcccaaaagctccctttattctgaattctaacactggagttttctgttttttctaatacccctgtttttctgtttttgaacgttatataaatggaaatatggctttttgtgtctttgttgttgtttttgtatctggctttttttgctgagcaaaatcttaactcatttgtgaaattcatccatgttgtgtgtaactataatttgcccattttattactgtatagtattccattatatgaatataccacaattgatttatctgttctatgctgttggaagtttggagaacattgttttacgtgtcttttcagtacacaaatgcacacatttgttagggtgtatacttagcagtaaaattgctgggtcatagaatatatatttggttattttagagataaagccaaatagttttccaaagtgtagtaacgacttacattcccaccaacagcatgtaagaggtcctgttgcttctgatctttgccaacagttggtattttcagctctactttggtggatgtatagtatcatcttaattggtttccatttgcctctctgtgctgatactactgaggttgagcatctcttcaaatgtttgttggttatttggatgtattcttaatgaaatgtgtagtcaaatctcttgcctatttttttctgttgggttgtttgtcttattttattttgttattattaatttataggagtttttgaaaaaatatcttctgcatatgagcctatcttttcctattctgtggttatattttcactctcctagtggtgggggagggtgcggtttgtgtgttttgagagatggggtctcactttttcacccaggctggagagcagtggcatgattatagctcctgggttcaaggaatcgtcttgcctcccaagtagctgagactacaggcatgcactactgcacctgggtaattttttttattttttgtagagacggggccttgctatcttacccaggcttgtctagaactcctgggctcaagcgatcctcctgcctctgcctcctaaagtgctgggatttcagcctaaaatggtgtcttttgatgaagaaaagtatttaatgttgtctaatatgttggtctgctcctttatgattagtatcttttgcatcctggttaagaaatcttttcctatcccaaagttatgaagatattcttctactttaatttcattgctttgtctttagcatttagatctgtaatctatctggatttgacttttgttatagtatgacttgagtcaacttttttttttaccccatatgaagttttttgtgttaacataatttattttttagaaaattaaatcaaaatccaaaacagcacacaaacaaaagaaagaccattttaacatgatagacccatttacccaagatgttttttgccaaatacatatacacactttaattagcatagaatttttttttttcaaaactgatactctgcatctatcaacagctctcctttcttccttatcctagtccctggcaaccatcattctactttctgtttctaagaatttgactattttagatacctcatataattgtaatcatgcagtatttgacttttgatgactgactgatttcacttagcatgatcatattgtagcatatgtcagaatttatttcctttataaggcaggagaagattccgttgtatgtatataccacattttctttattcatttatctaggctgtgtgctgtggctcatgcctgtgatcccagcactttgggaggccgaggtsrgcagatcacttgaggttaggagttcaagaccagcctgtacaacaagatgaaaccgtgcctctattgaaactacaaaaattagccaggcgtggtggcaggtgcctgtagtcccagctactcrggaggstgagrcaggagaatcacttgaacccaagaggtggaggatgcagtgagctgagatcatgccactgmactccrgcgtgggtgacagagtgagactctgtctcaaaataaataaacaggctgggcgcagtggctcacacccatcatcccagcactttgggaggctgaggagggcggatcacgargtcaagagattgagayyatyctggcyamcatggtgaaaccctgtctytacyaaaaatgcaaaaattagctggatgtggtggcatgtgcctatagtcccagttacttgggaggctgaggcaggaraatcacttgaacmcgggaggcagaggttgcagtgagctgagatcgtgtcactgcactccagcctggcgacagagtgagactccatctcagaaataaataaataaataartaaataaataaattcatctagtgatggatatttaggttgcttctactccttggctattgtgaataatgctgcagtgaagatgagtgtgcaaatatctcttcaagatcccgtttccagttttttcggatctgtacccagaagtagagattgctggatcatatggtaattccatttttaagtttttgaggaccctccatactattttccatagcagctccactattttacatgcctaccagctgtgtgcaagggtgccaacttctccatttccttgccaacacttacaatttttttttagtgggcattccagtgggcttgaagttttatcttactgtggttgtgattttcatttccccaaagattactgaagttgagcttcttttcatatgcttcttggccatctgtgtatcttctttggagaaatctcctttgcttttttttaatctgcattattttttgttgttaacataggatttctttatatattccgaatattatgttgttaacataggatttctttatatattccaaatattaacccttttttagatacatggttcacaaatattttcacccgttccatggattgtctttttaccctgttaagtttgatgtagttccacttgtctgttatggctttgttaactgtgattttgttgttatatctaataaatcattgtaaaatccaatgtcatgaagcttttctctgaattttctttttttttttttttttttgagctctgtcacccaggctggagtgcagtggtacaatcgtggctcactgcaccctctgcctcccaggttcaagcaattctcytgcctcagcctcctgagtagctgrgattacaggcgcaygccaccacgcccggctaattttttgtattttagtagagatggggtttcaccgtgttgcccagtctggtctcagactcctgagctcaggtaatctgcccgtctccgcctccaaagtgctgggcttacaggcatgagccaccgctcccggcctcccccatgttttcttctaggagttttatactttcagtttgtaggtttagatctttaatccgttttgaattaatttttgcatatgtagggtaagggtctaagttcattcttttgcatgtagataaccagttttcccagcagcttttttcttactttatggattcatttttttcctcaacttttattttagattcgaggggtacatgtgcaggtttgtttcataggtagtattgcatgaggctgaggtttggggtacaaatgatcctgttacccaggaactgagcatagtacccagtagttagtgtttcaccccttccttccctttctccctccctgctctactagttcacagtttctgttgttgccatctttatgtccacaagtatccagtgtgtagctcctacttataagtgagaacatgctgtatttggttttctgttcctgtgttaatttgcttaggataatagcctccagctgcatcttagttgctgcaaaggacatgatttcattcatttttgtggctgcatagtgttccatgtatatgtaccacatttgcttcattcagtccaccattgatgggcacctaggttgattctgtgtctttgttattgtgaatagtgctgcgatgaacatgtgagtgcatgtgtctttttggtagaacaatttgttttcttttggatatatacccaggattgggattgctgggttgaatggtcattctaagttctttgagaaatctccaaattgttttccatagtggctgaacgaatttacattcccaccaagtgtatataagtattcctttttctctgcggcctcaccagcaacttttgtttcttgactttttaataatagccattctcactcatatgagatggtatctcattgtggttttgatttgcatttctctgagattagtggatgtggagcattttattttgtgttcgttggctccttgtatgcctttggcgaagtgtctgttcatgtcctttgctcattttttaagggggttatttggtttttgcttgtttaattttttaagttcttttttttttgagacggagtctcgcttcatcgccaggctggagtgcagtggtgcgatctcggctcacagcaacctcctcttcctgctttcaagcgattctcctgcctcagcctcctgagtagctgggactataggcgcatgcaaccacgcccagctaatattttttatttctagtagagatggggtttcaccgcgtcaaccaggatggttttgatctcctgacctcatgatctgcctgcctcarcctcccaaagtgctgagattacaggcatgacatttttttaagttctttgtggattctggatattaaaccttcgtcaggtgcatagttggcaaatattttctttcattctttaggttgtctgtttactttgttgatagtttcttttgctgtgcagagctttttagtttaattaggtcccacttgtcaatttttgtttttgttgcagtggctattgaggacttagtcataatttctttctcaagtccartgtctagaatggcgtttcctatattttcttttaggattcttatagttcgaggtcttacatttaaatctggaatccatcttgagttaatttttatatatggtgaaatgtaggggggtccagtttcattcttctacatatggttggccagtgatcccagcaccatttatttaatagggagtcctttccccattgcttatttttgtcaactttgtcgaagatcagatgactgtaggtgtgtggctttatttctgggttctctattctgtttcattggcctgtgtgtcttgttttcgtaccagtactatgctgttttggttactgtagccttaaagtatggtttgcagtcaagtaatgtgatacctctggctttgttctttttgcttaagattgctttggctgttcaggctcttttttggttccatgtgaattttagaatagttttttctaattctgtgaaaaatgatgttggtagtttgataggaatagcattgaatctgtaggttgtgttgggctgaatggtcattttaacgatattgattcttccaatccgtgagcatgaaataaatggaaaaacattgttgctgtttgttgttgtcattgctgtttgtttagtgattttcctagactaattctgttaaatctgcattctttttcaggtgtaggcactggagtctgttcttggttagcttagttgtcagctaagggttagatagagatttctttaaatgccttgaaccaataagccttccagtctttgtcaaaggggcctgtgtgtttgggttgccttcaagtgccttggaaatttacaactctgccttagctttcacttcttgcttgttcagagcctcaaggtcagccagagatgttagagtagggccttcttgggtccttctttggcatgtgcacattcttatatatgtgcataatttctaaattcccagaaatgttttgttgcttttcaaattctactattaatgtctaattcttacttttacttttaactttttctggtcagcttcttgtttccctcacctagtattactgcctcaagcaactgtgatgttaaatcattgctgttgattatttttgacaagcacccttaggatggggttgaatatggtcagattcatgtaagtccttaaaaggcagcttttccagggaacttaaggacagattaaattgtgataagtctttgaggatagggcatttgggggagtctcaaacttgttttgtgacttacagtggctgcgaagttactgttttttacarctaccatagtcgcaaggctgctgttgacttagggaaaataccacaagttaaagtggctcaaggctcactattctttctgagatccagttatttgtcttgaataaatgtttcttggattgttctaatcccttggttaaatttcacagttctaaaaaagttgattttgaaattttgtagtgttgtcagtgcttttatggagaagtatattttcagaggtcttattcagccattgcagaagtgcttcttckgtaacattcttacacttttcccctccttcttgaggaaggttaaattgtgaggaaaggttcctaaatgattcagatttctgaacatatcttataaaggcattaattataagaaatagatacatgttttaataatttaattttataatagtgtgagtacagctcatagttcattaatttgattatcaaattcagtattctagtttttaaaaataaatatccttggaaatatatgcttccaatgatttcatttatagacagtagtatacaaagcagaagtgatcattttacttaataaagtcatcaaagctaagtcaataaattacataaatatttcttactgataaaatagtttcataagtaaactgctgacttgattagatggaatactaattacattttcacaaatatgaaatgagtaaaaattctcattttccttgaaatgtatacttatttaggttgaatatactttttatatattttttgcagggtataaatcttattattctgtgttcattgcaaaattggttcaattgaagcaaaggacattaatagattgaagtttggtaaattaaaaattatgtatagttcattttcatgctgctaataaaggtatacccgagactgggcagtttacaaaagaaagaggtttattggacttacagttctgtgtacctgrgaggcctcacaatcatggtggaaggtgaaaggtgaaaggcatgtctcacatgacagcagacaagagaagagagcttgtgtggaaaaactcccattttaaaaaccatcatatctcatgagacttatgcaccatcacaagaacagcatgggaaagacctgcccacatgattcagttacctcccactgggtccytcccacaacacgtgkcaattcaagataagatttaggtgagatcatagccaaaccacgtckgtgtgtgtgtgtgtgtgtgtgtgwgtggkgtgtgtgtgtgtggtgtgtgtgtgcgtgcgcgtgtgcacgtggcttaaagtaacaaatttattatcttactgttctggaagtcagaagtctgaaataaggtgtactgggctaaaatcgaagtgttggcaagtgtgtattccttctggtcttgccttttccagcttctagaggctacttgcattccttggagcaagtccccttcctctrtcttcaaacccagcaacatagcatcttgagatctctttctttttctctctttttccatcatcttgtctccttctctgactctgactctcctgccttgttttgctcagtaagacccttgtaattatattgggcctctgtggataatttaggataatctccttatggtcaaaatccttaattaatcacatctacaaaatcctttttgcagtataaggtaaagtattcgtaggttctaacaaataggatgtagatatctttgggctactattaytctgcttaccacaataatagtaaaccttttaagacaaaagttttccaagtaaatttttaaaaagtataaaacacctactgaaaagtgctggcatcgtgtatttgtgcaacttgattaattttcacaaagtaaaatatatatgtactcagcatctagaacaagaaacagccccccataagtcctttgtaccccctcaaagggtttactgctttctaggctcttaaaagtacaggttagtttgggcctttttacgattttataaaaatgggaatcatactgtgccttctcttttgtgtctggcttttttcacacagaaggtttgtgagattcatttatgttgctgagaatagtaatgatttgttcattattactgatgatttagtactttattttaggaatagataacaatttaatcccagtttattgttggatatttgggttgtttcaagtgtttggctaatataaatagtgctgctgtgaacattctagtgcatgtttttacatgccccatgcaggcgtttatttttagtggaactgctgggttataggagaagcatatgatcagctttaatagatattgatacatagttttccattgcaattgtaccattttatactcccatcagcaatgtgttccgtaactccacatcctcatcaacacttgatattataagtcttttcattttggccattcgggtatggtatagctgtatatctttgtggtggtaatttatatttcctcgatggctgagtttgaatacctttcatatatacagtgtttcaaacataggaatattgtatacagaaaaccatgtatagcagaggcaccaggaactggtttcacaggagacaatttttccatggagtggggatggttttgggtttaaaactgttatacctcagatcaccaggcattagcttctcataaggagtgcacaacctgtgagaaacagttcaccatagtgtctatgctcctgtgagaatctaatgccattgctgatcctacaggaggtggagctcaggtggtaatgctcgctcacctgctgctcactacctgctttgctgctcacttcctaacaggctacggaccagtactgggtctttgggacatagggagagaagaacttattgaggcagggtttatagagagcctcaacttacaatattgtcattgctaaattagaagtggatacaggcatatctaaaatattgtacttcattaaaaaaggtttttatkgtagtaaaatacatataaagtttgacatttaaactattgttttgagagtacatttcgttgacattaagtatattcatgttgtataaccattaccacaattaaaatttttctaagaggtgagttatgcacttaaatcatttcagcatcccacagttgtcttaaacgttaccagagaagaaaatttgcttacgtatttattgtacaattataaactcacatagataaaacataaaaattaagctttgaatagtttgaacaagctacctaggggagaatcattcttccctagttgttagaagtttataacttcagataactttttatctgaagttaagttaatgctaatcttcaaagtactgaatcatattaattcaacaattacttcttatctatttctatctgtattgtaccattctgaatcatagtatgggtaagccatgagtaactaaaatgcatggtttttgtaacctttaccttaatcattttatgaaatagtaggaatgtttttcagagccrtctgtttaaatgttcgtatgattatctgcacttttcttttcatcttcagattatgactgtacccaatgacccttacacttttctctcttgtggtgaagatggaactgttaggtggtttgatacacgcatcaaaactagctgcacaaaagaagattgtaaagatgtaagaattaaatttttatacaaatgatgcagaaaaaattaaggttataattaaaattggttataattaaagttataattaaggttataattaaaagtaagttatgtggatggtaagattatgggtgaatttttaaatttttgttttgctaaaatatttaataagcatatagtttataatcagaaattgaaaaatgtaaaatgttaatattgaagttggagaacttatattttaattgtacatttaaaatatatttatgaaaattcaaataatttgttcagtatatactgtctaatataaaaacctgaagaatttatataaatgtatctcatttactcatggaaacagctttgacttatcaaatagcagttataaaagcttgtggtagttgtctttttttctcctgtcttttaaaccaataattacatgttatcttttttaaaaagaaataataagatagcatgctatcaacatgtttgttcaaatttagcccactttcctaaagataatatctctactatcagtttcttatgctttaatacaattaaattaattaattaattttttttgagacaaggtctcactgtgtcatctcaggccggagtgcagtggtgcaatcctagctcactgcagcctcaatcttctgggctcgagtaatcttcctgccttagcctcccgagtagctgggactacgggtgtgtgccactatgctcaactaattttttttttatttgtagtagataggaggtcttgccatattgcctaggctggtggtgtcaaactcctaggctcaagtgatcctcccgacttggtgtcccaaagtgctgagattacagggatgagccactgtgtttgacttttaatactattttaaacttacaaaaggcctgagaaatcattcagtcttttgaccccagacaagtaattccaagtgatttttcctgacatacattattwagagcacagtagtttttccttggatcattttgaagtagtaaatgaaataagaaagtactattcaaaatatgtttttactgaaagttacaaaaaaaaaaggtactactgttaatcaggttaagtgcttgctaactaaaccagttaccaactggttaacatgctttaggggaaaaagattattttatatatttgaaacagaaataaaacaaaaagtagaaattgaaaaacctttaggctgggtgcggtggctcatgcctctaatcccagcactttgggaggccgaggcaggtggatcacaaggtcaggagttggagaccagcctggtcaacatagygaaaccctgtctctacaaaaaatacaaaaaattagccgggcgtggtggcrgktgcctgtaatcccagctactwgggaggctgaggaaggagaattgcttgatcctgggaggcggaggttgcagtgagccgagatcacaccactgcactccagctcgggtgacactgcgagactccatctcaaacaaaacaaaacaaaacaaaaaaacctttaaacatacagtttaatcagtttttttgttacgtatttgtatatacacagatatgcaaatagggaagcattgaactaaactcagaaataagcttaaatatcacgttattagggttgtttgatatacctgttccttagagtaagtggtgggtactaaattttgttattgcaaactctcttaaactattttagtgtttcagtgtagtaagatttagttgtgtttttctaaacaaaacccccaggaaaataagaaaacaaatctgataagacgtgaaagtagtctttccttagtaaaacttttcctttatgtataaaagtgaaatgaagcagagagtataaagaaaaactggtaactagagtaatccttaactactaaaaacttagaattatgaaaggcatttggttaatgaattctatgtaatgagagtaatgttctgagattagtaattgaacaaagtataaggttaaattgacttaaaaacattactgaggggccgggcgcggtggctcacgcctgtaatcccagyactttgggaggctgaggcrggcagatcacctgaggttaggagttcgagaccagcctraccaaygtggagaaaccccatctctactaaaaatacaaaatagccaggcgtggtggcacatgcctgtaatcccagctactctggaggctgaggctggagaatctcttgaacccaggaggtggaggttgcactgcactccaacctggcgacagagcaaaattctatctcaaaaaaaaaaaaaaattactgagaagaatgaggagtgagagtcattagacaaagcagtatggaatcaacagagtaccttcaggatatgtttggggtactagctcttacattttctaattcttctacagagataagtaataacattatagtaagacctgtcttttgcagggtttgtatttatatgtktactttatttttgagctggttaaggagaaaggttttataagtaaaaagtataaaatatagaagtcagttaattttttgttatattttaatagcagtgattacaattaaaatattatgaataagcctaggcaacatagtgagaccctatttgtacaaaatttttttwaaaaaattagcctggtatggtggtgtgcacctgtagtcctagccacttgagaggctgagacaggaggatcacctgacctcaagagtttgaggttacaatgagctgtgatcacaccactgtaagcctgggcaacagagcaagacatatctcaaaaagaaaaaaaaatatgaatactatataaataatcaatagttatagacagtatgagagatytgtcataggtagattataactccatctttgctgtcaagtggaccaataatagcaggcatttctaatggtactaatgacttagtgatacattatataggtaattttgaattttttacatttctaaagatgttcattattcatgagtatgggaatatttaacaggcatttttgagaaataattcaaattgtattataacattgtatgaaatgtagctagtttagaaagagttttaattgtcacataaatatgagtttcttggattattaccatctttttgtagctggcgctgttctagtataattactcagtattttcagtcttatatttgaaagtaatttttattttttcctttttagaatgtatttaattgctcaaatactgatcattttaaaaatctgtattttaattaagtttagtattttcatattttttcttactttaattggtttataaggaaagtctacaatattgtggtagaaatcaatcaattttggagttgtatggccaactataaagaaaagagtatcttccttagaaatattgattgagtatatttattttgatttcacataggctgaatgtattagaaatatttctagtagaaatccgaaaaaaaagttaaaagaaagccgtattgtttttccgctcattgtcattcttgactgaattaggagttctgagaatggttattctaattactaatgagaaaatattttaaatataatttcacctctgctgtataactatatgtaattggtattatgttatgttttgtaggatattttaattaactgtcgacgtgctgccacgtctgttgctatttgcccaccaataccatattaccttgctgttggttgttctgacagctcagtacgaatatatgatcggcgaatgctgggcacaagagctacaggtaagaagataatattagagaaaatataggactgtcagttcaaagagtaaatctctatgacattttcagttttaaaatttcttgtttgttataaaatttcagaaaatagtatttgtttaatatggattattataaaaaataacatttcaccaagtgtttatgaccctttgggatgatacttttgcagtttaaaaagttgtaacatttgatgtattagtttggcaggactgccataacaaatgaccacaaactgggtatcttaaagcaacagaaatttattctcttaaatttctggaggctcagtgtctgaaatcaggatgtcttatgattggtttctactggaagctctgttcgatgccttctcccctagctcatggtggttgctgccaatccttggcatccccttggtatagatgaatcactcttaatctctgccactctctttacatgcaattttccctgtgtgtgtctgcgtttacattttcctcttagggcactagtcatactggatttgggcccacccctaatccagttagggtgaggtgggccctggattaggtgggccctaatccagtatgacctcactgtaactaactacatctgtaaaggtcacattctgaggttctgtgtagacatgaattttggggagactctgctrtttttcaatcaagaaaacaatggtaaatgtggtagtaagaaaatttaaaacagtgacttgggtatgtattaatgtgtagcatatatttattcctgcttaccttaaagtgctgttaataatgctgagtactgaatttgaatctaatataaactaatgctctttcccttcactcactataggatcaaagtacttccaaaataaacaattagaagtcaacttccattcacattttttcagtaaaggaaggccaggattacacacacacacacacacacacacacacacaaacaccgaatgcacattcatatattcacatattttatattgttaaaaataaaggtggacttgggcagaaaccaacaatgtcagtaaagatggacatagattattgagatgggaataccagatgagatctttcttttcggaactgtgatagcttttatttatattgctacattaagtcacatatctaataataattgaggagtccagtctatttggatatgtacatttaggggaaacagtaatataatatgaaataataggcttaattattgtttctcaacaggtggacacaattgacattttgagcatgataagacttcattttgcaaggttatacagctttgtgggattcttagaatttagcattcctgggcccccagggcacaaagtgccagttgtacacctatctgtcatattgcattgaagactaccagagttaattaaaattggaatagtattcttaactctgtactatataacaggcaaatttcatggcaatcagaaatttttttaaaaagtaaaagttgtatcatcttaaggatattgcatacrttgcatactaatgtatgtagtatgctaataagtattagctttttgtaaaaatttgttatcttaatttggggggaacttttggaagatgacttcgtgtgattgtatttataaatcattttccttgattaactcatttcaacaaagcatacgtaatctggaattctagacaatcatgaatttttttggtagaggtgttacctttataccatattcttttttgttttgttacaaaatctgactgcagaggaagaacctctactggaaataaacgtgatggcttttatttgtattgctacattaagtcayatgtaataattcagattaagagttttaaaaaatgtttttctttaaaacattattaattttaaataacttcttgtttcttttttagggaattatgcaggtcgagggactactggaatggttgcccgttttattccttcccatcttaataataagtcctgcagagtgacatctctgtgttacagtgaagatggtcaagagattctcgttagttactcttcagattacatatatctttttgacccgaaagatgatacagcacgagaacttaaaactccttctgcggaagagagaagagaagaggtaggtttactcaaaaccatgtcctttggccgggcgcggtggctcacgcctgtaatcccagcgctttgggaggccgaggtgggtggatcacctgcggttgggagtttgcaaccagcctgaccaacatggagawaccccgtctttactaaaaacacaaaattagctgagcgtggtggcacatgcctgtaatcccagctactcaggagactgaggcagcagaatcrcttgaacccgggaggcggagrttgtggtgagccraaatcacgccatcgcactccagcctgggcaacaaaagtgaaactccrtctcagaaaaaacaacaacaacaacaacaacaacaaaaaccccatgtcctttattcaattcagaaaacaattcagtgactcttggggcctaaaggccaaaaaaaaaaattaattttcaaggcacttacagttcagaaaacaaaaaacatgagacatacttgaaagaatagaagctaataaattactatcagttattactaattataattagcaattagttactaattactaatagttactaattactaattatagttagtaattagttactaataatttgtaattataattagtaatgacaaaaatagtatttttgtaatttgtgttataattaatagtaaataattactagcgtctattcttaataatgtattagtaataataaatcactaatttattattggtattctaaatactatttctaaaaccttatccctaacagtgaattattagggataaggctttagaaaaaaatattttaaattatttttaaggagaatatacttgatagcaaaatgtttatcttaactttgtagatgtacagcagcagcaagaaagatcaacagtgctaacacttgcagaaaaggcgattaaaataatagaaaatatgatgataaatttccaagagactaaatgtgtatgtccatggatcaatagaagttttacgtattaccatttactcttcatatatggacagcaatccctttctgtcccaattgtgcctctttcacagttacatactagtgatttataacagtaaccttaggtatattttacaaaataaatataagtgggaaaaagataagttaaagtagttgtatatattgaaaagtaggtgaatgaattactttcacaagactactagaagataatgaatttattatttataaaaggggaaaagtagaaataaggtatctttgacagtacacagctgtagaaaaatgtttgctttaacctgtttaagcttctttcctcaacatgtttttcactttggcttttttattttataatgtcctgtgttattcactttgaactttggcttgtaaaagtcttttgaaattaaccattgatttttattttcagtgaccttttggtattggctcaatgcctattaatacgttttaaaggttactaataacagtgattttggaattcctacgagatacaaaactatattcattcctcataatttcaggtgtagagggctgtaaaattagaaatcaggattactttataaatatactttgagatttttatccttgcagtgtatttatttgaattaggaaattgatgaagaagggtatgatggctaataaaatgatttttgagtttattctggttaaaaacatgaaatctgctctgtcattttgttactgctatgcaaatttccccttgaaatacatgggtaagtaaagttatagtcaaactgtgattgttacataatgaaagagttggaagtccatagacattttaagtgggccaactagttttgataccatggaatacttagccaaaagatatttatataatcagagtgaatgaggctgagtcatgaacatttttttttctgggagacttttccttggtcttgtttgttgcattaactaaattaagaaaaacaatgctgaaagtggatttaaattatgcttgttggccgggcgtagtggcttacgcctgtaatcctagcactttgggagghcgaggcgagtggatcacctgaggtcaggagttcvagaccaacctggccaacatggtgaaaccctttctctactgaaaatacaaaaattagctgggcttggtggcaggcgcctgtaatcccagctacttgggaggttgaggcaggagaattgcttgaacccaagagaaggaggttgcatgagccgagatcacgccattgcactcyagcctgggtgacaagagcaaaactcagtctcagaaaaaaaaaaaaaaagcttattataacaaaccaaacaattcagaggtatacatagaataaattaataatctgtcttatttgtaattctgacacattttggtgttttatactgaaactttgatgatagtattcagacaaacttaactcaccaaatatttattgggtgcctactatacaccaagtcctctacttaactttggaaaatgaaggatgaccagacaaagacatgatctcttacttaaggaattcacagcttagtggaagtagaggtacaagtaaataaatatgtaaaacttaatatagaattatgtataaggactaygttcygtataagtagaacaaagtagggaataattaatcttgagtaaagcctgaggaaggttttaaagcatgagtaaaagtttgttgtatgattttgtcttatgtttccataatatttttgtattttctcaatttgtggaggcctttctatttccttaccgcctctaataatttctttcatttttttcccccttctttctttggttcattcttttgtcttaattttttttgtactttctgttttcccttatttttctatccttttttctttttatcatctctcttttcttctttttgacagtttaccacctgccctaccccattattgggcttctttgttgaattcattctttcattttcttctggtccccatagcttgtgcctaaaaatatactccagatctgactactgcttaccaccacccttgctgcattaccaccctgatccgagctatcagcatctctggcrtgacctatccccctttgtagttgattttgctagctttctaaccagtcttcctgctttcacttcctacagccctatagctatacagcattcaaagtgatccttagaaacataagttaaatcatgccgctcttctcatcaacattctaagtggctccctgtcggacctaaagcaaaactgaagtccttatggtggcttcaagatcttatattatctggtcctaattattacttctactgttttcttctttactgtgctctaaccacatctacttgcttagtaactcaggccaagcatgactctattttaggattttgcatttactctgcctgaaatgctcttccctggatacctggattttttcttccctgtgtatttcaggtctttgcttatgtaaccttcttggtgaagccctacttcaccatcctatttaaaatcacggcctttaactgatactacctatccccttttctactttatttctctccataacagtaactttctatgtatattttgctttttcatttcatgtgttgtttgctccatcgggctgtaaattctgtgacattggggattttttgtgtgttttgtccattgttgttttccaatacctgtaatagtacctgacatataaaaggtgctcaaaaaatatttggtgaatgaaacgccattttcagtattcttgcctaggttatttcacatactcagaaagtcaaatttgagattgtttttaatttgaagattttattctataaataattgctgaggttgtaaaaccagttctttggctatgtaatataaaaattcctctctgttgaaaccatgaagcaagattctattatattgttttaagaatagttcgtatgaaggatgaagccctctccttttgggagtgattagttgtttgagaatttgcacagctgccacattaagctttgttctggttattccctgtcacacacttacgtcttcctgtgtagattttactattctcagttgcctttagccatacttacacataatatggaatttatggggatttttttttctgtctcctttgctcaggatgcaaagatttttttctattcatgttactaggtatggtttccagaagaaatcagaaaattcactgttaagtgtcaccaagtttttatcaaaacctgtttaattttcaggaaaaaaaaatcaatgaatgctgtttttaaaaaataaataaaaataaaaagagtgacccacaggatgggagaaaatgttttgcagatcatgtgtctggttacagtttagtatccagaatgtataaggaacacttacagtgcaacaataaaaagacaaatatccaaacttaaaaataggtaaaggatttgaatatataatacttttttttccccagagaagacatataatagaaatggcaataagtacataaggagatactcaacgttattagtcctcagggaaatgcagatcacaaccacagtgagatatcacttcatacccactaggatgactaaaataaaaaagacagacaataacaagttttgacaaacatgtagagaaattggaaccctcaaaaaattagagttattatatgagccatacttctcctcccagatatacaggcttctcttggagatattgcaggtttggttctagaccattgcaataaagtaaatattgcattaaagcaagtcacacagatcttttggtttcccagtgcatgtaaaagttatgtttatactgtaccatagtctgttaagtgtgcaatagcattatatcttaaaaaccaatgtatataccttaatttaaaaatacttcattgctaaaaagtgctaacaatcatctgaacctcagtaagttgtattctttttgctggtggaggggcttaccttaatgttgatcactgctgactgatcagagtggtggttgctgaaggttggggctgtgacagtttcttgaaataagacatcagtgaagtttctgcatcgatagactcttcctttcataaaagatgtatttgtagcttgtaacggtgtttgatagcttcttacacacaatagaacttttctccaaattggagtcagtcctttcaaaccctgctgctgctttatcaactaagtttatgtagtactctataatagatccttttgttgtcatttcagcagtgttcacagcatcttcactaggagttgcttcttacggatgagcaaagaaagtggtttgcgcctcaagaaaccactttctttgctcatccataaggagcaactccttatctgttagttttatcatgagattgcaacaattctcacaccttcagtctgtacttctaattctagttcttttgttgttttcacctcatctgcagtgacttcctctactgaagtcttctacccctcaaagtgatccactagggttggaattaacttcttccaaactcctgttaatattgttattttgacctcccacgaatcacaaaagttcttaataaggcatctagaatggtcaatcctttctaggttttcagttgacttttcacagatccatgagaggaatcactatctgtggcagctatagccttacaaaatgtgtttcttaaataagacctgaaggttgaaattactctttgatctatgggatacaatgaaaatgttaatctccatgtacatctccatcagagcccttggatgaccaggtgcattgtcaatgcccagtagtattttgaaaggaatctttttttctgagcagtaggtctcaatagtgggcttcaaatagtcagtaaaacatgctgtaaagagatgtgccctcatccaggctttgttattccatttatagagcagattcaattaaacataattcttaagggccttaggattttcagaatggtaaatgagcattggcttctgcttaatgtcaccactgcataagcccctaacaagagaaccagcatgtccttcgaagctttgaaggcaggcatcagcttctcctctctagctgtgaaagtcctaaatggcatctgcttctgatagaaggctgtttcatttgcattggaaatctgtcgtttagggtagccactttgatcaattatcttagctagatcttctggataacttgctgcagcttccacatcaggacttgctgctttaccttgtacttttatgttacagaaagacagcttctttccttaaactgcatgaaccaacctctgttagcttcagacttttattctacagctcccttacctctaacagttttcatagctttaaagagatttagcgccttgctctgggttaggctttagcttaagggaatgtgatgactggtttgatcttccttctagaccactcagactgtttccatatcagtaataaggctgtttcgttttcttatcattcatatgtccactggagtagcacttttctaaaagttccttccagaacttttcctttgcatttacaaatttgctaactgtttggtgcaagaggcctagcttttggcctgtcttggctttcaacatgctttcctcacttagcttaatcgtttctagcttttgatttaaagtgaaaggcatatgactcttcccttcacttgaacacttagagaccattgtagggttattaactggcctaatttcaatattattgttgtgtctcaagaaattggaaggctcgagagggagagagatggggaaacagctggtcagtgaagcagtcagaatacacataacatttgtcaattaaattcagagtcttatatggatgcggtttgtggctccccaaagcaattacaatagtaagatcaaaggtctctgatcacagatcaccataataggtaggataataatgaataagtttgaaatatgagaattactgaaatgtgacacaaacataaaatgagcacatgctattggaaaaaatagcaccaatagtcttattcaatgcagggttgccactaaatttgtaaaaaaccacagtatctgtgaaattcagtgaagcaaagtgcaataaaatgaggtactatgtttcaattcttttgggtagttctcctgtatacccaagagaattgaaacatgttcctacagaaacttgtacatatgcttaattcagcattattcataatagccaacaagtggaataagtttgttcgtcaaccaattgacgaatggatgaacagaatagggtatcttgctaaaatggggtattatgaaaaatgaagtactgatacctgctacaatatgaataaaccttgaaaacataatactaagtgaaagaaaccaaacacgaaaggccatgtattgtatgattatttatatgaaatgtttagaaaaggcatatccacagagacaggaagtagattagtggttgccaggagctgagcagagggatgagtggggagtggctgatgatggtttgtttctgggatgatgaaaacggtctggaattatataatgatgacrgttgtacctctttatgaatatacaccactgaattgtataatttaaaattatgaatattatggtatgtgaattatatttcaatacaaaaatgtttaaaatggatcagatgtggtggctcatgcctgtaatcccaacactttgggaggcmgaagtgggaggattgcttgaggccaggagttcaagaccaacctgggcaacatagctagactccatctctaaaaaaatttttaaaacagctggttgtggtggcacatgcaccaactactcaggaagctgtggctggagatcttattagctctggagttggagcttacagtgagctaggatgggaccactgcaatccagtctggagaagagtgtgagaccctgcctggaaaaaaaaaagttaaaaatgtaaacattaaagggagcggtcaagagtgataggtgccataaacatgtcaaataagctctgaaagatgctgtttgagttggcaattgattattgatcatattattgaacactttataattgatcagtgaacttggcaattgatcattcactggtgactggtgagaatgaagttagtggaaagataggaaatcaatggaaagattgactacagtggattgaaggaggagtggtagattgaatatagaattttctcaagaagcttaagtaaagtgatagcaagagaaaggactgtagctgtaaaactgagattttatgaagttgaaatattgttttttttcttaaaaatgataagaacctttagcatgctgtggcaaagagccaagagagagaaaatggatgtaggtatagagaagagagaataattggtcaagcaagatactcaaggagttgaaggaatgaaataaaaagcacagatggagaaattaggcttaaatagaataaatgatacacccttcaagaaaggctggaaggagttagaaagttgtagatgtagatttaatttatagaattcagctgaagaaaatgatgttatttttattttctctgaagtaggaggaaaaattgttaagagggcaagaatgagggcagcaggatggaatagatagcctgaggcaagtcataaagggtcgcaatagattctgtttgggaaccgaagagtaaattgtcaataatragtaaattgtcaataataaataaaaataatgatggttcccattgttaattaggtatgtgggtaatttaactagactatatttatcatcacaatagaaaactaaggctcaagatggttaaaaatatcttccttttgtcagctggaaggtgatacaggtgggattagaaatcacatatacatgatttcaaagttgcattcaggctctttaggttgaagatattagatataggctgtcaacatcagtggatatttatcctcagaatgaatgctttaaaagactgacgcttataccagtgtctttcatattttcatgtagatctaatttgcatactcaagaagtagggagatggaaataaatagacataaagtatgctttaagagttgagagtagatgagttttagacttacatagaatttacccgttcttattttttagttgcgacaaccaccagttaagcgtttgagacttcgtggtgattggtcagatactggacccagagcaaggccggagagtgaacgagaacgagatggtaactatactttggtcagcttttctttgtatatggtattttaaaattaatattttaacttccagtttcttcactattataaattattctgtaatgaacattcttatacatataggtatacttatgcaaatatatcttaggataaattcttagaagtggaatggcksagtcactggataagtaccttttaattttggtagttgttatcarattagtctccaaaaaagatgtgctaatttacattcccactgaaagtataagaatgcccattaccccatagtacgttgggtattgtcagactttgcagtttttgcctttctattagatattaagrgaaatgaaaactcagcccaagggttttatattagcacataaaatgttttctatcaagtgcctttgataagcataagaatcaaccctgggagctttaagatagcacacttgaaaatagaattaatctatgaattataattctatattattatgttttattaaattggtctgtaaccaaaatcttactataatgacttctgaaacatctctygtgatcaaaagcatattccccaatatatgagctacattatataaaggcaataaagtgtaaaagaaactctgatttcacagaaaatgtaagaagaacygattttcattttaaattataagactatagaatagagttgtcacattttgaatttgacattacacttttaatttgaaaatacccttggaaaaacttgtttacttgcaggaggaaaaggagtgagggaagagacaaaatactttctggttccagttaatttcaaatatctgaaatttgcttacagtaaatgatgttgaaaataaattgactttaaggaaacttcatgcaaaagcataaggctattttgtgtctgtacttgattataatgctttagggagagggaaaacctttcttttaatctattaaacttagaattcatgagcctttcttggctgggtactcttagaactaaaaatttakgttgaggtaggaagtgggaggtttagtggtacctaagaataggcaaagatgaaggagaggtgagccctgttctcaagaaaccttaccatacacatggaaagtcactgatataaacaattactataaaatgtgatgagagctctaatagatttatatacattcatacaatttatttaggaaatttgatttttaaaaatatgctttcattttaaagcccttcaaatctaggtttttgtattaatgaaagattctgacttattactaaactcactgataagacctatattgtaataggagagcagagtcccaatgtgtcattgatgcagagaatgtctgatatgttatcaagatggtttgaagaagcaagtgaggttgcacaaagcaatagaggacgaggaagatctcgacccagaggtaatttttaatgttaattaaagtcatcagaaagctggcaaaaactacttattgaagccagtttttatttctatcatgtaaattataccatgttttacatstgtaataatcacaaggttcttattgtgtggtgtgaagtagtagagaataaaagatattggatataatttgtcccttctggtgccattggacctagtgcgtatcttttgcttttctcaaagtaaagtagaagaatctgaggtttcctattttaagcctttttttaatgcactctgagaatggaaatatataaaattctgtgtataaacaagttttatgtaataggaaagattgattgctttaacaagaatatgttgtagataagtttttatccctcttgactggcctattttgtcaaatgggccaaatcaccagtagttaytatcactgaaattatatatttgtgtgtgtaaatataaatgtgttttctgagcrtatctgtttagagttgttggttttagaaaatatttaaaatttgaatttgccttaacatgtgttttgaaggtggaacaagtcaatcagatatttcaactcttcctacggtcccatcaagtcctgatttggaagtgagtgaaactgcaatggaagtagatactccagctgaacaatttcttcagccttctacatcctctacaatgtcagctcaggctcattcgacatcatctcccacagaaagccctcattctactcctttgctatcttctccagayagtgaacaaaggcagtctgttgaggcatctggacaccacacacatcatcagtctggtgaggataagtatgctgtggttcatctaatgatttttgatagtgaaaatttctttactggctattttgaaagatactaaatcacatcaacttcttgttggaataaatgatcaaaatgacatgtaatatatggttatgtaacttaaacacaaaaattaattatgtcttacttgcatgaattttaacaaatagcaggaatcttcaatttatataaaacaattgttttaaaagtacaagtaccaaaagatagtgttttgacatagtttaatgtgcctgacttaaatattattttatagattattagagaccaaaatatctttctagatttatttggttttatgtctatattaaagtgattatgaaaatatcagtattagtttcactttgcttatattcttgattatttccctcaaataatgcagtacttttaatatactctctatggtggatttgatatggtcttttgtcaacaacatataatttaccaaaaaatttgtttctctagtatttacatgaaaaagaattattttaccaaatgcttatcttcttgatacttgatgctagtgaaaataacctctacgttctgttaaaatgctatttttttctcagtattataagtctttatggtcaacttttttcccctaactatggaatgtgctagtatttataatagtaattttcagcagatgtatctacagtttactcggtactttaaactatatacatgtaattataaaaaccaataagatatttattcatagttttctttggttcttctaaggaagaattttactcaatatagagccagaattattagcaactagaaatatagctggcaggcctaagctgaaacctataaaaaaatttctaacagcttagctgccaagctgtcactttattcttacatctctggaaactgatgccagattaccaaatatgggatgttttaatttaagcactcttttatcagtatataccacttttagtaattcattttcagtttctatgggaataaaagccagagtcagttacataactgttaacactgtatacattttatccataataataagctaaagctgagctacagaatcaaggttttcacactcagttgacatagcattttaatttatggaaaaataaaatattttggaagatttgggaattaaaagcagaagtagttaaaagtttgtttttcaaagcaggtaaaattgggaaaagcaagaatttttaaagtgatattcttgaacatattgatcaattataagtttttaggaaaacttagcaagaagactctagcttacattcagcttccactgaatctcaactaattctagttgtttcttaaatatatttatgagtaaagtatttggaactttattttttaaagctatctaatgcattttaattactgcatttcaaattgctaaattcctttcaatatttaatgtaagtattaaatgtgacaatcatttgaaytattgaagaagaaaaaatatctttggtggtcatgtgatgattattgaaacattatgcagtacttttactcataaattatttataggaagtaaggaaatatttttaactgggagattattgagagaattttggttgactaagctatagataattagaatatttccatgttatcaagacattatcactattgagaaaaatgatttggtgttagatgtaacatctgaaggttatgactgtagttgttctgataacagctttttcattattctggagttcaacgtttcaggagtaaggacttaatttgtttctgtttttgttttttgtccaatctcttttgcatttgccatagcctaagtccaaatgtgtttgtgaatattgggaattgtccattgggtgaatgtagtagatggaaatgtcagcttaggaccatgatttctattatttccctgcatagagatagagaaaatgataaagtatacttctgtctatgcttgccttgctgtggatacctttttatgtaaatgtttatccctttacatgtcctccctcatttttactgatatcaaagaaacggacaatgggaatatgaaaatttgctacgctccatctctggttgaacctaattgtctgccttctcttagtctacagtggaatcactgaatgataatgaagaaagttatgaccacaaatttcaatgggtgctcaacactgtgcatcagagcagcctcacactgttgctctccagctgtacaaaatgactattttacactttcatgtctctcaaactttaatacttcccttcatccccgccccacttccagattctaacctttcattcacaatgaaaagtactcrttttcctactgtcaataatttcccagctttccaacatctgtactcacattgtgatagaagcagaaagctcctatcaaaagctagtcaawgtagttgctatccctttccagcttctcaaagatttcgccccttctcttgcattatcattgcctttttttgccaaattgtttcttttggccttaacatgctcttattatctcctttctttaaaaattttctcttaattatctcacattccccttcagctattgccttatttctctgctgctttcgtaatgagaatcctcagaagagttgttgatagatgctctctccattttcttgccatccttcatttatttattaaccaacccccatctgcttttcaacccccttttcctctgaaacttttaatcaaagtcactagtgacattcaccagtttaaaggatatytctctgttagtaccttactagatttttcgacccggttgcatttaacataggctgtcactccttcttgaaacactttcctttcttggtatctatgatatcatatttgcctatttactcttattaattctggtgggttttcagtaactgttgttcgtgtttcttgttctatctccttctgaatattataatcaaaccccttagtttgggctctcttctcttctctttacatacactctttctctgggtgattgtgtcagttcctcatagcttttaatatctcctgtaaattcatgactcacaaatatatatatcagcaatctgatcttctaccctgaattccagacccttatgcctgatgtctgactgctattttgacagtatgtttttgttattgttgtacatcttttttttttttttttttttttttttttaaagacagtctcactctgtcacccaggctggagtgcagtgcacaatctcaggtcactgcagcctccccctcctgggttcaagcaattctcctgcctcagcctcccaagtagctgggattacaggttcctgccaccacacccagcaaatttttgtatttttagtagagatggggttccccatgttggtcaggctggtcttgaactcctaacctcaagcaktccatccgcctcggcctcccaaaatgctgggattacaggcatgagccactgcacccggcctattgttgtacgtcataaatctacatgttcaaactaaaacttaatgcagcctcctacccttcctgttccgtaattggctccttcttggtccatttgcttatttgaataacctgtgagtttttcttgattccttccttttcctcaagtcccatgccagctcatcagcaagttcttttgttcctgtatctaaactataacctgggtcttttcatctcaccatcatttcttgtctcctaattaatctscctgtacctactgttgttccattataatgtattctccatgcaggagccagaatgagtattttaacatgttaaatcagattatataactttgctgtttaaatcccttcagaagttcctaattgcatttggaaatacaactacaaaagaaaaaaaaatcaaactcctcactgtggacgtataagaatttatatggcctgcccttccctgtctctctagcctcatctcattcaattttctcagtacttgatgattgttacactctagatgtactactgatttctttcggttatcagagaatttccgtgccaaattctgccctgccctgccctgccctcccccgccccaccccgcctccaccctgcccccaccccctcccctcccccctccctccctcccttcctcccacttgcttgctttctctctctctctttctctctctcttttctttcttttcttccttcttttcttttctccttccttcctttctttctttttcttctttttagacagagtcttgcactgttgcccaggctggagtgcagtggcgygatctyygctcactgcaagctcygcctcctgggttcacgccattctcytgcctcagcctcccaagtagctgggactacaggcgcctgccaccatgcccggctaattttttatacttttagtagagacagggtttcaccgtgttggccacgatggtctcaatctcctgaccttgtgatccgccctcctcggcstcccaaagtgctgggattacaggcgtgagccactgtgccctgccattttcttttctttctcttctcttctcttcttctttccttccttcctcccttccttccttccttccttccttccttycttccttccttcctttctttctttctttctctctctctcttttgtttctttctgtctctctctctttctttctttctstctctctctcttccttcctccctccctcccttccttcacttcttccctcccttccttccttccttctttcctccatcccttctttccttctcctctttctcctttttctcctttcccatctttctctctttcctgtcttttcttttctttccctctttccttcttacactttgttcttagtgttattctctgtatgcttgggaagcccttgtcctggcttatcacttggccaacttccttttccttgagtctcagctcaaatgccatataagacaagtctttcataactaccctaggtaaagtcctctttcctttttcttcttgctgaaattttattctcttctatataaccctgtttattttgtgaaaagcaattataaaaatttataattttcttttactatgataagctctcttgaagacaggatattgtctatcttgttgtctctgagtaagcatcttttttccccaacaatattcaccctctaaagatacgattaaaagtgtgatgagacattttgttatctttaagctgatatagactagatagggtatatttagctttattttagtctttagattatacttttagccccagtcatttactctggctgtttccattaagtttccaaaatttggtaacacctagaagagagrtgctgtgattagctgtctaaccatttatcattttggatccattgtttgcctttgactgtctagaccacataggactgagtagataattgttcttaggttgttctgaagacattttaaggtaacttacagaaatactttaaaaaattgtctcattatatatatatatatttgtttgtgctttttcactcatgtatatatgggtgaatatgggtatgaaaataattaattgaagcagtgagtgagttgaatacgcaaaatgaatgccctgaagaatggtaaatctagaggggtcacagtgttggctttggagttttgtagctaaattaggaaggtaagtagactgaaatggaatttaaaatcagttgatggatttttttttttgctttaccctttgtattcttgaattttattttaattcatatgtcagaccatttgaaaccacgttctatatacctcgcccagaatttgaagatattttgatttttatatatcttcttttcttgaacatttaacaaaagactgctttttaaaatgtgattataaaattatatgtttaaaaatgagaaagatacgaccatgagctaaaactgtataggttaaaatgaaatcttcataattttatttataaaaaatatttcaaaataactatgaatattttcttctcagtaaggcctatcagacatctctttcagttatttcttaagttaagcctagaaatgttttcatttagttcatgatttgtaaattattctcatgttaagaatcttttcataatgaaagagtattaaatgaggcatttttccaagtgtgctatttaatttttttctttggtttcattttaacctatttaaagaatatgatttagagaagytggtaactttgaagtggatggggatatcagtatatataaaattcacctttagggctcatattgagaagtgaatcacttaaagcttccctgccctgtgtttttaattaaatagactactcagaccatcagaattttttttttttttttttttttttgaratggagtcttgctctgtcaccaggctggagtgcagtggcgcgacctcggctcactgcaacctctgcccccgggttcaagtgattcccctgcctcagcctcctgagtaactgggactacaggcacatgccaccatgtctggctaattttttttgtattttagtggagatgggatttcaccatgttggccaggatggtcttgatctcctgagctcgtgatccacccgccttggcctcccaaaatgctgggattacargcgtgagccactgcgcccgacccagaattttttaaagatagcatatgatgtggtctgtgtgtggattcttgcttatttagtcataaacaggaattacaaatttattttggcctatgtagaattattatagctaaattgagctttgtagaaaaattgctggagaagaactctgttgtgcaccatatcaaagcaaacctttcaaagccccaaatccaaattatagcttccttaaatgggataaaggtctagtctagtctagtcagatagatataggccatttataggttagaaacaagtggagagaccaggtgtggtagctcatgcctgtaatcccagcactttggraggccgaggtgggtggattacctgaggtcaggagtttgagaccagcctggacaacatggtgaaactccatttctaccaaaataaatttgttgtgcgtggtggcatgtgcctgtaatcccagctacttgggaggctgaggcaggagaactgcatgaacccagtaggcagaggttgcagtgagccgagatcactccattgcactccagcctgggcgacagagtgagcctctgtctcagaaaaaagaaagaaagaaagaaagaaacaagtggaaatattaggtcaatggccatttttggggaaaccaaagaagagaacagagaaacatggaggtcagtgaagaagtgaccagtcccaggagaaaaaatgcacaaggatcattaccaggacaagaaataagttgggactagaagacagatttatagcaggcagataaagtgccaccaaattagatataaaaatgatccagagtccaggacaaaaatactgtatgtattgtagaggcaggatgtgaggttagaaccaggtggacctttgttgcgtcaactgtagctgtttttgttgttcttctgtctcactggaattaagtcattaggagaataacctgtaatctttcagaagaaaacaagaatagggtttgtagtttgaggagatgacaaagtacaattttcctgtggcagtttataataccttgttgaatttttatcatcgttgtttttaaaattcaacccaaggtatttattgtattcaattttcagtttgggtcatgttgacaaaagctaattctccaagcatttatctacatttataaattatgtatgtttgtgatatctttttaaaggatgtaatatgtgtgtatgttgactgctttaaaatttcaagctgctagcagaactgttatttagtctgttatgtctggttgaattttttaattcaatacttgcttttcctagttaacagctatgtggtgacttctcttctgagcctgattttgtttttaatccaaggagaaaaaagccaccatacaagcagctttcaaagcagataaattcttatttaaaaagcaccggaaatattgaataaatggttcataagattatcacaactaaatcttgatttttttcaagttttagagcatcactacatgtactgagatcttgctgtttgccacttcaccaagtgggttctgggatggagatttatgtcttcataaaacatttggtaactcaatagagagggttgacactccaatgaaattgatggtatttttctgcttttttagcaaaatttgacatatatggcctctctcatagatttcttttgaagtgtgaagtgacaaactttatggctgtataataatgctttattttatattgctaaaagcattactattatgctgactataaataaggtgtctgtacctacctgaaaagaaagcagtatgccactgagcatcaccatttgtttgtcaatgaatactaccctattggtactggatcattttctaggaagaactaacagtgagtgagtatgatgttatgagttattaaatcttaactaccaattgggtaattgaataaaatgctttataaatagaaaccatcgtaacaagaaattagtacctggcgttattgatttctgaaacagtaaaccaaattttttactcttagtatctggagaggctgaaagtttatttggtagtttgtataatttcatgctagtgtcagaaattctctatgctcctaccaccaaatctcactattgacatctctgtgcatattttctgcctccctttgattataattaatgaggtttttatgcacctattcaaaaccaattcctcctctgatacactggaacttatctcctttagtttactcagggacatcattcctgtggttttccgcttttttttaagcatcatctttctctctccttcagttaaacattctccatcagaatacagacgtgtgtattagctcccaaactaaaaccacaaacttctcttgattattattattattattttttggtgggtcttcctctgttgcccgggctggagtgcaatggtgcagtcgtggcttactgcagccttgacctccctggctcaagtgatcctcctacctcagcctcccgaggggccacaagtgtgcatcaccatgcctggctaattttgattttttgtggaaacaggatctcactgtgttgcccaggctggtttcaaactcctgagctcaaagtgatactctcgccttggtctcccaaagtgctgggattacaggtgtgagtcacggtgcccttcctgccttcccttgattctttataaccctgacaatgattatccaatttatctgttctccactaatagcaagagttgtacaaagaatatatatactttgtgtctctacttcatcacctcccctttctcttaaacctgctgctatcagattttggtccttattatttaactaaaatagctcttgtcgaggtcatcaatgacttccatcatacaaaatccagtgattagcccttagtatctcttttagtatactagcagcatttcacacaactgcttactccatcctttttgatacaatttcacgacttagcctacagagctctgatcattcagttctccagctctctctctggcttttccttcttactctttctagaggttctttttcctcttaaacatttgactgcctcaagattcagttcttagacctcttctgtgtcatcccttactctttaggggacttaaaatgacatccaaatttatatctctgaattgtagacttttgtattcagtccctacctaatttctccacttggatgtctattcattctttcccccaacactacttgtttctccattgttccctgccgtaataaattggttacttgtttttcccgttacctaggccaaaaactttgggatcactctgcatccaaactatcagcaaattctactgcttttacctttaaaatgtattgcacattcctatatgctttccccttgagtatttgcacttgctcttttctccacctggaacactcttcctccaggtatccatgtggtttactcgcttatttcctcgaggtgtttgttcaagtggtgccttatgagagaagctttcctgagttgccatatataaaataacccttgccctgtcatcattattcactatcccctttaccttaccctgccaatttaattcatagcagttatccccacgtgacacaaacacatatgttcaacatcatgtgtgcctgtgtattcgcaaatgtctttttctctcagaacattaactccacaagaataaggactgttttgttcaatattttatttatccctagagcctaaaacaatgcctcatacatagaagacattcagtaaatatctctttgcagaatttaatgttatttttctacttttcatctgtgatcacttcagataaaggttaagaaaatattgattatgtaaatctttttgaacttaaaaaattttttaaaatgacaattctaacatgaaatatttagctgaagaatatataactcacttttttagagctcttctcaataaattctgagttgtttctaaatgcataagtttttatccttttaattgaattttgttatttgattgaaattaacaaagcagcttaaatttttgtgtataaatcagatgagttaactgattgttttcaatttctgtttctttcctagtatcattttgttctatgttcattttgaaatcttttgcttatggaggactttttatttccatttggtttaattacttaaatattcctagagaaatatatgtatctaattcatcgtagttaaatagaagcatttggttgtatatgtattgtctcataatttaatgaccagtaattttttatcagtaatttgtttatagtattcctctatgagacatgtgttttgtttatatccttcttcttttttaatgtataatcaaattcttattattttctattttattactgtcttttcacctttcttttcctatttgtgtcagaatttttaaggggccctgagatagctttgcttcgtaagcgcctgcaacaactgaggcttaagaaggctgagcagcagaggcagcaagagctagctgcacatacccagcaacagccttccacttctgatcagtcttctcatgagggctcttcacaggaccctcatgcttcaggttattaatgtcaagtgtccttaagcagctgatagaattgttttttaatactgctactgtgtaataaggtgcttcccttttcccattcaaaaagagagctaatgcgcttgcagcttacccctcctttccttgcatatgggtggtattcaacatcacgtgttagggggacagattggcagcagcatctgccagagaggtgaatataaaataatcaattttaaaagttgtaatatatttggagaggggcaaatatttattacttttaaagctgatgacctctttttgaataattagtgaatttagagcctgcattgatctttctattgaaagtttgcatatgctgaaatgaatctatgctttatggctcctagctcttcttcttcttcctctttgaatgttagccaatattcctaaaacctagtaatgctagattttagaattatagtattatttggccatactagcatgctgactaaattatttccttctgtcattatttgaaaattttcaatatttgctttcttattcctctatacgtaatcaactttctgatgtgtagggcagcaaaagtactccacagtctcatgttcttattatgctataaaactgtgataacatagtaaaaattgtcactctttttttctcaatgagtgttttaatgccctgtcatcttatgaccagaaagttcatgatgctcartaaacatttgttaaaagaattaatgaaagatatattaatagcacaaaataatttgtcaactwagttatttcaagatgggtaatagatactgtaaatcctatagtattatataaatactatagtaggtataataagttatttaggaacaagaatgtctaggttctcatactaatcagtttataatgctttgtttgatatgctttcttctgctaccctaaagagtgatgagtttgggctttgagagttctaatttgattatttggaactaatttatatattggtagaattggacaacctgcactttataaatatctgttctagtaagtgctgtggtaacaaaagcacattttatatgtggtaaaattaaataaatttaagtcattgtaatatagatatgatgtttgggataaatcataaactttatttttaattcaatgttatattaatagagggagtatcaggcagaggcctctgatttttttttttcctatggggaaatattttcctatactttaacaattaacaagaaaatttgaccagattacaataatgacatttaataataaaacatttttgkttttttttttgctgtatataaacgtctagcaaacatgttttgaaggttaaaaaatcatgaaacctaaaagtcaatagaaagaaaaataaaatgtccctacgtatataattatttttaaaatactaaaatttagcagattacaaacttagtattaaaatgatcttgagtataaaacaaaactgtctaacaggaaagaagtatacattgtagatgttggaaaaatattttgagattcactaatcttttgtaactagttcacggatttgaattgaagcaagctctttttagaatcagaaagctttagagtgaatgtgtggtttctgtgaagtaagatgctgtctttccaactcttaagtgttttctaattaaatatctagtttggcaacagtagaaattaaatttatgaaattcagcaggagggtaggttttaattgagtaacaattataaaactttatcttatacataataattaaatgcagttttgtatatggacattaattgattcattcttttatgatagatgttactactatctacccatacagaaagcaccaaaattagcctcctagattttaatttattaataatagaagaatgtgcgtttctcatatgtaagaagcatatttttccttcatactttggtatctttagagtatcaattagtggtgatagtgccagtaaaacatatttctgttgtcttctcacctatttaagtgttttagctataagatgttcaaaggagacattactatgatttggaaaccaagaaattttaaaaagtatagaaagaatttctgcattacattgtttggcaaccattttattctcttttcaaaatatatagaactcatgggaatattctgtgaaatcagtaatacctaattcctgtaggaaagttagatcaaaccttgaaaccactttgtagaaataatcacctacatttttagtgggctcaaatgggaaggggcctgatgctggtttaggataatcccagatggaatattatctatttagttgctgatatttcttggcaattgaagactaaaacaccattctaaggcaccaaatgatatcaccttaagtttcaaactgtttaaaatgagctgtataaaataggtattagaagatgttaaacagtggttttttatttatttttggttgttcrctctttgtcatcagtcttatgtggaaattccaatagaaagtatataaaagtagcactgttgggacttaaacatgaaacaaggagcgactacccacctgcttgctcctcctgctacccctaaagctcctctgctccctgaagcccagtttgaaaatcagtgctttaaaagaatttttgacacctgtaaatgataattctttagaactaatttccaaaaatatggttttaaaaaattagaatatatcatttaaaaatattttcacttgttagttttttaaaagtatatcttttctaggaaatacaccacaactcatttaggaaatacaccataacttgttttctagacttttaggaaatatgcaggaactcataaaatccttagcaattttttttaaccaaaaagaaatgaatttgcctttatcacatcagtgcctgggaattagattggctgaactcttgtccctggctttatgactagatgaccttgggcaggtcatttgactgctttatgcctcagtttcccaattattgatttatttagatagtgtagcttgctgtaatttacagagaccatgtaaggatgggttaaggcaatacagtatatatgaagttacctacctgaggagagcagtacacatgataatgtactctctcttttttttttttcttttttgagatggagtctcgctttgtcgcccaagctggagtgcagtggtgctatctyggctcactgcaacctccacctyccgggttcaagtgattctcttgcctcagcctcccaagtagctgggattacaggcaygtgccactatgcccggctaattttttgtatttttggtagagatgggatttcaccgtgtcagccaggatggtcttgatctcctgaccttgtgatccacccactgcagccacccaaagttctgggattacaggtgtgaaccaccatgcccagccaataatgtactatcttaattgtagtatgttgtttgctacttaaaaatgtcctcatataaaggcccccrtaaggttgatagcattcagggttttgaatgagctatatgtacatgtatcagatgaatgtcctaaacaggtatggcagaggcattcagcatatggctgattttaagcccaactctttttttccatttcaggtcccctgaagtcatgggttgctggctcctgctcagagtgacagcaccctgtggagtctgctggtactgacctaaccaccacagagccccactggagcatggagccagcctagagagggtcaggtaggaactgttttttcactttatggcacggttttaccaattggaaaaaagtaatttttataccccaaaagggtgtaaaacattggtgattatttttgaaaaagggcttttcaaaactgagccatattggaaaaaatcagcacttacccgatcctgtgcaagcaggctctaaacaacaccagatttcccacagtgtccataatgacagtcacatggcagcacttctcagatggatgcattggatctatgtgtttgatgtttataagtagttaatwaattagatatattagtctggttctgccagcagtccttaactaccttgaatgacagagtccaaagcaaaacagtgatgagtcttttagaagtttaaacataatacgctccagatgtttcagaacagctttgtaccattatttttcattcaataccatatgtctgaaaaataggcaagtaatgataaacattaaatgacccattcctatgtgctgtctgaatattttacatggattatctcattacatcttcagaagaacattatgtagtagatattgtgattatcctcattttacagatggagaaactgagacttagacaagttaaataacttgcccagggttacaatattrctgagtagaaaaaccacatttgaacccaggaagtgtggctgaagaatttttgtgatttacctgttagactataattgtctattttttctacagtggagataattctggtgtcaaggggctaaagaattttctcaagaccaaacaacacattttttggaaatacacagtaattgaccatgagacatgctgagcttagtactgagtgagcttttgcttaaagtgtatctttaccttaaaaaaaagttacaattctaaacacttcaaataagctgaccaaccatattacatgttacaataaactaccattggaccatatattcaggtttttagtttgtgattatattctctagaaggtatttcccagagaggtagagtagaatatgccagtaactgaggcagtcagcttaaactagtaattacttttttaaatattagctattctaatggttattatgttaatatttgaaaatatttatgtaagataggagttctaggtattgtatttatgaatagtggttaaaaaaacatgtcacttaaaatgttcatatgataggaaaataatccttcccaaaggagttgtgtgttsccaagattacaaatagaatgaaagcagtgaccaggaaggatttcttcataaaattaatcttcaagatgggaggaacagcaaatgcctcagaaatacacaatgtctatggcagastaaaaccaaaaaggaaacccttttagtttaatactttctgtcttaacatagctttaatattttaaatacttcaagagtttgaaaatagttttgtagagatgacagcattctatatctttcattaatagttttttccccgtgacttattctttcttaaattttattaaaaataagatgcattttatctgaacaagatttgtacatttcatggtattttttagaaaaaataaatgtttgaagataagatttcttggagagtttatagttttcttacggctcttaaattgttaaatgagggcataatgaaatgtataacaaatccaaatggatgaaaaatatttttcacagatttttaggagagtttcccaatatttatttcacygtgagtcacatttttcttgtttttttaaagagtttaatttgttttctaaagaccaatttatctgttctttaaaaacaacatagatggtagtgttgaatccaactgtgaaatggataaatgagaaggcatcttaagaaagtaaagcacgaatagattagggaactgattgaaatgctattgttcccactttcttttttgtgtactaaagatttaactgttctgatgaaaaagtgataagtaaggataagtaaaagctgttattcaaataatgatcatgttttgtcaaaatctagtaagagaaaaatacatgaacaaactggtgatactagaagatggaagatttaaagttgattgaaatggtaccactagcaggattcagacttttaaatgtacaaatgcaagcaatcaaatcctataaaatcaatgtgaatccaggatatattggaaaactcagctatccagctaaggrcaatcttaaaatacctactttttgggaaaaatatgccattatgagcagaaactggtgttggccaaaagtattttgttaacatttgctaagaactagagcacaggatattagaaactgggaattattcttattggttggggagagttgcgcttattacctatgtttctsttttactgtagccctactggaacacctattccccagtgtcttgcttaggttactagatccccaggctgattagagagtaaggagaagcttgggcctaaaaatgttgctaattactgtcagaatcaagttaagaattaaaacttactaacttctgatgagtgctctttccattttattatgctgcctgccttaataccagtgtttttcaaacagtagaaaccgcttataaagtaaattcttacatagaaacccagcatattaaaaagataagaacgaagctgttctatttgaagccaaggtagaaagtgtaaagcccagatcattaagtcttctctgcctctcttttcctttccctaccaggtaacgctaaagaaacttgagcctttacatagtatagttttaatatgcacaatatactgtagagtttttaaagtcatgcatgtttctgtaatgataattacctcattgaatatttttcttataaaccattttctttgtataagatcttgatgttagctccttgttcagcccacagtacagcaaacaacatctctcaaagtatagtgagcatttcgtttcatgcttcgaatcctccaaggcaggatgaaaaccatcttaaggagctggagagggagtttgagaagggcaaggagtcttgtgtagtgaactagataccccatttctaatatatctaccttgcaccttgtgcctctggtatacgaatttgataaaaggtgtatgcatggaaatagaagaatagtttctcaactcattctcaaagttactaaatgcttgcctggaataacatatcttaagcacatggccctgcttactcactgcttgggaatcacaccacagtacttacttctattccgcagccttatacatttgtttcttaagcttagagatgatcatgacattgctgtgcagtttkctgctgcttacttttaagttgaaatctcatttttgtttcagattctccttcttctgtggttaacaaacagctcggatccatgtcacttgacgagcaacagggtgcgtgcaacaggagatgcgctatgcccatccatccatagctttattgcaatgcatawactaagctctctcacacctttygtagcatttcattttgattatggtcttatagtcagtattttgtggaccaaattacaataggtggtattgtacataaaaggtctttttggcctatacrgattattttctatgtaagctcatttctcactttggcccttgatgccaactttgaactctctccctataacaaaattataatggatacaaactatatccattttttaaattctaggtatctgtcataaaattgtgtagaactgtgggtgtgaggttaatactacctcgttgcttatgtaggataagttatttaaacacagtgatattctatattactagattgctttagtaatgatacttggttttatgtctcacttatctggtagccaaattcctggtagctttaactaaagactatagttacgaacccagaggtaagctcaaaagctgtcagtcagaagctcccacttccacttgtacttttcaatgtgggaaaggtatagaatcaatctccaagccttgaatagagcctgatgaaatraacgcgttacttatttatcaggctttattactagcgatcaaatatagcacagagaaggattagtagaggaagacattctgacatgaagggacatctgaaaaggctggagataggaagactaaaaactaaaaaggctatttagtgttagcgcaaatgttttactatctcacctcagaatttaatgaagtattttaaatatattgtgacaaagtgtgataagtaatcttagttaagtctttaagaatgatttaacacgatattcactttctctatttaaaaaggcagatagctggacgtggtggcacacgcctgtaatcccagctacttgggaggctggggcgggaggatcacttgaacccagaaatttgagaccagcctggtcaatatagcgagaccccgtctcttaaaaaaaaaaaaattaattagctgggtgtggtggtgcatgcctgtagtcccagctaatagggaggctaaggcaggaggattgctagagcacaggagttcaaggatccagtgagctatgattgyaccactgcactccagcctgggtgacagagtgagacccccatctctttaaaaaaaaaaaaaaaaaagaacagaaaaaaggcaggtgattgcctttatatattttacaaatgttcctttcaaaaacattttttaaaaaattagcactaaagccataagatttggttgactgaaagtttacatattagatgactcatatgtcaatagtaatgcagaaattaaatattgctgtacttacttggtgtgaaatatatgtaatttaaactatattcttagagaaatattcagaaactaattttaaagtgaattagaaaacttcttttgtacttctgatcttaaattattccttatggggccaggcgtggtggcccacacctgtattcccagcacttttggaggccaaggcaggcagatcacctgaggtcagaagtttgagaccaacctggccaacatggtgaaaccctgtctctactaaaaacaaaaattagccggatgtggtggcccgtgcctgtaatcctagctactcaggaggctgagggaggagaatcgcttgaacctgggaggcggaggttacagtgagccragattgcgccattgcactccagcctgggcagcagagtgagactctgtatccaaaaaaaaaaaaaaaaaagattattccttatggacctgaggtgaatttctgatcttaaattactccttatggaccttagatgacctgtattactataaggttttctgttcttgagaaagaaagaatgaatgaatgaattggtaaattaatttgcaaactaaggaattaagcatgtgttattttatatgtttattacagaggtattaacaatgaagaataattaaggcaaaatacaactatagcctactatattagactactgtatataactactctataattaaaggattttttttctaaggatatatggatttaataatatatcactatcagagattttatagccagatttatattctagttaatcacatacaataattttcatagcattacatttaatattatattcaatttaagttgataatttacatatgatatgggatataagaggaagagaaaaattatgattaactcccagattttttacatcagtgcctgggtagggtaaatgataaggccatttactagggttgagtagcttggaaatagaaatcaggtggttctttatctttttggctatgtaaagtatgatatacattttagtcatgtaagtagagttgctatgtaagaggttagtattgagtggctttggcagaagctgcaccgtagtagactatcagaaatgtagctttgtaataagacctctgagcagaaatgttctaatggtggaaaatatatctaattaattaaatcctgagtttttacatacctttttgttcatcagcattataacttttaaagtactaggaacttcacattgcaggctcacattacctaaagataacttctaaaagttaatagagactgcccaccaccatttgtctctcctagattaatggaataatccctttactagtcttctcacatccactcaggctatagtctattctctaccggcagccagagtgaaacttcaagatgtaaatataatcatgtgattcatctgcctaaaacattttaattacttcccatagcctttcaaaagaacccaaatccataccttggcttacaaaacctacatgacttgatttctgtatctctaatctcgtctcaggccactatcccatcattcactaagctcttgccaaatagacttactttcatttcttttacatcccttgtacaggctgtacatctcttgtacatgctgttccctctaccaaaactacttttttgttgagcaatttctactcattttttaaactcactgagatgttactctcaaaaataatataacttcacaatctctagtaagtctcctctttttcttcctttgtgacttgttatttttcctcattgcatttrtcacatttgtaatcatacatttatttaggggattgtttaatatctacctttttgcatattctctaaatattttcatttaataatttcctctatgcctaaaatcatacatcatgtggtaaataatattcgttaaacgagtgagtaaatgaattctttaagcaattatttaagagctgtagggattacttcagcttgggagaaatgtgatcagatttacatattggaaagatcattttggcaacattataaatgattggaaggagtaagattgaaaacaccaagaacacgtaagaggccattgctatagtccacctaagagattatgagggatccaacctaaggcaatagtggtgagaagtgggaatggacagattttaaaaatagttgaaaggttgaattcatgggactttgagactgataagttagaaatgaatgagagtatgataaccaggtgtcttgatagggtgataatgaaccatcagccaagatagagactttaggaggaacagctagctgatttgaggggagaagaaagtatgtgagtttttttttaatgttaagtttgaagtgtctttggatatccacgtggagagatctcatagatggttggatggctatatgatgctggaagtcaccaaagtgatctgaggtagaaataaaggtaaggaatcattagtttatagatagcagttgaaaccatgggagtggatgagattgtctagaaaaagagggtagtgtgagaagagtagagtgcactacaggagcaagtagagaaaaggatctagctaatgagaccaaacaggaatgatgagagaagtacgcagggcagaaagaatgccatatccaaaaccaggagaaaagaagtgcaaggagggacaggttagtaatgccatgtaaatcaatgataccaactcccagaaagtctgataaatcattttttaaatttggcaacgtgattgctttgacattgtagtttgagatatgatgtagtggaagcagaagccagatagtagtggtttgaggagaaaggtttgggggaaaaaggtagagactttgttatgtctcttttcataagcccaattaagaattgaaagagcaaagataatgtcaggtataggtggtggtaggttcaaaactgagcatgtttatagagtaaacagattgtgtgttcaagatgtaagggatagttgatgtccccagatatgctattatttcaaaattttaacctttaccaagattcttgttctcagttttaccatggagaatggaaaaagtagtacatttaataagtttcctatttgaatatatctctgactaatgattatttcagcatattttaaatttgtttttcatacttttaacaaaacacgaatgctttttaaaaattgatagttcagttttatgtttatgtcacaaaatatttcttcaccattttccaggtgcccaaatcattttatatgttgtttaattttccatagcattttcatagatttctttacttggaaggattaccaaggacaaaaatgttactaataaatttttttaaaaattttagtggacttggttactgaagaaatttttttctttgaataactgtatacacagtattaaactggttgagtgcaactggtgtctttgcttatttatcctgaatttttaacaaaatcacaatttgatagaagtatgtttagcctgaatcttcattcattaatgyagctccctggttgtctcaatagttttactttttttaagaaacaaaattgtagggaaataaatgtataacatgcacattgttattaattgtatcctattataaaataattttcagtgttctccaaatttggagttgtgtgtaaacacattgatggcctttctgtgctaattatgcataaagtgaaattctgtttgaataagcacagtaatgtccatcatgcatcttgtttagtttcaacagtatgttttaatgggtagttttagttttcctttttatytctctactataagaggaaaaattctcttctgacatatatttattttaccttgtttatattattaaaacttaacaaatttttcctcttaaaaatatgtaggccagcaatttcccccttattttattttaaaaaataacaacagcaaaaagaatatgtaattgttgttttgagaacagttaacttttgagaggatataagaaagtaattttgtctgagttttaggttttggccatgattgaaacaagttgctttctattccttacagtgattccattaagtggaagttgacagtgccatcgagtttgaaacttacgtctgtaggcagttgtgcatctgcaggcactaattttctgttatagatttaaagaaatataaacactaatttgtaggtatgaaaaatatcaatgttaattttccactatgtatcattttatataagctgactgtctttgatgtttgtgaaacattcatctataggagactagtggataatcaaaaaccagtgaaacagatttttactaattctactaaggtagattgggaaatggaaaagttggacctgccatgcattaaatatgtattaccttaagattatatactatcaccaaattgaaatttcattttagtactattatctaatattattttaaacatattgacaattctaatttttattaaataaatatctagtgattgaagcttgctgtattaataagaatataagttcagtattccccacactggaatacatccataaatagtatattttaaattctagtgaaataataagttagtgaaataaaatttcattctaaattctttgtatttcttagaactagttatcacttagttacttggaatgaggtaactaatttcttcctatccccaactactaggtcttgattgttccaattaatgatatatttgatcttttggaagttaaaccctatttaatttttttgttgcatatgctcgtgtgttctactcttctgctgatcaaacctatacctccagtttgtttaacttagaattgtcttatcataaaaataactgacatttattgagttttttgtgactagcactgtgttaagaatttaacatgcatcatctaatttgtgctaacaatgaggtgaattatcttaattttactaatgaagaaactgagactccaagaaatatgtaaagatgagtgaaataagtggtggagccatatttgtatgtctgtacttcattaattcaactgatacgtaaatgcctacctaccttgtggcaagtactgggataggtactagggtgcatgaataaataacactactgtcttctgtactgggagcattgagttgatttataataataacagcaacaacaacataagacacttaataccacattttctttgtaccaaacattgcttggagcaattttttatatgttaatttacttaatccttaccacaaccatatgtagttggtgctattattacccccatttttcagatgaggaaactgaggcaaagggtggttaagaatcatgtctaaggccgggcgtggtggctcacgccygtaatcccagtactttgggaggctgaggygggcgaatcacgaggtcaggagatcgaggccatcctggctaacacagtgaaaccccgtctctatgaaaaacacaaaaaattagccagctgtggtggcgggcacctgtagttccagctacttgggaggctgaggtgggagaatggcgtgaacccaggaagcggagcttgcagtgagccgagattgcaccactgcgctccagcctgggtgacagagcaagaytcyrtctcaaaaaaaaaaaaaagaaaagaaacatgtctaaggttgcacacagctagtaagcgttagaaacgtgtctcaaacccaagaggtctggctctggcatccgtgatcataaccacttgctttgcctgatctaacagtaaagatggatgaaaaaataaatcaagtgtgatgagtgttatataagaaaggggaaatagcagggttcagtgtggaacataggagagtgggccttcattccctccagttgagggccaaataaggcatccctgaggaagagacattaagctgagatctgaaaggtgagcctgaataagttaggtgaaggagcatgagtaaagggaagcatgaatagcatattgcagagcctctgagatgccrcatacaggatgactaggagaacctcagtatgcaggacaaagtgactttttggacatttttaggtttcgcatttttattttaagaacagagggaagctaatgaagtgtttaaattagggagtatggctatggcctgatactctgaatggagtatggagaattgattagagactgaatcacttacgaagttctcctggtaatagagattttgatctggtgataaaagtaaggtaggagagatgtgaagagattcaagaaatatttaagatgtagaataaacaggacttggtggtagattgaatgacacagggattgaggaggaatccagagtataagttgcagtaacaacttcagaattttcttatgtagatagtttagtaataaatagcagtctgcagaggccaggacttgtgtcttaaatcttttgtaaaacaaatacactgtttttacttaggttatacatttatttatagtgctttgtgggaggtactgttggagattaacaggtgactttttcagccactgcaagagtagctcatgttttgattgagcacaactaagtgaatggctattttcttaaataggtagccctggaaaagggatgaagcatgggcggggacgtgtaggggtaggtgatcatgaactcggttttgaatatattgagtttgagttatctgtatgagatacccaagttgaaaatcggttgggtagttgattgtgtggatatagagctcagaaaagatatcagagctcaagaaagaaatttgggagatttttgcatacagatgttaactgaagccatgaagttagatggaattttaactaggatgaaagtagaaagaagaggacagagtaagagagctaaaacatctcaagaaaaatcagaaaaattctaaaattaaaagattttgccagcgaagagctggtaaaggagattgagaagaagcaactagagaggtggatggcgacatagaacagcgtggtgtcttgtgatcaagagaaattttcaaatacgagagtgttgtctgctggaaggtcaagtaaattggctccaaaaaaattatcccctaagttaggcaatgtgggagtgattgagcccattagtagaacactttcactagagtgatagagacataggccagattttagagcaggagacgaaaaaatggaaatgagaagaaaagcaattcaaaacaataagctaggaggacagtaactggaaggagaagttgttaaagggagtgttctcctaaactgtctacctcatttgttttcacttggaagtcacattttaacttgttaatttatctacaaaatgagagtgttatttatgataggcagacttgattttttttttttccagtaaaggagaatatacctgaggaaacagtcatgaaaagaaatactggaaaaggattttggcaggactcatgtgccacatggcgtgggcgtatttacttattttcattctatactgtcctccctctagactgaaagtgagataggaataggagacgtttatgaatagaggtatataaaactactggttctgaagtaggagaaaaggaagcaaaggtcaaatggctaccacatttcaacccataaattctaaatactggtaggaatgtggaaccaagcacagtttcaatctaaatgtatcgaaatcacatatttaagttcaattcacacttctatgttatgtcatgaaaaaagttcttgggttaaaattattataattgacatagagttgagttgtgattgccagaagaaaatttgactgaatgttaaaaagattagagagaatggacttcctaataaatatctgtactaaaattgcactttgtttcgttttggcttgcatagtatcacttctgttttataaagccagatttgcactagtgtaagcactcaatttttagaatgaaatgtgttgcctcacagttatctgtagggtagatagatcttctctgttagcagtctactcctagaagcagcatctccactttgaatccagatatgcttccttatacaaatagttggaaggagaattggagatcctctaatctggaatctacaaaaaagttgtggattccctgacctatgaacatggaaaattttgcattggtttaaaaactgtggttgagaaatttgccttttctatasaagtctagtaagttggagtgcagaatgtggggagatagttaaactttattattttttcagaatatttcaccatatgttttatttcgaccttactttggtttttaaaaaatatttggtataatgaagtgggaattagaatatcattatataatcatacacacatcgttatacaatagaaaactcattaggtaaacagtgttttattttcacatgttccacagcttatctaactactatagttaattaatgtatgattataaagttataatagggacccaacagcagagaaaaatgttgggcatggtggttctaaagaaattattgttgctataccctagttaattatcttcattttgaatatttggtttagatttacatatgagatagattctccaggggtatcccagcttaaagtctgaacgtccttattagtatttggatatttagatctataccaacattttgaacagtatttaaatatataaaatactcagcatttttttttttactatggttatcacatgtgtttttgtatgtctttgagcatcttttagaacctcrtgattataatttcgtagtggaaatgtacagattaaatcatttcacagcgtgtgcattacaaaaaatagttactttgtgattcttatgcaaaagacttgaaagatacctaattaaatacataacagttcaaggaaactgctttcaaattatatttcagcttattctgaattttttttctgagccaatgcactatcctgagaggtctctagtagcatttctgaaaaggatcttttttttttttttttttttttgagacggagtctcgctctgtcgcccaggccggactgcggactgcagtggcgcratctcggctcactgcaagctccgcctcccgggttcacgccattctcctgcctcagcctcccgagtagctgggactacaggcgcccgccaccgcgcccrgstaattttttgtatttttttagtagagacggggtttcaccttgttagccaggatggtctcgatcttctgacctcatgatccacccgcctcrgcctcccaragtgctrggattacaggygtgagccacygcgcccggcctgaaaaggatcttttaagttggtttcctgaatctcaagttacggacctttcacttctaatcccccaaaatgaagtcctttacagtcttttatcttgatgtttatgtggtcattgctgtgcttctgaagcatgtttcaaataaatggtaatttgcctccatagagaccactctaagctgctgatgtcatcagttgttcttaataaccataattactgagcaatatagaatcgctatctaaaaacttagcagtgttgaacaagttaaaagggattttttccccactatattgtgtgtgtgctgagcacactacaaataaatattctcctgtaatgtttttagaggaagaaatagttcagtctcttaagtgccctaaaagaagatacaacatagttttcctatactatgatgccaaagtgataattttggctaccagaactcttaaccagttattaatgttgttgatatgaattatttatttctgaggagtaacaacatcaacaattgatatttcttaattaaaatagttacttatctaagtaatcttatttttgtctttgtagtcagattatttctaagattgtatattaagtaggaacttcatataaaaagaaacctcagcgggcacagtggcccatacctgtaatcccaacactttggagtgctgaggaagcaggatcacttgaggccaggagttcaagaccagcctggacaacatagtgagactccatctctagaaaaaataaagaagttgggcatggtgacacacacctgcaatcctagctacttgggaggctgaggcaggagattcacttgagcccagaagtttgagaccacagtgagctatgaaggtgccaccacgctaccgtgggtgatagagcaagaccctgtctatggaaaggatggagtgggggaggaaaagtccgtaactagagaaaaaattaagcttattgttttcagttcatcatctgtaaaatggagatgacaatactgattacaaagatttttttaaaggaatgtatatatcttggcacacatttataattgatgtatattcatagtaatgctcaataaattatagttattaatatgatagctttctacataaagctatttgtgtgtttacktgaagttctaaaccttaagggttttaaataaaaatctaccttttaagtaacatatctgtgcattatgtaaataagactttgaaaaatacaatttttagaatgtgtttgctgatccaacctctgacagagaagttgggaacatttaaatagttacaattttttttcaaataaagtaaaaatatttaatttttaaaatcattaaagtaggtttttcttaagacatttgtagtttagaatatgcattttatcacaaagagtgaatgcattcattagtagtccaggaatcctaattcctgagaaaatgtaacctgataggttgtatatgaccaagcaaactagaattaaagaagacagtgaaatggaaaaaggctaggagatgaatttaaaccttggaatatatactgtcactaatactgcagttgggccaagtgcggtggctcacacctgtactcccagcactttgagaggccaaggcagacggattgcttgagcccaggagttaaagaccagcctgggcaacatggcaaaaccctgtttctacaaaagttactacaaattagccaggtgtgatggcatgtgcctatagtcccagctactcaggaggctgaggtgggagaatcaccttagcctgggaaattgaggatgcagcgagccatgatttcgccactgcactccaacctggacgacggagtgagactctgtctcaaaacaaaaacaaaaacaaaacaacctggagttgaagaaaccaggttcttcattgtgttgtctttctgccagagacactgtttacttaagtgtaggctacgaggaaataactacactcagggacctgaagtttttgtgactaacagaagagttcatgttatttttatagtaataggctagttttacacaaggctgatgaattcattaacaacttaaatgaacaaattctatcaactataatcaatcattttatgattaaatgaatattaccaatatttgacatgttttgtaatatgtagattatattcctgagagattaaataagaactctgtaggccgggcatggtggctcatgcctgtaayyccagcactttgggaggccgaagtgggtgaatcacttgaggtcaggagttcaaraccagcctggcyaacatggtgaaaccccatctctcctaaaatacaaaaattagccaagtgtggtggtgggtgcctataaccccagctactctggaggctgaggcaggagaattgctggaacccgggaggcggagcttgcagtgggccgagatcgcgccattgcactccagtctggggaacaaaaagagcctccatctcaaaaaaaataaaaacaaaacaaaacaaaaaaactttgtagtagatactgtaggaagaaagttttaattatcattaaccatcttagaaagcttcttgcctttggtggggaacctgtataaatgttttctgctctgttctgatctcttaatagtttgtgtaatatattcctatagtcatagcatgtagatatctataactgtctcttaaattttcctgaaaaggaaagttttcatatatcatttaaattccacaaggcttctcataacttaagaagtcttaactataaccaaggtggatctgagaaattcagtcttacacttctctcacatctgcttttgttttctctactgtctttaccttaaaagaaaaataaacagcaaaacatttataaaatattaagagagaaaatgaaaaaactagcccgaactcagtctctcagtttccttaatcatccaatcatccaatctttagctgtctgtttcatctattscagaagcctaaagacagcagtgatgaaacaaaaatctcagtaacataactaaagaataagaggaaactgtggacaaatgactagcaaacagcaagtttttgaaagagggtcaaggatagggcagatgtttccttaatacatttctgtaagctaaaggtctattaattcagttatttatcagaatgccatttggtaaaatacctcctctaaaacactgaatgtaatactaaatctttgacagttggaatgggttattagtttatttccaggagttgtttaaaagacataatcataacaaaaatagtacagaaacaaagtgactttaccatttgggatgtcaggtttataattcacattattttcaaatagcaattctgtaggacaggatttttcatgagttggaagttaagacagaggaattgatactaagttttgttatcagcttgactcttgtggaatacttttctactgcatttctgtatttgaagtcttgttaattgtcctctcacagaataaaggctagaagagaggttctatgagattctcccccccytttttttttttttttttgagatgaggtctcacccagactcgactcgaactcctgggcttaagggttcctcccaccactgagccccgctgagattctcttaatgtgtgctccaacatcttcaagaggaatgaaaaaagatataagtccttcattgcaatagaaagtagatccaataataaaaaaaaatcctaagtatatttgcttttatgaaattgtgattgtctttgttatttttcaagagaagtttatttttagtattaaatcagtccttgaactggtatcaaggaaaaagatatctcacagaagagttttctttctgcaagcaactggcagaaatgtgacatgtttgattatgtatccatttgtattccctatgtattttaatgtttcccaaactgttgttcatcataaaatgaaaaatatgtaaagctctgtttaattatgtctttgcatatccatgtactctttttttttggcaggtggggaaggtagctttaaatactctattaatttgtgtaggctttcttgattttgtcatttaaaaaagatttcatacattgagatagatgtgtattatagacatcatctataggctcttaaaatgaaattgctgtttccacaattaaacaaattccttgcaagattagtcaggaagagaaacggaaatataccaaaatataacaaagtatattttagaaaatatcaaagcactataaataccaccctcttctccatcaggtgcagactgtgattcctccctaaattatagatctgtgagtttgaaagaacagaaggaatttgataacatttcattgcagcaaagtttttgccaaaccgcttttcacagagcccttgtatcttacatctcagtgtttctgaaagagccaaaattagttcttattgatgctcaagcaactgaggaattatgagcattccattaaataagggtaccagtttgtaactatgtcattgcatgttaatactttttgattcccctaatgactaaatatggttctcaatgtgtgtgatttccatctgaatcaaagggagtcatgtacacaaagctagaacttgatgtagtgctactttgaaatataaaagagtatttccacaacacatgccttcaaactttaaatgaaacccataacagatgtgaaaaaagaattatgacaaggacaacctaatataagttttataaattttaggaaatgtcatctttttactggtttcagagactttttcaaatgttttaaacacaattttcagataacaataatgaaaagctgagccccaaaccagggacaggtgaaccagttttaagtttgcactacagcacagaaggaacaactacaagcacaataaaactgaactttacagatgaatggtaagttaatatttttgtaaagatgttcttagccattttgtaggattgtattagattttaatttttaacacttcgtcatctttatgttttgttttgctataaggtattggttttcaaacttgagtgtgcttcagaatcactgggagagcttgttaagatgcatattactggaccccactctcagaattaggtttggagtgggggtctgagaatttgcatttttaaaaactttccagatgatgccggtgctgctcatcctagaatatttcttctgatagaaaatgcaaaagataatactaataataataattaaaattagtgcaaaaatataaacattttgggactttttgcagtcgtggtcctaggtaggtgtatatgtatgatttttgttttgagttttagaatataattttagtgatactaaatatactgtattctcccctgcatttgtttgactttataataaatattcccatgttactacttagttttaataaatattattttactagctgtgtaatagtccatcaagtagatgttctatagtttacttagccattttcatttaattgggcagtaaatttgtttaccattttttaccaaataaggctttaatgaatatctttgcttataaagccttttcctgccttcaagattatttgagagatatttctgaaatgaactatatctagattaaaagatattgccaaattatttccaaaagaatctttacttactatagtcctactagacacatgtagaagtatacgatttactgtctccaggctagtgttcaatatatttatttatttttaacttctatatttgatttaaaaatacttttagtatttaattgattattagtaaggttgaactttttctttatttaatggtcatatagcttctctttaataatgtttctgatcatatttattgctcattaatctaatgaaactttacatttgagaaaagcaagttatgtaagctttttatactctttcccactatctcatgaccatttgaatgagagagcatacaaaatttttaaacttaggaatagtaatctattagttaatatattgatatagtatttcttaatatataatatagttgtataatatttgttaatatataattataccaattgtttaatgacaatatattaattattcataattaatatattaatatattaatatattaaatatttaattgtatattaatatatgatcatgttatctgttactataatatatgtaatataatatagttatgtattgtcttaatatgtaatgaattatatgttgatatgtgatattacttttatttaaattcactggtttccatttgtgtttatgtatgtgtgtattttatattaaaatatttgattaagtaggatcttaaaatactattggatatcttctatgttccggggactattctagacattggaaatacatcagtgaaataaagtacttaaaacccctgccttattggaacttacattctagatggaggaagtttattataaacataattaataagtgtaccatatagtatgttagaaggacaatggaggaaaatagagcaggtaaaagtgattgggaaacctaggcatcattgagaaggtgacatttgggcaaaatgtcacttgaagagtgagaaggagtgagccacgtatttatatctaggggaagagcatttggggcagagagaaaaccagtacaaagactctgaagcagaagcatcagacctagtatgttcaaggatcttaagaagaccagtgtagcgggagtggagtgaccagtggagagaagagtagtagataaggtcagccaggaaattgaggaggatatttaaaaggaaaaggttatttctggttattgtgttgagcatatgccatcagtagaaaccagaagaacagttaaaaagctatggcagtaagaaaggtgagaggtggtggtggcttagacaaggatgggagcagtggaggtggtttaaaaaaaaaaaaagtgatgggattctagatatatatttgaaggtgcagccagtaggactttataagtcttagtgcctgaccatttaaaaattgtgatgtttgtggccctttttcttaatacataatttaagatgacagtaggtcatcgtacttatcacgtcttttccattytcatgtttctgtacacaaggagctggcatcttctgaagaatcttatctaaactttttgggctttttttttttttagagaaaatcattagtcccattcttcttttgaatgctacttttccttctctaaaaactgaccatgaattatattctcattcatcaatttcttatttctttgtcagaaaagcagttagcattttttattattatgcaagtattcaacattcattgtaaaaaaaaaaaaaaaaccaaacaggcagaacttaaaaaaaaaaagtatacagactttttcatctatatcaggattgtctcttgcttttattttagtttctttggcaacagatgaggcaatagaacatgctaagagcttggactgaaattgacaagtttttgaatctctctaaatctcagttttctcccttgaaaacgggcatgtttaatagaacctacttcataggtttagtatgaagatttaatgagatcatgcagagaaagtacgtagcacttactagcacattgattggcacctgagaaggccctcattgattgttagctacagttctcatcttttgtaaattgtctttcagatactttgcccagttttctatggtgtttatctttttcttattgcgttattagagctatttatttattatagaattaaatgaggattataccatttgtctttcatttgttgcaaatatttttcccaatttggtgtttgtttttcagtttacttacagtggttttgccttatggtttctgcctgtgatagcatgcataggaaagccttgttattcctagaattaagggaaaaggttcttatattcctctcatattttctataatttagtatcaaaaactgtatattccttctagaatttattttcccataaagtataacgtgaagccatagctttggttttaccacatggctgttttcttgtctcattaccatttattgaataatctttttatttctgtgtgatttaaaatgccatattaacgtatgttaaatatatttactcggttgctgtgtcttttccactaatatgtctctattcctactcagtaccataatattttaattactataatgtatacactaagcgttttattcatgcctgaatcatagctttctcaatggaaaaaataaatatatatataccaccttagcttttttttgccaaaatagctatatattcctttctggtttaaaagaaatacatgtttgtcgmacacacrcacacacacacacacacacacacacacacaaattcagtataaaaaatttacctgcagtaattctactgacatgacactcaacactgatgcatagccttcctgacatttttctctgcatatatacacccatatgaatatacagttttagttaaataatattatatatgtactctcttttttttaaaaagtcaatttgacttctgcagtcagcctaaaagagtttttgtcatggcaaaaagtccatgatcgtttgtattgtttattgagttactggtatttgtctataattaatgtttttttaagttactgtaaatcttactttttttcttgttcacatttattttaaacttaaagaattgttgcatttctatgaacttaatttaaatctcagtcagattgttatacatgtcctctttctcattcagtcctcttgttacacatatgccatgatttgtcacagaatacttattgaaaattatttctttaaaaattggcctcgtattccgctatagctagaaatgctaatagaactatagtcatcatcaggtgagtattaaaactgaagcagaaaatattaccctgtccttctacagaactatgatgctcagtcacctgccatgtttgaacagcagatcagaactggaagtgatccacagggagcagttcaaaagaccaaagaactggccaggcttttgttcaaatactaattttaaagtagcctggaataacagagtctagaagggcatatgataaaaatctgtataaccattaaggttttggatatggtgaaccatctgtagtgaagacaagaaaggagacaatgtagttcacttaaaattcaatagagagacaygtagaaatacatactagataatgaaaggatccaaacagtgaagaagcagtccctttatatttttgaattttttttcaagagtaaagtrtgttatgatagtcatcttgatttgtttgaaatgatgtttacaaatgctattaaaattataaatcctacattttacttgtgaattttttggtctacctytctagttgtaaaatataaaaatcctaaaagatcatattgattaacttcttggtggaatcacttatcttgttttgatgataggagcagtatagcatcaagttctagaggaattgggagccattgcaaatctgagggtcaggaggaatctttcgtcccacagagctcagtgcaaccaccagaaggagacagtgaaacaagtaaggtgttattttgcttttgttgttayaaaattgcagcattggatgtttatctactttcctgttcccttcgatgctgtattttgtttcttgtttttaataaattacttttgcttctatagtccagctgttaaactgatagatagcaaatccaaaagatggggaccttaagcagttaaaatgaggagacacagtgaagcacaatcctctttgtggacacagtggccaggatagttgttcatcatactataaatggatgagatataaatgttagtttgaattagtytttatcatttttatacctagcaatgaaatccactgtatttgttttggttgtatatgtggtttatagagggggaaaaaggaatagaatctaaacaagttacgagtgaatctatttaatacctgaagtgccacttaagggatttttcagaacccttttctaatagaatatttttatatgacaattacatgaaatttaatgtctagcacagagactagaacacagtagatgttcaataaatgcttgattaatgaaggaataaatgaattatatttcttataaatgtgtaggtaccttagtataacagagtttaaaattaagtatgtgtaagacagctatctggtaagcaaatgtccagtaaggaacattaaagactgatccttcatgcatctgacagttaaattccagaattaagtattttcagtggccaaaacagaatttatagtatggtcagcttaactacttgttcatgatagtttagattttaccaaatacatgatagaggggcagaaaaatgctcagttttaagtttagatttcgggaaggttagtaaaatgcaggatcaggtaatttcagctgtaagggatagtctaaagcagagattctgcacatagagttcatgaagctcaattcctgggcttcaggaagaagcagtgggcccatccgtccatgatagtgtttgtacaattttgtgtgcaaatacatatttgccttgtactgaggggaggttttagctgaatgtcaaaggttcctatgactcagaaagggttaagaaccatttatccataggaaagctggagtattaagttgatgtttacttttctaaaaaaatctggatttaatgatacatttggccctacatgcccatggattccatggaaatactccctcccaaaataacaatatgacaataaaaaggaacatagatttaaaaacaataacagcgtagcaaccgcttacatagcatttacattgcattaggtattataagtaatatagagataatttacagtataaggaagggtatgcataggttatatgcaaatattrtgscattatatatgagggacttgaggagctgcagattttggtattttcagcgattttagaactaatcsctcatggataccaagggatgactgtaatttggtttacttacagaagctcctgaagaatcatcagaggatgygacaaaatatcaggaaggagtatctgcagaaaacccagttgagaaccatatcaatataagtgagttgctccctttagataattgctttgtatgggaaaataaaaagccttaatctatgttaatctctctatagttagaggccatgttcaagtgtattgtggaagtttcctccccttatagaggaattagacatcatattagaatgtgtttgtgagctcctaagttaggttaaataattagtattgcccacattaccacctgttacatacaactttattttctgacagyacaatcagataagttcacagccaagccattggattccaactcaggagaaagaaatgacctcaatcwtgatcgctcttgtggggttccagaagaatctgcttcatctgaaaaagccaaggaaccagaaacttcagatcagactagcactgagagtgctaccaatgaaaataacaccaatcctgagcctcagttccaaacagaagccactgggccttcagctcatgaagaaacatccaccagggactctgctcttcaggacacagatgacagtgatgatgacccagtcctgatcccaggtgcaaggtatcgagcaggacctggtgataggttggtaaatttttaattaacatgaactgtaaaaaatgtatttcacaaggatttgtttgaagtcatkkaagggaatctctccatttttgacagttgcttcctctaagagtgtctcattcatataaacttaaagaaactttacagtttactgtaaatgattttacgtattatattctttgagcactgtgcattaatagggaaataaaaagtcttcattctccatatctctagcactgaggcttgcttctgaatttacagatcaagagaaaagaatgttaagaatgacccacaggttatttatgaagtcaaggttatacttagctctcagattatcttgtagatatccaggcctttatcagtgttgttttggttttaatgttaattttttctgcttttctattgaccctggattaaggtagtgtgttagtagttctgtttttgggaacactgtttttctttgatttctactaaacttagtgactgaatttagaaaatgaaaaattataccaaataaataccatagcagcaataaaaaattgaattgccaacatgtttttatagtttttctatattttatgtgatcacaaggatatattttcttttgtgggagttaaaataaatttttaaagtatactgcatttcatactcatggaaaactatttctattattagtgctatcatatcttattgtaagttctgtcctctttcagagaacctagttttaatcttaaaatcctagtttacaaaggagtgagattctatttgaaatatttcacattttatatgctcaatatattgctgtttataagataccctaaagtatctgtcaactgaaaaatataatgaaagattaatttaccactcatagtcaagagcatgatgatgggtttgaatactggtttcaccacttaccagcagtgttttttcattcaaattacttaatgactcttaaagattcagtttcttatctataaaatagggttatgattatctaaaattattgtaagaattttaaaaaaatctatcagtcaatcatgatgtgacctggctcatgttaatagcactaattaaatgatagctgtattaaacaatcaagatagtctatgaggccactttaatttttaaaagaattacagtaagaatgactctagggataaagactgaaagaagacaggcaaaaatcctgaagaggatagcttgcagctcaggggaactgccttttcttaactatgaaagggtatgtttctttctttagtcatatttgggaaatgtttactttgccatggcactttttttgtagatatgaagcaagaatttcccatgtttatacttagagattaatcaaacatcttctctttacctgtacacagtaatcttgagcattcttagtatatattttaggcaagtaagacttagttctatttctttccatacccagagggagttccttagaatgtcattaccacttaatttatgcagatgaggttagcaagcttagcacaatttgaaaatcaaactgataatttccaaaatcaaactgataatttccaaaacccagggttgagagctagattctataattaagcttgtacatttatggccttccatttatataaatgagctaatgtcttatttttctacatttaagtagtagaacatgatacggaggtcataattgaaaattaaatttaagtgcccagtttctagtaatgtttttaatggatattagacactttgagaaagtcataactatttagcagcttctatgcaggctaattataacasttaataccaagcctgctttatagctgaggaaacttaggtgctaagcaaagggttttgtatattctagagctaaggagttttgttttttgaaacacagtactataacattaatgagaaaggaggatttgagggagggtgggtcctagagaatacagaaactgtaatctttctatagatctttatcatcttcataatacttagatgatttatatgttttagggattcttttagcatttagatctgtcacaaagttggttcccaatagcctcattsacccaaggaaacccagatgctgaactagactagcagaatcttttagaagagagataatcagtgacaacaaacagcctggaactgatcccacttcatgcatatactcttgaattcatactttcatggttaaatccagatttgaaaccactctgggatcacatttagttccctgctttttaaaaattaaatattatttaatattctgtacactcatttgagtatttagcctatgttggtcctacatggtattttgttttgtaagatatagtagtaaacttcctgaagagtaacagaagaacgataaaattcttatccttcaagaaacttaattatttatgaataagagagaataccgaagccatttataggaacatagaaaacatttaatatatgaaagtaaatacaattatatatatatgtgtgtgtgtgtatatatatataaaagatgtgtatactgaggtaattagaaagtgattagagtaacaattacattaattttcctttgagatttgcattattttctagctctttaccaaaaatttgtaaatggtgtaaatatttcctctgacttttatctaaatcggttattataattcttaacttttttggcaccatcctgatttaatcttgaacaactgtaaaaaagtatacttttaatatttctgcacctttctaagggctcttcatcattgacactcctgccagtttatcttacttctcaatttagctgacttttattctaaagagagaaagtttaagagattttgcttcttaagaacatgaaaagaatcacttaccagcttgtaattagtcctatgattttggagagtttctgtttcccaagagactaagggttgtgaagctctgttgtaacaatcataccatttggttcctagagtccaaggatacattgcacacatggatgaaatgcccacctaaaaggatgtatgtcttaaagttccctccatgctgccatttgcaaagcccagtcaatattagtttagctggggtagagaagtggtcctaaaattaaatattatacaagtgtatacttaatttgatctgtactttatatgaagaactatatagtggacctcatcagtttttgttccaaatttaatttttaaaaggaaactttaaaaggctttatagctaagtcatttctgacaaatttactgaaaatatcagaacagttccttgcaatacagagtaatgatttttaaaaaaatatttacattcttataatttggttaaataaatgacccaggttttcacttttgggctgagatcaagcatgagaaggaaatgtcttagaaaatgaagaccttaacaactaacatagatatttttaaatggaatgctcttctcattaactacagcaagtctatgtaaatgtaactgggagtctatagcagagcagcagacttactcctaaagagccatatagtaaatattttggctttgttggccaggagacaaaatggagaccattatggtaggtacttatatgaccatttaaaatattaacatttaaaaatgtaaaaactattcttagcctaaggttcatttcaaaaatcggcatttggcggagatctagcccaagagccatagcttgcaaatacctgctctatagtaatcagtgttatagagagaaatcaaactatagtctgtggtaaaatgcctctactggcaaaaatccagactttgaaacaatgaaataatatgaatctccacatatttgggttccctttaactttgcgtaaggcaagaacatggaacagtaaatgggaaataaattgaaaaaagacagaaagaaatgtttgttctctaatcatggtgtttaaaaaaataaaattagtcctaatgtcaaaaataagtctgacttaggaaaaaagcaaaacaaagcaaaaaaatagtatgtgtatcttttagtgattttatatactgtatttatttcattttgttttatttttttgagacagggtcttgccctgttgcccaggctggagtgcagtggtatgatcatagctcactgcaacctcatactcctgggctcaagcgatcttcctccctcagtctcccaagtagctgggattacaggtgcatgttgctgcactctgctaatttgttgttgttgttgttgttggtttttttttttttttttttttagaagagacagtctcactatgttgaccaggctggtcttgaactcctggcctcaagcctcagcctcccaaagtgctgggggactataggcgtgagccmccgcgcctggccatatactgggttaagaaacgtaaatatatgcccttggaatgaaaagagtgtggttgagatctctgtttagataatctgcatataattttttttttttttttttttttttttggagacggagtctcgctccctcacccaggctggagtgcagtggggcaatcttggctcactgcaagctctgcctcccaggttcaygccattytcctgcctcagcctcccaagtagctgggactacaggmkccysccaccaygcccagctaattttttgtatttttagtagatacggggtttcaccgtgttagccaggatgatctcgatctcctgacctcgtgatccrcyygcctcrgcctcccaaagtgctgggattaccggcatgagccaccgcacccaggctgtataatttttttttttttttacaatgccaaatctgttgtaagtgatttgacggcctgattggtagctcttactgtttctaaactcaararaaaacctaaattactctctgaaaaaaaaaaaacaagcatctaagaaagcttcctgaataagtcctcacatagtcttgaatagtttttaattatagcctcagttaggatgatctaacaattttttccctaaagagtgatttatcctatattgccctttaataacttttaaagtgttattttcatagaaatttggttccatatacctactctggaccatggagcatagccctcacttttaaagccaaaattccttgtactgtaaatttggcagcatttattcagtcatcattgtaaccatgatttccttatttctcattattgcagtttactctttattaaagaaaattgcagagagaaaagatgtactcaaagagaaagaactggactcctagggagttaaaagccctgttattctttgctcatttgttatatagtcttgtggttaggccaagtgaattagcttagggcttaattatttattttccaaagagctcctcagctttgaggagcatgtacgtgttccagaggatggtattcattataagccagtgcagtttcccatactgtgacaggattgggttctgatttatttaaaagataaaagggattaagtgcaatgtcttccttctattctagcttcaatgagtgtttctgtttccttaatttcttcatatacatttagttgactgacatattccttgcttaatgcccgaagtcacaaagggaaacaaaagtttttttttaaattgagatgattgatgataaaaagggtgtccttaatgctttaaatatttggttctttgaagtctttgtaagtgatttcagttattgtgttcccttcactagatttaatatcagaggaacaacaataggtgatagaataatgaggtaattcagtatgttccttcataattttttttttatgatggatttgccaggtcttcttttgccacagctaaccacctttcctattaacagttaatactccctttggacttactgaattctaagtgctaagcattgtaaagcaggtcgctttccacaaactatatttagctgcatgcactgcatggggatagaatgaaaagaaatttcctgtgtgcagactgatgttcacttcaaatatgtcatatggcaaagtaactataatctgaaatgatgtactttaagtatcagttactctttttggatattttgttgaagaatgcaatttatgttttttaaatttgattgggataacaattaccaactttttgttattcgtatatgctccttttccttgagctcaataactaaaaatgtacttgaatctaaatctgtgtataggtttctgatttttgcaagaaagttgtttccttataaatagtttagaaatagtgtcacatatcaagatgatatataagcctcaagcacttctctatttgggacatatttttgagtagatctttaaagtgaacctcaatgacatcagtcacctactgaaaacctgttttgctgacaaaatcaaccttgtacttaactctagaggcatatatctgttatttaccatcagtttctaaaacagttgaacatgaaacatatagcaacaatcagaaatgtaaagtttgtagagttcctaatgaaaaatacagaagtcatgaaataagccaaaaaatataatagatgtatggaaatttctggttatggttcattgtcaggaggattctcatctacaagtctcaaatttgtttttgcttctcaaacttgttttgttttgtgctgttgtttctagcctgttttaacattaaggtatatttgaaataactttttcaaattattactagttatcactttctttttttttttttttccccaagatgtagccttgctctgttgcccaggctgtagtgcagtggcgcagtcccagcccactacaacctctgcctccagagttaaagtgattttcccgcctcagcctcctgagtatctgggattacaggcgcccacccaccaggcccagttaatttttgtgtttttagtagagacagggttggtcaccatgttggccaggctggtctcaaactactgacatcaagtgatctgcccatgttggcctcccagagtgctgggattacaggcttgagccaccgcatctggcctagttatcactttctgattaattgtatgacaataaaatggaatttgcttcagagttttttgatatcctgatttatactttttatcacaagtacgcaaagctggtttctggttttataatgaaaattgcaactataaagtaccatgatgctttaattgagttttagaaaagctgaaacactaaagtagagattatcatgaactgataaacaatggtaaagcagaaaatgtaacagttacctccctgtagagtgaatgaggtgagactcattcttctctacttcattttatttcttatgtagagattatctggtggaaacttctaattataaggcagtattttcctgccagtgaacacacatttgttctgcttctccttttagctattagagatgttcaaagaatgtaaacttctgcttaagatagacaaaattagaaaaataaaattatcacagatgtttrtatctactgcccgttatgactagtcttcattagggactgtcttacaatggggaatgtgttctactataatctgctaagattctgaatgataggtaccatatttctttgaatagtaaataaaatggtagtcatcccctattcttcattctacttttattacctcatcacctcttacctggtgtactgagggagttctccaactccttctactcctgctttcagtagttctccattgtttatgatataaagaagaaacaaacccagcttccttgcctggtatatagggcacttcatattatagctgctgccaaaaattggtcatgctgtctayattgccatacttggagtgtcactgaatacattcagaggactattggagttctctgaatacattatgctgccttaagtcagcgtatctttacatactctgagccctctaacagaaaagacctcctatcactatcaccatcatttgggtcacctcatctttcaacatcatcttaagctacatttcctggcccatatattccctaatcaaaaatatgggcccttatatatacctactgtactacctatcacagtgcattgtatatttgtatgttttcatatataagaatgtaagcacctttaaggacagtgtaatacatacatgcatacagaaataaaagttggcaaagacacctttttgtcaaaaactctagctaactaaatttttattcatatctccctgcatgatatgggtttttgctttctttctctgcttcctaaaacttgaatgagaaaccagtgaattactgtttcaggggtcccacggcctccccacacagttgattgcttgctacaaagactcaaaagaatcaaaggcacttcaatcatggctatgatttattatggcaaggaaaaaagatcagacacagtggaagaatccaggctcagtgttccaaagttctccctttcagaatgtgcacctcccttcccaataaaatacagtaatacttctgtagtttttctgccctggtgaagcctgcttataactcaaaatccagggtgtttactggggtctggtcatgtaggcacctctgcctgtgtgcctaaccacagtcacctgaattccagacccagaaggaaagtaggtgttcaccacaaatcatgttatttttgcagtttacgcaagctggccccgcagggttgtgtcccaggcaggcagagcaatgtaacatgccaaaagtcaagttctcagacaccagccaagggccagcctcataagcagacccttctaaagatagcagcatcagacctgctatcccttacctttatttactaatacattgtaaggcaaagaatccagtttcttgcccccacaaaggagcagaaacagcaagatactctctagcaacccatctccctcrcttatttcagatacttgtaaagatatatgttgaaatgacagcaattctaacatatagaacttttttattgataaagctagataacgctaacatactaatagtatcttagttcatttcctgttgcttatgatagaaatcttctgggtaattaataaaagaaatgcattttttacagttacggaggctgggaaatccaaggttgaagggccacaatggtacaagccttcttgctggcaaggactctgcagagtcccgagctggcacaggaaatcacatgatgagaaggctaagctcaggcttctcttcctcttcttataaagccaccagtccccactgacctgataacctattaatctataagtgaattaattcattcttgagagtggagccctcatgatccaatcaccttttaaagaccccacctctcagtactgccacattggggattaagtttcaccatgagttttggaggggacatgcaaaccatagcacatagcttttactataaaccaagtgtgtgttttaaagcacttaaaatgtttattttttaataacttttttctagactcttacttataggattcaattggactgcaaacattttaaaatttataatttaaatgtaaatttcagcttcaccctgtctgaataatcacagattgcatataagaagattcaaattaatgaggttttcttttctaagaactactaagctaatataagaaaaatgtatacatagtataaattaaaagaacatacgggtttggtttttttttttttttgagacggagtctcactctgttgcccaggctgcagtgcagtggtgtgaactcggctcactgcaacctctgcctgctrggttsaagcaattctcctgcctcagcctcccaagtagctggggctacaggcaygtgccaccatgcccggctawttttttgtatttttagtagagayggggtttttaacttgatatactgaagaacagtggtattcagaattataatgagcatttccaatgaaccataaatacatggaatttaatttattcttttaatatcttttttcttatttatgcctggggaatgcgtctttaacacatacccacagtaactttgattcttatagaaaagttttatagctactatgaaagtagagatatagaaatgtaataattgttgcagaaactcttctattgaaggagatggtggtgaggatagctatcctatgtttgtaagaacctagatcttcaatctttgaattgaaaaaaatcaggcttaagtttttaataataaattcacactcaatttatttttgaatggaataatttaattacagaataagaagatgaaggtcactgttgtccaaagtgttctgatactctacaatgtggtcacaaaatttgggaaatactacattgtgtatacctctttgtgagattcacaagaacctgtagcgtaataaagcctctgagaagacttgcagcaagaaacctctttaagctttgtttggtatatcattttccacacttactttatcataagcctattttgtggaatacctacaaaaatcccaagttttagaaatgctctgcttctggattattctaactacattctagacaagtattgagttccttagaaacctggactaggagaagcttttatttcyctttagtttttcactgtgtgttttgcannnnnnnnnnnnnnnnnnnntttctgcaagagcttcattaatttcagttacttctcctgataaaggagaatagagttcactagcagctttcacactttccaaagcaccaaactcatcttgtttgttcaattttgtcccaacttcagggagactacaataaacaacarctcccaacgcttcctgtgcaaaattgctgattcccactgttccaatgccattttctgttgttacccattcgtgtttctctgtgaatttacgcaccgagagcagagcgggtccagtgcgtagcgtacggacggcgcccacccccagctgccagggcctcggcgggcagggcgcggcgggtgacgggaccgcgcgcagggtgcagagcagggcccgcacgctccgcaccactcgcagcgccatgttcgcaggggtgcgggggtcgcagcgctacgcctcggccacccgcgccgggaggcggggcggggaggggcccaggcttaagtttttaataataaattcacactcaatttatttttgaatggaataatttaattacagaataagaagatgaaggtcactgttgtccaaagtgttctgatactctacaatgtggtcacaaaatttgggaaatactacattgtgtatacctctttgtgagattcacaagaacctgtagcgtaataaagcctctgagaagacttgcagcaagaaacctctttaagctttgtttggtatatcattttccacacttactttatcataagcctattttgtggaatacctacaaaaatcccaagttttagaaatgctctgcttctggattattctaactacattctagacaagtattgagttccttagaaacctggactaggagaagcttttatttcyctttagtttttcactgtgtgttttgcacagtaaagaatttctttctacaratttattcaaaattcgccagctataattctagtcatgttcttgtattctatccatggtacagtatcctttatataataaccttgtttggtaactgaattacttaagtcatttcattcctggtcctctcctaatctttgattatgctgttttttccaccctaaaaagtctttgttctcttgtaaggtattttaataatacctataatatcagttaatttgtgccattctacctatgtgtaatggtgttttatgaaagggtttaccatcttgaaaatggtatgcaaattaattcatattttttagtgctatttaatgaatttctgcttatattttagcctagttttttactaaatgtgactagtacttttaaaacgggtttatagactgtttctgcttcatgtaacttcatactttaaccttggagttatctccaagattccagattttctggaatatgcaatagtaaaatacaaagtcaggagtctaggttttattttcttaggttagttgtacatccttcagatttactcttttcctccattaaatgtttcttccaaatagaataataattgatactttgagctgtttcattattgctttgaaattgctggataatcaattttttacctattattttgttacttcaataaacctrttatgtgctagatactctggtgggtgctggtgataatgataacacaacgcctaccctccttgagctctcagttcagtgggatacacagacacatatacatagttacaatacagtaattgcattgacagggctttgcagggctttgagagtattaaggacccctaatctaacctgaggaaggggagaattgtatttttataattcttggtttgtgacacattatcattgttagttcatacttggctccttttctttctttctttagatacccatgagcccaccaaccaatccaagaactaaaaaactcgctgtaacttaaatctacctgttcaccctattttgtccatctgcctaccacgccagtggtaaccagtgtcctgaatgttatggttatcatgccttgctttaaaaaacaaaacataaacatataaacataaagttttacccacttttgaactttatataaaaatgatgtcatactgtatacaagactgggactcttttttttcctcagatattatcttactgtgattcatccatgttacatgtagctcttgcccaatcatttttactgctatctaataatccatatttgactaaaccacagtttatccattttcctgttaatggacatttaggttatttctagtttttggtattaacagtgctgctttgagcattctgaaatatttctcctgataacagtttttcttgcgtatataccaaggaatggaccatttacaaaataatttaaaattgttttccaaagtgggagtgtaaattaaatataatatctaacaatattttttaaaaatcgtgtttattcacatcactgattcttgttgtcacatatcttgatttttctaattgatttggtaaacaataatatggtcttgatgttcattgcccaatttacaaataagattatgcatctcatgtttttcagcctgatctcctgatctggttttttgtttgtttgtttgtttgttttgagatggagtcttgctgtcaccaggctggagtgcagtggcacgatctcagttcactggaacctctgcctcccaggttcaagtgattctcctgcctyagymtcccrggtagctgggattacaggtgcatgccaccacacccggctaatttttgtatttktagtagagatggggtttcaccatgttagtcaggctggtcttgaactcctaaacctcaagtgatccacctgcctcggcctcccaaagtgctggaattacaggcatgagccactgcacccggtcctgatctggttttctactgggttgttttaattgagttgtttttcttttccttattgatttataagagttcttaatgcatttttgatactaatccactatcgtgtattagtgtacaaatattttttctattttatgatttttttcactgtttttaggctgttttttgatgaaccatttttaattttcacattaaattttatcaatcttttatgcttgtcactttcttttatttacaaaattcttatctggaattttaaaatttatctgaatttccttttgaagttttacttttgacatttaagttactaatttatttggaactgatttttgtttatgatgtatatgtgtaacttttccctgccccatttagatagccagtttttcccctgtacatttatgaaatggtgaattttcccagtgatctgctatcccacctatgtcatattacaaagatttatataaaacagatttgtttctaggctcttttgtttcatcagacaatttgcctgtctctctgtcagtatcatacttttgtaattattatagctttttagtaaatcttaatgrcggctaaggcaagacccttccttctctttattcatttttagaaggatcttggctattctttgtcctttggttgattttataatcaactttttcagttctacaaataagtcatcagaatatgcttatagttgtaataaatctgtaaaataaatttgggtgaaaattgtttatctttacaatacaaagttatgtctacatttatttaggcctttttttcttttttccttgagacagggtcttgctgtgtcgcctaggctggattgcagtggcatgatcatggctcactgcagttttgacctcctaggctcaggcgatcctcccacctcagcttcctgagtagctgggaccacagatgtgtgccaccactcctggcttatttttgtgatttttttgtggagatggggtctcactatgttgcccagcctggtttcaaactcctgagctcaagggatcctcctgtcttagcctcccaaactgctgggattataggtgtgaactgctgcactcagcctaggccttttacaaaatatctttcagtaacattttatttttctgtgagcaggttttgcatatattttttataacttaaagacactttttgttgctgttataaatgcattccttttaaaatttaggctaattgtcccctgctgatatttagaaatgcagttaacttgtatatgattatgtatccagctacattccttttctattatttgtattaattggcccgtagatattttgagttttggtttttgttgttgttttaagagttgttttgttacccaggctggaatacatggcatgatcttagctcactgcatcctgtaactactgggctcaagccatcctcccacctcggcctcccaaatagcagggactacaggtgtgtgtgtaccaccatgcccagctaatttttttcatctttttttagagatgggatcttactgtgttgcccaggctggtcttgaactcctgggctcaagcagccctcctgcctcagactcccaagtagctgggattactggggtgagccaccgtgcctggcctagagcatactttttaaatgaacatttatgctttgatacagttctcgtttattcataattattaccacctcatttactaatgcagccttaattttgtccatacatcttgttttaaatgatttgaagctgggcatggtgactcatgcctgtaatcccagcactttgggargctgaggygggtggatcacttgaggtcaggagtccaagaccagcctggtcaatatggtgaaaccccatctctactaaaaatacaaaaattagccagatgtggtggaggcctgtagtcccaggtacttgggaggctgaggcaggagaattgcttgaayctgrgaggcagaggttgcagtgagctgagaccccgccactgcactccagcctaggtgataaaataaatgatttgagctgccatgtaaattcttgttgcataatttttttctcatttatagctcttatgtcctttggcttagcaacacagttatttcctctgctacctataactctactttcttagcaaaagagttttttctttattggtttcttgctaatcacatgtttgtaactgattcattattcctttttcttccattcagaaaaatgagagatccaagcatatgtctcttaagtatgtctctttcgagaatatttgacctctctatccttcccattctcacctcccagtcagaaatagagtgaactaaacatgtcagcttttctgggagtttctaactgtatctaacttaaaaatgtatgtggagattcctttttctttgatagcatagaaaaaagttttgaaaacactttttaagtaagtctatatagcttaaagtataccatttagtttatgaaaaagtaaacatctttttattatgaaagtagaagtatataattgttacataattattttaaaaattgttagtcacaatttaatgtccatctttccaaaccctttctatgcatatataattttattctatgaattattctttagcctgtgttttagattaagcagtataatggtgatatctttcatgtggtttatggatcattcataccctttttaatggctgcataagtatttcattgtatggatttgccataatttatttaacctattctttctatatgaacatttagattatttccaatctgtctcaattacagttgtgcagtgaaaaaaagtttatgtatttacatattttaagtttttctgtaatatacattttttaaaagttaaattgctgagtcaaagcttatattacttaatttctcttcaaaaatatattttactggaactttacactatgggtgggagtgtaaatttatacagccactttggaaaaccacaaatagatcttcagtttgagagtatctattaaagcagaacattatgcacatactgaggtctagcagctcctcttctaggtatatatccaacataaatatgtacacagttcaccaaacaacatacacaaatgtggatagtagcctaatattagtaatcaaaaatgtcgacaacccaatgtccaccaatagtagaatggataaataaatattaatatatttataccaagtaatactctgcagcaaaaaggatgaatgaactacagccaagtacaacatgggtgaatcttacaaacataattctgagctaaagaagctagacataaaaaaaatgtattattccacttaattaaagttcacaagcaggcaaaattaattcatgatatcagaagtcagaataatggtttcctttaaagggacagtaatgatggaaatggggtacttaggagacttcaggaattctggttatactgtttctaaattctggtgctgattatatgggcctgttttgtttgcaaaaattcattgagctttttaccttaggattttcaactttcccgtatatgtgttatatttagtaaaaagtttacaatatcttttttatgtgtaaaaaccgctttcaaactcctctcagtaatgcctgttttcctgaactcttaccattctgatatacataaaagtcttttccatctaataaacataaaaagatcagttttttgtttttatcctattattagtgagactgagcatcttttatatatttgttaactgttatgagatctgtttttcttactgatttgtaacctttttaaagattatggacgtctggtctgttatatgtcaaaatataatattttaaataaattcaaactgacaaaattattaagtaatatgtgttaggagagaagttttattttaatagttaaatcagtttttaagagtcctttgttcttcaatcccagttctgtcaccaaatcatttcttaagagagtaaaatctgcttcattagttctaaattcgtaatatggagtccataaagaagatgctatttgaaggcccttgttttattgcttatatattaatattcttttttttttttttttgagacrgagtctcgctctgtcrcccaggckggagtgcagtggcrcgatctcggctcastrcmagmtccrcctcccgggttcatgccattctcctgcctcagcctcccgagtagctgggactataggcgcccgctgccaaacctggctgattttttgtatttttagtagagatggggtttcattattctttttacctaaagtagtctgtttttggaacatctttaaaccacattttaaataaaatatcaaaatagaagtctatccactgctattatatattacctttagtttcttttcatttctctttatgtgttttcttaatatggagaagaggggaaagaacattggataaaatttgttatatttgtagtaaaattgcacatgaattttgtctgtattatgtttttataaaatagccctttaaaaaccagtttgccgcatgctattgcctttacttttcatccagwaccaaatttctaagtgatctcttaactaaaatactttgttgtagtaactcaactagtctgacttctcactgttgtgtctgcgtttttatgcttttggttgggggtgccttattgagatagtgtgtttatgtatttcctagacttactatattttcataagtttctcattattctttgtgaatatttttatttatttttgtttttttaatatgtaattcatatagacgctctgctgttgcccgtattcaggagttcttcagacggagaaaagaaaggaaagaaatggaagaattggatactttgaacattagaaggccgctagtaaaaatggtttataaaggmcatcgcaactccaggacaatggtaccaaatgttcatggcattttttggtgaaattgcagtttcatgctctgartgtttttccataatgatttatcttcatatattgccaatgggatttcagtattacattattaaatcttcagttatctctttatccaacatggttcttttagccctataatatattgtgaaagatcattattttttacaagaaaactctactaaaaaaatgcagattaaaaaaatttttagtttatacaagtaatcattgcttttgttttttttttttttycccctctctttctcacattkgctgtctacctgaaaagtttctggkggatttttttttttttttttttagcttgtattagcattctttgttagttttggagagaaggatttggatctataaaatctaagttgattgcaaaaaattgtcaggccactttatacccatttttaagattgacaagtgaaaatttgttttagtgacttaccagatgaaataagaatagaccagaaagatctctaagatcttttgtagtttttacgatctacaagtttctacacccagtgtaatattaattacttaataagaaaagtttttgagatgactagtgtaactgttactctgatcccttcataactagaaagtgttgttctcctcatatacattgcatcatcagaaggtatctacagaatcagttttaatccatattactgccatattacccttgctgatgaatttgtagcttgctttctttaggatctaggttaaaaaataacatttgggttggggaagtaattagctctttctataaatgtcattgctagtaacaatttactcatttttaaaaggttactcattattaatagaagtaaccaatttatatttcttgcattttattgcctaaaagttagcatgaaaataattagaggaaggagtgagaaaagagaagataagtaaatttaacagtagctcagataacaataaaattgtctcccctcttttgtgagagcaccaaaaatggcaaagtagcagctgcagttaaaattttttaaaatccttgtttgaaatacaaagatttttgatgtttcattcatgtgcattcatttaaaaatgtcattataactattccagtatatcatatgcctttgattctgcttcataaaattaagtatgtttgtatctttctcaattgtgttagcttataatagctaatgatcttctttctattctttgggtctaaagcaaaatacaaaagacaatttcttttwtctgtgaattatttcattgtcttataaagctaaattggtacaatttttggaaagttcagcaacatatatgtaaattgccattatactgcccaaaacccagaaatcctattctttcatttagcagttaataattaagcacctattgtatcccaagtaccatttcaggtgctgtaaatatagtattgaacaaagcaaagtccctcttcttasgggggattttctattacttactgccatcttacccttgctgatgaatgcctatcataatttaaagaagctagaagacagatttttgtcagtttttttttttatagrtaggggatctcactatattgcccaggctggtctcaaactcctcagctcaggcagtcctcctgccttggcctcccaaartgctgggattacaggtgtgagccactgcgcccagcatcaatttttaattttactattttctaagccagtttttwaaaaaatgtaagaattaaaacaaataaaaaaatgtaagartagcataaatctttgttttaataactttgatttgaatttttaaataattttttttaacccttagataaaagaagccaatttctggggtgctaactttgtaatgagtggttctgactgtggccacattttcatctgggatcggcacactgctgagcatttgatgcttctggaagctgataatcatgtggtaaactgcctgcagccacatccgtttgacccaagtaagatatcttttctaggacgagggctagaaattatttgyatgactcatcagtcatacaaaattattcttttttaattgttaatattataagaataatccaaactatctgactaggcascagtagagtcaattacagctgaacttgcacttcaaacacacctgtaatctgctttttgcacaaagtaaaagaaaataggttaaaaagtttattctcccaatatttcttctaagttttacaagctgtaagaggtttggtgtgactgaactttttattgtatatccaaatkgaacatccagtcatttttagtcttcacatagctgaattaatttatcagaacaaaagagcattgctcgtcttctttttgaaattgcccacatatctcataaaagaacaatgaataagtgacttcaacaatgaatctgagtgacttcaacatggtattaaaattacgttctaggataacatttagcaaattgtcaaaataatattttcaattaacagttaaatatatagtgtacaattgctgttcaaggttagttttgctatatatacatatatgcataatataagcatatcctgaattgcatgtttctaggcttcatattaatatataaattttatttctagttttagcctcatctggcatagattatgacataaagatctggtcmccattagaagagtcaaggatttttaaccgaaaacttgctgatgaagtaagatttttattgtacttactmtagaccatatttcaatttgttcctaaaatgcttccctaagaaaaattaaaagttattagttgctaacatgaaacaagttaatgcagttaaggaggtcaaattttaagaaaaagaaaaattaagataaaaggatgtctataatactagggaggtaaaatctaaatagtagcttactaattataatattcatcatcggtaacaccagattaggtgtatagtagtttaagaaaaacaggtttgagtattcatgttattacaataaagaatcacacacaaaaaaatctgtccttttaagaaaataattttattataactgtttctccaaaagcctagcaatttttccatttttagtacagctatttttccattttgagtttttcttaaaaaggaaatggaactttgtttttcaggattagtatatagcagaacaaatgagtgaagaatcttttcctttatcattatattttaagatttttttaagcctgttaaaacagtattttcagcctgagttctttggagctctggatttcttctgggatgggagagggaaggtggataataggaaggcattactctgggcctttcctccccaacttcaaccagggtttttatttgtgggttctcatatactatttcttatgaaaatgagaatccattgctaaaaatgttagtaagttggaaaaccactactctagactaacactgactgttcgtagcacaattcccatgtatactttcactcattgaataggcatttataaaacagttgatgtattgtatacataatgctgggtgtaaaaaagataaggccctaccctcagagtttagtgggaaagacaatgtaaacagctagaacatactgtagtggggtctgtgtcagtcagaggtatacacatagtgttttggaagcccacagagaggaacagctgtttgtaaatggggtagataggatggagaggtcttcacagaagaaataagaattggacagaagtctgagaatagttcacyaggcagacagggagcaaagcagcatttaagacagaaggatcagcatgtgccaaagcatgagagggtaaatgaaccatcagtgtgcctggaaccctagagtacatgcacaaaagtagcttaatcaaactaaacggttaggtgagggtaagattgtgaagggccctgtggggcaccctgatgagttgggaatttattatttcagtattggggaactgttgatcagagtagcatctttctcttcctctcatactctttctttcatcctttttttcctttgccatgttttttgcttttccacttttttcctttgctcatggttacatattgcatctctgggtgttcacgagtattcaagtaatcctattcttggtacttaaggctcagtttcttgttaacccttgcccaaaaatttattttccaagactactctgcctcagtcaaggtaacatcttttcaagggattcaagtggcccatggataataatttaactgtatttcgtcactaaagttatcagttctcctatagggaaaacaaggagccaacaaagtaaatggctctgagaagcaaattgcaagtaaaagctaaattaaattcttaaatgttttaagtagcctcaaaatttgacctttgtttttctgccatttgaaagagttgtgttctttgaccttcctcctttaaatacaagttacagtgattatttggcattgaatagacttaaggcagaaatatagacatcagacgcataaagaatgaagtaattcctcctggtactggctgattgtttacggtttgcctgatcttcaaggaaaaaatacagttactttatgatctttgatacgatttttaacttgccttgtaggttataactcgaaacgaactcatgctggaagaaactagaaacaccattacagttccagcctctttcatgttgaggatgttggcttcacttaatcatatccgagctggtaggaactttaagtatactactaaaaccatttttatatttgaaaatatattattatttaagatctgctttaaaggggtttatatatattttttaatatcacaaaatgagggtagcttaacttctaaactaggatttctgtgaatgcttgatcttggcacagtaacttagttcctcatgaactacatttgtcgtaaaatggtcaaaatgaaaagaccagagtcacgtaaaaactcttatcagctgctgttttcttagagtacataaccttaggatatattatcgtgcatattctttaatggtaggtttgttgaaaatcagtcatagcccaaacagaaataaatgtgacatgctaagaaatgaaacatacctcagtttgctttttgaatatttttttgttttagataaactgtgaggtgcagtgccacagatacataaaaatgcatatattacaactaatgttcaagaaggaattgaataatttataacaaaagaaaaggtctagtatctgttataagcagaatatatttatcaaacaaaagagttttaccactcttcactgatttcataaatgtccccatacgtttggtattagctatcatttaataataataggtaccatttataaagtaactataatgtatcaggcttatactaattatttcacagctttatcctcatttacctccaatcctttacaaagtaggttatttgtaataacttagcccaagtcacacaactgataaatattaaagccagaatttgaaattagcttccaagcccttactcccctttgacctataaatttcacttacaggaatatattcaaatcattcatatgacatgcaaacctctggatgatctaatctcaaactattctagctgatttacagcattcttttcttctgtgactactccatccacactggccctctttgatttttggggatacaccaaactctttcccacctcagggtttttataatcgtgctgtcccctcccatcttcactctgttgagataacttcttactgtaagaactgcataagcagtgaattaaatatcacttcctcagagagagtggggaatggagacaagtattccacagaaagtagacagcgtatagcgtttttctaagccctagaggagagaaagtatagcacatctgaaaaattgaaagaagacccatatgtttgtaattaaaagaattagaaaataatcctcaaatgtaaatattaacttttaccaggaaagagggaaaacttcaaatggtgaaaacaacaacaaaaaataaacctggaatgtaaacaaaaaatgttaatagaccaacaaaatgtttttgtgatcttctttgggttcctgtattattaaattataataacactgtaacttttttaaaatatattttgttcaataacagcaagtaacccttaaaattcatccatttgaatttcacatttgaggaagcagcattttaaaacaagaaaaacgtttactggtaatgacacctaaaatgtgcttactcttatctagtggatggctcttcctcagtagttttcctgcagaaaattaattctctttccagttgcacaaaaatctatttgtgctaatgtagcaatggttggttagttaatagccactaccatccttctttggttttagaattagataaggtgttttataatataaaaattctctttcatttctttttgccagcaatcaaaaagacaatttctagttggtttagtcagcttatcttcttgcttctcttatacaaaatactagatagaataaagtgcccaagagttaacatttctgctgcccttatctttaagatatctagttatttgatgggtcagttagtcaaccactctttttctctcctatccagtgtcctgcagtccaaatacaataatgtgtgcatattcaggagagttaaaaatggacttggatcaaataagcacatggtagccacaaagtacctctcggctcatccattactccagaaggcttcctaggaagtccagggaatagatacggacagtttctttctgttggagctgtgatttttaatgaaggagcctcttaaaatcatctgtaggggttttacaaactacaaatacttacctaggtctcacctgctaaagattctggttcattttagctggatagagattaagcgtctacatttttaaaaagcaaccaaagttaatctcatgaataatgcactaaagactgctagtctagtggccacttgagatggaaaggcatttctgacatccctagaagctttgagaggctttggaaagatggtaatggtttgcatggatcattctagactcctctagaatgtcttagaatcactttactgccctgcttaaaattctcctttgcccacacatgttcttagggtagagtccaaatgtgttaacatgtcttataaaaccctgcattatctcttgacattcttcccattatacctctggatcttagcacagatagttatcatttctctgtcatgggtttgcaaagcctgttatcctattgagatcacaatcacttattaaatcgttcacagattgactccctcagtaagtgatactaactttactccagaatagacctaatatktatatacccttgatctccctgcttctacttctcttgtcctcatagtctgattttcacacagcagccagagggatcctttcaaaacaggtcagttaatttttttgttaatggccagatatggtttttattgtaaccactcaactctgccattgtaatgcaaaaacagccatagaccatatgtaaatgaacaggtatggcacttataataaaacttaatatataaaaacagagccaggtacagtggctcacgcctgtaatctcagcactttgggaggctgaggcaggtgaatcacctgaggtcaggaattcaagaccagcctcgccaacatggcaaaaccccgtctctataaaaataaaaaataaaaaaaattataaatacaaaaatacaaaaattagctggacgtgatggtgcacacctgtaatcccagctacttgggaggctgaggcaggagagtcactttaacttgggaggtagaggttgcagtgagccaaaattgcgccactacactccagcctgggtgacagattgagactctgtctcaaacaaaaccaaaatcaggcagtgggctgtatttgcctatgggctatagtctgctaccacctttttaaaacacaaattagataccaccccctcttaaaattctcagggactccctattgctcttaaagtaaaacccagacttcttactctggccttcaaggtcctacatgacatacattctgccaacctctgacttccactcagtccacctttttttctagctcactacattttagccatactggcctctcttcctcaaactcatcaagcttagtagcacatttaggaccttttcacttgttcatctgcccaactttgcccccaggacttcacatacaattgaggtcttagctccaatatcacctccttagaaaagtcttccctggtagtgcggtggctcatgcctgtaatccyagcactttgggaggccgaggcgggtagatcacgaggtcaggagattgagaccagcctggccaacatggtgaaatcccatctgtactgaaaaatacaaaaattagctgggtgtggtggcgcgtgcctgtrgtcccagctacttgggaggctgaggcaggagaatcgcctgaacccaggaggtggakgttgtagtgagcygagatcgcaccactgcactccagcctggtgacagagggagaatcagtctaaaaaaaaaaaaaaaaaaaaaaaaaaaagaaaagaaaagtcttccctggtcactcaatctaaagttgttttctgtgtcttctcatatcttccctctcacttagtcattcttgttcattgccttattttcctcaagtacttatcactcttaagctttaatttctttatttattgtcttattacagattagaggagaaaaatacaggtggtaccttgtttgttgtctatcttcctccttagaaagtaagcttataaagagcagagacccagtttgtcttaatttgcagctgggtctttaggctcctaaaacagtgcctaccacatagtagttgcttaacaaatactgagtattctggtaaataagtacacatctagtatcaaatctctagctaacaatgaatttgtattatttcttttaaagaaagtaaataaattctttgtaaagggtagcctggaaaataaaacaacagtgttttttgtgaaacacaggcttccattgggaaatttttttcttatctaccttccctccctctgcagcaaactcagtgtctcttcatatcattatcttccccagtttcctgaagaaatattctaacagaataaaaggaacctttctacaaatgtaaaccttatttacaaaagcaatttgacattgctacttctgaaaaacagtatacatagacatcctggctaacatggtgaaaccccatctctactaaaaacaaaaaaatcagccgggtgtggtggcacgctcctgtagtcccagctactcgggagggcgagacaggagaatcgcttgaacccgggaggcrgaggttgcastgagccaagatcrygcyactgcactccagcctgggcgatagagcgagactcggtctcaaaaaaaaaagaagaaaaagaaaaacagtatacatagaagtgattcttatttccagtttttatttaagagaacacactgttcttcagacctccttgtctataattgccaaccagagatttgtataagtgttaactgctttgcagccttactacttcagtagcatttcatgaacagaagatttaattaattctgagaagttgggcttacattctggaagaggtgactatgcatcagttaaatgaattgaatttgaggagagaacaactattctgctttcctcatttcagaagccactgtcacttattctgtgacctatcgtaagactcttggccctcatttgtctctttattgtgtgcctctgagtgtaaaagtctaacctctactgcaaactccctgatttaaaggctgtgacatttttttcttaactctctattatcccatcttctttataatgtgacaaccaaaagaaatttgagtaagaagcctgccaactttgagataggccgttactgcttcatcatgctctaacatgacaggataggtttcttgaatatattcagtcatactcaggattcccattcctgagccctacttaagtagaatagcaacttcatgttttgttctctcttgaaagtatcacacaataaaaacaatgtaattttttttatactaatatcccttaggtagccttttattggtcagaaattcttctactgtgtttaaattccttactgatctataaaggtctattcaaatcttattttgttcatttattttataaatatgtattgaatacatatttataaaataaatgaacaaaataagatttgaatagacctttatagatcagtaaggaattgaatacttatttgtattcaatacctatttgtataattaaggttataaaggttacacatacattatgtcattggtttgacattggattagagttggcatagaggagatttaatctaattcacttggacaattaaacaattaaaagggacatatagtcccttcagtgtactgttcttggtgctgttgacctaggatccagtgggagcatttaatcctgtgtagataataaataaaatctcaggattcagtcttctcttgctgttgacagtgggactgaactgttttccttatgcttaaccttaatattttccatgttactatgtggaaatgtttctggggcagaaacatcctagttccatctcagtgatggtagtgattttatgctgttgccttcttcacaatacccttatgtaatgtatcttaccttcataaaacttatattcatttattcagtaaaccttcattgaacatcctatactaggctctgaggatataaagataaaaagaagtaactcctgccctccaggaactctcaatctggtctgcaggaagacatgcaaacgactattactgtaattaggatcatcattatgaagttcatataagatattctagaatgtggaggagggagttcataattctgcagatagcctgtttggaaatgtccaggaaaagtttcaccaagggtataatagttgtattgagatgagtaaacctttatagctaaagaattgggcaaaagtatcccaagcagaggaatagcaagtgtaattcctgaaaacttgaacgagcatactgtactcaccagtttgtaagtttatattcacttgagtatttaacctaaataagctccttgagaccagaaatttacatctgttttggtcaccattgtattctcaggttttatcacaatgcctggaacatagtatttaatttaaaaaaatctttttacaaacagaattacacaaatcctcaacaatcgtccacatattttctctcacacagctgcctcctcactcccctttgcagcacctgatgtacctccttagaaacctagactccaaagaacactgtttgacaaccactgcagtagaacataatatatcaagattttaggagtgggtttcttttttcatttttacatgttttagaataacatgcataatcaaagctaataatactgtgttttctttactcttttatttgcctctaaagacatccacacatagtggtgaactgatttttaatgcgttttaaataaaaggcattgaaaaataytaataattgtaattactaaaagtatttctctttgygattctcttatctgtgtttccagaccggttggagggtgacagatcagaaggctctggtcaagagaatgaaaatgaggatgaggaataataaactctttttggcaagcacttaaatgttctgaaatttgtataagacatttattatatttttttytttacagagctttagtgcaattttaaggttatggtttttggagtttttccctttttttgggataacctaacattggtttggaatgattgtgtgcatgaatttgggagattgtataaaacaaaactagcagaatgtttttaaaactttttgccgtgtatgaggagtgctagaaaatgcaaagtgcaatattttccctaaccttcaaatgtgggagcttggatcaatgttgaagaataattttcatcatagtgaaaatgttggttcaaataaatttctacacttgccatttgcatgtttgttgctttctaattaaagaaactggttgttttaagataccctgaatttgactttttatttaatgccttgctactttgacccacagttttccaatctctcctgtagcatacgatgactatttttctatattttctagatttaacaaccttttccttttttgcttgtgtgggatagaatcacatagaaggacttccttcatttctccttccacggtacagctgacccttgagcaacccaggggttagtggcaccagcccccctcacagttgaagattcatgtgtaactgttgacttcccaaaaatttgaccattaacagcctgttgatcgcaagccttactgatagcatggtcaattaacacatattttgtatattttatgtgttatattctatactcttacaataaagtaagctacagaaaaagtgttattaagaaaatcataaggaagagaaaatatatttactgttcactaggtggaaatggatcatcataaaggtcttcactgttgagaaggccgaggaagaaggaggcgttggtcttgctgtctgagggatggcagaggaaatccacatataggtggatctatgtagttcaaacctgtgttgttcaagggccaactatactttatttttacctccagtcgttatcgctcctgatcagtggaacctcattacacaaataaaggagttagtcttcaagcagaaatgactgagagcatcatgggtagctcacatagtagcataaagtagccctgaaggaaatggcttctggcctctcactccaaattttaaatttcactgcaagttattgaccatccagtctaatttctgctcttccttaactctagtatccacctccattcaagtcatctacacccagacctacatatcctataggttatgacccaaaactgctcctgcagacctaacccttcaatcatcctccctcacttctactaaattttcattctgctggtatcttcccctcagcctattcatgtgctcatgtctcttcagtccattcacaaaataaatcttttcttaacaccaaattattctctctatactttctgatttctctcctcctcttgtcatccatatgagcacaatacatgtccatggcttctctttgctactttcttgatatacaaagccacttccggaacccagacctgccaggtgggagtgaggcagttagttcactgcctcataatatcttggaggcaaaatcgcaagcatggcagagtgttgggtttagtggtccgcgatttcaaaggcacgctcactgtcgcgcacaccctcacacacacgcttggcctttgctattgtaggtttctgggatggcacatcatttctcccttttagtggggaaagtctttgagcttccattcagtgggctcttaggaactgtctcacttgtgaaggacagaaataaacccagcaacttctccatgacctatagtccagccagtaactatcttcactatacctccttgccagccagtagctggagaagacattgaattacatgctggactgattattgaccccatcttgaaacagctattcagtgctgccaaaattataacacttacaaaagaaagaaaatgttggagttgtcaaggtcagagctacggatcatatgacagcttatccatcaccatcagcaccagccttgagctctagcttttgctcacactctggaagtggatgtgatatcattggtgactatacatggtggctgaaagaggccagtgccaatgcaaatgtgatggcttgccatggtcatctcaatcctgggcccctgtctgttgatgcttttagtgtttgtgctgttaacagctgcccttttttgttgaaagtagtcaatctcttattgtttaattagcagatagttgaaatgttcctattattttcaggaatctaaatatcttggagagaaaggacaaagtcagatactgagagtaagacataatatctcctggctgagccacgactggtctcacggaccagtcagtagtcaagcagagcatccctcttccatatggagaacaaggatctcctccacagccagagacatctgctgctgagaaggttagctttttgtgtagaggaaataactgcagtaggttattactcagtaagctcagtaggttcagctggacttcaacatccagcttgacaaaggcacatatgtatccacattaggaaacgtcgtaaatgatcaagaggatagaatcagagctttagccaaacaaggtcactttatgacttccgaaaagtgcaagggtcttagtttctggttttcagttatgtaccttgctcaagacacctgacttctctgggtttgttccctctctaaagggggtggtcatatttgccctacctatgtcacaggggctgttagggcaagatgaagccataagattgacgaattgttatacaggataactgaaaagacgactctaagcacacagtatgtcattccttccactgtagtaagacagtaacagggatgtgttatagcggggtgttgggaaattgacaggacagaggatactggaggactagtggggtgaaggagtaactgtcaggaaaaacaatagaagaaagtcaaaatggtattcatctgctctagtgcaggatgttgatgggggagagtggggctatgggaactctactttctctcagttttgctgtgaatctaaaactgctctaaaaaaatttttttttaaagtatttgttggccaggcacggtggctcacacctgtaatcccagcactttgggaggccgaggtgggcagatcacgaggtcaggagttcaagagcagctgaccaacatggtgaaaccctgcctctactaaaaatagaaaaattagccgggcatggtggcatgtgcctgtaatcccagctactcaggagactgaggcaggagaatagcttgaaccgggaggcagagattgcagtgagccgagatcacgccattgcactccagcctgggcaacagagcgagactccatctcaaaaaaataaaaaaagtatttgttaaatgaactgggtcccccacccacagtgattttgcagttttgatggtgtgtattgctcagaagcagggcaagccagacaagccgtcaggaggcagcaaagagagaaaacattctacagaggcagaattcacaagtgccagctgcttccaagattgggtgtgtgtcagaggaccccagaaagctcagcaaactggaccgtagggccaccatccacttggaagatgatttcagtggtagcaggtaagggggtcaggaaaaggtgggtttcgtgccccgaggtggttctgagtctcaatggtaacgataatctgcctcttgccctctttgacttttgattatggggtagaaaatacatctgtagatggatagacagggcatagctcccataaaaactctgggttaagagtgtttcttgggcatggtgagaagtaggtcatttaaacagttatctgaatttaattgccttggaggaatttatgaaaatgcatggatgagtatttgcaggtgactctggtatgggcactcccccaccaattctgcagtaatccacccctttctgctcagtctccctcgctttagcccatgggaagggaggttgacaatagggatatggctgcagaaaatgggagaaaggcagaggcacccaacaaagtccacagaccacaagtccaagtacaaattcaccatttccacagtatacacataccaaaaacatatttaatcaggtaaacaaaaattccaaatacattgttgcttatttataaatattgatttataataatcctaaacttttttttaaccttaaaaaaatcatccaaagacttcaagttaaatatatttcaggattagccagggatttttgtttttcgagggttggtttttaaccacttcttcatccagcggtctattatgagaacacaacacagtcctctgtcccttaagcatgcaggttccttctactgctctcagtgtggtcttgtctgccaggcctgtgattctccctaggactgtcttttcctctgggaggactgactcacctgtgatttgtggtatttcaaactagtgaaaaaaggaaaaacaaaagtggcatttgattcctaagctattactactacccaggaaaatgcttgctgagagaaatgaacatagctttgtgtattgcattctaaaaataacaccaaaattgtgcttttgtaatcttgtgcagatttgagtttgtgctttgatgttttcaaaggaatcttcaaggtattggaaatactttggaatccaaagtatttgttagatactttccagtgagtccagtcactttccttgggccttcagttttttttaggtctggccagcagatattaatatctcccaagatccttggtttataatagttctacatacctaataaagccctgctggcctgttctgtgatactgatgactcttaactatacctcatcttccttgacctataagactagctccttgcttttctcatccccttggccaagacttggagtttggctttgactctggcttaacttactttgagacctcagacaattgccctggattctgtgtcccctctcccaacccacaaggacagtatggctctgctccttcttataggcatatatggctaatcacagccattctcctttgcctacagtgaagacggtaatttcctctctctcccacaggctccatctggggttctgcatatattgtgggtagcatccctgccctgcctcttaggggcttggaggattagggattctgtgaacccaagagccacagccaggcagtcactctgtcactacaggacagagctgtcctcagcaaccaagggcatttctcagggagaatgtcctttctggactgtaaggaaggtcaagctgtatttgtgctatgatttggaacgttacaccaggccctggggatttgatcatctttgatagtcattccggacaaattagaatgattttatctttgtacaaacaggccagtagcatagaggatagactttttcttttttttctttttttaggcggggtttcgctcttgttgcccaggctggagtgcaatggcgcgatctcggctcactgcaacctccgcctcctgggtttaagtgattctcctgcctcaggctcctgagtagctgggattacaggcgcccaccaccacgcgcaactaattttgtatttttagtagagacggggtttctccatattggtcaggctggtctcgaactcctgacctcaggtgatctgcccatctcgaccccccaaagtgctgggattacaggcgtgagctaccacgcccggctgaggatagacatttttaatagaaaatctcattttggctcccttagacttctcaagttccagatgctacttagcctttcctccctgctctctattgcctgctcttcctcaccacatccctgcttttctgaaagtccttccttgctgtgcaacaaatatgacaaaattcccaaggcaaaaacctttaacacctcccatctaggataacacttatattttcaagattctcacttcattatagagatccctataaaaaggaataatacaccctccccacagagatactgtgaagaaacaccagtggctcagcttcagctgcaccccaggcattgtgctgcatgctttccaagtatttcctcatagaatccagacagtcaccctgtgacggaggactccctcaatcctgtgtgtctccacattgaaacagatgactaaacttcccttcacagatgaggaaactcataagtagtgacttgtttgaaaacacccatgtaattggaagcacgggatctgaactcatgacttaaccatacccacgtcttcaccatcctcactatatcacacttgcactggggtaaaatgagataaagcatttggaagtacctaacacagcacctagcacatcataggccctcaaatgtcaaacaggtcaggcccacagaaggcagtcacatg

SEQ ID NO: 97253 - DNA, 31438 bp, Homo sapiens
  misc_feature (1)...(31438): n = A,T,C or G
acgtgtcaggttataaatgaccccgtctcctttgttcagtgtactctcgtggcaaaactgctggcgagtataccctctctgcaggaagtaaaaatgcccttactaaataaatttatgttcaagtgctatttctttatggcattggagaacaagcgtttcaaacagaggtgattttagtcagtgtagagatgaattagatgattgttaagattctattgttttaattaaggtgatgtgaatgaacttggacagatttttctgtttatgatgaccaaacaaggaaagtacatgcattttgagattaagatggcatatgtagatgtgaaactaaaagaagaaaatgataggtttaaaaggcagggagatctaaaataaatatctgggagtttcttatgaacacccataaaagacaatagaaattttctatttttgaagatatagttttctgctttaagttctgcaacatcacaaaatgattagtgatagctgtatttacctttctacaggcacataccacattgtaattataatttattatgacctttttatgtgaagcattctattgtaggagttattaagaaattattttaggcagatagagaggaaaaggggtccttgggaaattttcattttttaaagcatctccagaaaatttcttgtaaagccttggctcttagagccaggccggcaacctttgataagcaaatgaaggccattagaaacagggcccacccaacatggcgattccggaggccttctttcccttgccccacatgttcctggcaacatggccacctccacatactcccacgtgtgtagaacatcatggcaccctgcatttgcatattaaaaggctagggtgagagggctagctttttcaagggctttgtgaatgacatgcctggtcaaaccaatcccctgaaccctatgcaaatcagacactgcctcctccagcgtctgtaatatatacctagctgacgtccaccccactgggggttccctctctcggctttggagcccccctccctctgtctctgtatgggggagcttcttccctctttcctcttccttcttgcctattaaactctccgatccttaaaatcactccacatgtgtctgtgtcgttttatctaaaccgggatgaggactaagaaccttggtgttcctccactcatcggagccgtatcaattctacataggttgcctcatttaatcatccaaacagcgctatgaagtagacctgatttctatagatatgaaaactgaagcacagaggtattaacttgctctgggttataaagctggaatatccaggtctgtgggacttgaaagtccctgttgtttctactatatcatgctatatcccatttgtatacgctttatagcactttggggatgtatatgacctagacaaaagatgtaggtttaatttaagagcactttcaatgcatgttgatggtacccttatcaactgttcagccaattctatcacatcaagaatacagcatgaacagcatgggtactgacaaagcgcggaagcaccttggaatgagaaatgaggatacctgagtcaaaaggcaagcaggcgaatgaggcccgaaagataaaccaagaaggattcctgaatgcggagtgtgagtaaagaaaactcagtagtacccaaaaatgaaaagagaaattagggttcgattatattcatcagtttctctaaatctctcctctagaatttcctaatagattttatattcaacttttcacctacatgtaaagtcaggtttcacgagtccaaagagggagatactctgaacttaaaggcacagtgttacctgtcatgaaagcttgcttgcctactctagccatggtaatttttcttctgagctattgtggctcttaatgtctacacttaagtggcttatttcccatacaaatatccttgattatcttttgaattgcttctattttgtcttcatctgaattgtaagctccccgtttggaaccatcttctacatatctttgtttactccacagcaccttgccagagcccccttcaagaggtaggcacttggtagttgttgactgataaaaaggaggatatcacgtgagaaactgcagaaaagaggcaaataaagaaagtaagctagaaagacagagcatccaggttgagaaggtgaggcaatatttaagccttcaagcttctaagctcatgtaagggactgacacagaggtatacacaaacttgaaccctgacttctagccccaggcttcccactcctctgcaatagctgtcttctttcctgacggtcgccctcatcttcagctctgcaatcaatctttctgctgagactcttacttccacatacctccacttcatccagggctgaggaaaagccagacctcagttagggactaggtcttttaagactgcagaagacaggagaggaggccgggtgacattattctgaagacagctgaagcgccatgtctgtctatagctgacccataaaatgacagttttgtctaaaagccgttttccaggccacaccctcatcagtagctcattgttccacgggcaccgaccatgtttctgattgggtggcactgccgtcccctcccccaccaacctgagtggcctactactgtacaaggaaggactggctgtttcaggttctcttatccgcacatttgaggcaagggtcaggggagactgacatgaccccagagtagtttacacaattcttcccttggccatgtggaggatggttgaaattaggcaatagttggtaggtgatcatcagaagtatctccagagcaagcaaacacctaattttagtcaatagtggttacagcttgtaccaggactatgaaatttaccagttataataaattcaatacttaccttcagatatatttgtgaggtaaatttttgtttgaagaattatatacctgccctttctgactggtcaagtgcacgcttttaatcaaatttatcccaaagataacttgaaatccaatgggcactggatttgagttttctttatctgatgtgacactggaaaaatgtattttaagaggctggtgtgttttctaacagcttaaatcatgtgttgattttctaaatgttcttatgtatatcatcacaaccacaattatcatttaggggcacagcttttaaaattggaatttaaaaagtcttatttaaaaagctgtacatgttctcctataaagccccgctctgtaattgtttactgtgtacttccaaatgttgtaaaacacagttgtcttagggaggaaaacaagagggtcatttaattatgttcattgagtgaattttctggtgtgagttgtggaaaccagtcttataattagaatcatacctcatttaattaaacaatccccttagggagagctattcttaataaatgccagtgttttctatttctgcttcattatataaacaggctccagtagagacctttgttttacagaaaggaaccttagctttgaggtccatcctcattaacattcaacctttcgctatgattttataagttaaaaaagaaaatatttactatgaggaaacagcagcactgacataccttggatcaaagtttccttaaaagagatgccataccacaaaaaaagactaaagaatttatctcttattgagcattctccaccccacctactactcctctaccccaagcagcttcttttctgctataaagttattagttcagaaaccgtgcaaataggttaacacagtatatcctttttgtagtaaaattaaaacttcctttaaagtacttaaagaaaagtactttctgggtctaccttcaattaataagattaccattttctgaactttcttcttgttgcccaggctggagtgcaatggcgtgatctcagctcactgcaacctccacctccctggttcaagtgattctcctgtctcagcctcccaagtagctcggattacaggcatgtgccaccatacccagctaatttttttgtatttagtagagatgcggtttcaccatgttagtcagtcttgtcgcgaactcctgacctcaggtgatccacctgcctcggcctctcaaagtgctgggatttcaggcatgcaccaccgcgcctggcccgtttcctgaactttccatatcttcaatatttactgtggaccaggcactgtgttaaaaccttatctcaatctttagaacaatcctatgaagtcagtactatgattatcctcattttgctcttgaaaatattaaaggtcagagacagaggttaacaaagtctcacagttaatgtgtggcagagttgagttgaaacccagggctgtcagacttggcattgagaaagaaaacttacatagtgaagctatcaataaagacctgtcaaaaagctgtgataaagaattcaactcaactatactaatcgatttgcaccactgtggaaattatttttacggagttcagtaactgcattgatagtaaggacttctaatatattcttactaagtctttgagaatagttgtgaaactgataactaggctatgtgttccaagtggcaatgagagtttttgacaggatacatattgttactttttgagatggagttttgctcttgtcgcccaggctggagtgcaaaggcgcgatctcagctcactgcaacctccgcctcctgggttgaagtgattctcctgcctcagcctctggagtagctgggattacaggcgtgcgccaccacacccagctaatttttgtattattagtagagacggggttttaccatgttggccaggctggtctcgaactcctgccctcaggtgattcacctgccttggcctcccaaagtgctcggattacaggcgtgagccaccgcacctggccaagatttaatttttaagattaaaaaattggatagattaagagttttggggcagaaaagaaaagaagcatgtgatggttgtttgtcaatgaaacttctgagaaacaagaaaggaggactgcctatgattgtatctaaatgctacaacaaatttgactgacaagaggggcttaggagaccccgcacagaagaggttttaatgaaaaggaagtgaaacaccaagctcacataaatttttaataaacttttttgtgtctatgtcatatttcataatgtttttcctaaatgcttaacctaggaaacacatgtgtgcacacccatgccaaacacacaaatgaatttaacagtgtggtttatgaaatgaaagcaataatagtttgactcttcagaacctcttcattgtggcctatgtcaagctctctaatcttttctcctcaatggtaggccatggttaagggacagatgataaagtacaaggttttcaattgctaactgccaaattttcataggttatagtattactcaaaaagttgttttgtctcatttcttcaaattttgaaataacttgctttgctgactcatctgactatatttttaatgaggactggctttattagcacttttagaaaaaaagctctgcactccacactgaaagtcaaatcaaatagatagttaattatttgtagcgtggagtaatgtatgctcagtctctcctcacaacggagccaaaggtcacaaacatttacagaaaacctacttatgtcccaggtactctgctaggtactttcctaacttgtctaaagtcacagcataggctgggtatggtggctcatgcctgtattccagcactttgacaggacgaggcgggcagatcacctgagcccaggagttcgagaccagcctgggcaacatgacaaaaccctacctctacaaaaatacaaaaattagctgggtgtggtggtgtgtgcctgtagtcccagctgctcgggaggctgaggcaggaggatcacttgagcccaggaggtagggtttgcagtgagccgagattgtgccactgcactccagcctgggccacagagcgagaccctgtctcaaaaaaaaaaaaaaaaaaaaagtcacaacagataagtcatagagctgggattcaaattcaggtctgtctgaatatagagtattttctgctacattatcagttactgagggtaattgaaaaatttaacacttatcatggaccaggcactatgttaaaacattatctcattaatctttacaatgatcctatttaaaaatctgtagctgtaaaagaattttatacaacatttatacaaaaatcatcaagattcttcatggcaagttaaaatgtttttaaatagtttgaggtcatcttgatagtcattccactacccatttctcagtctcttcagcaaaatttcctttcacttatagctagctacctgaccatcctacactaaataagcagataatttaatcttccaacttcttgaatttgtgtgttcttttatgtacatatgttggctgactggaacagaaggaggcagggggtatatacgagcaagtatggtttattacggacaaatggtagaaaaatgttactaatatccatagataagttccttaagtcatgtagagagactgttattaaaagtttgctgyatttttctattgaatcaagmactagctaccagttacagtgccttctaaacacacagttagctttgctttatcaataaccaaataataaactaggtcccaatggttttgtccacatctagattgttcaggtgatcaggaactcttttatttgtgtgctttagcttttagttcttggttatatctataaagaaaacagaaagaaaaataatcatcaataataatagayaaatttatggtaaggagagaatgggaagcatactccatttcttctttcttggtggtcaagtagctatacagttgtaaacagaatcttcccggagggcttacaggtagaaacaggcagaaaggaaaggattcaaagagttcatttgcatctggattttgtttcagataataagagcacaactgccaaaaactttttttttttttttttgagatggagtctcactctgtcgcccaggctggagtgtagtggtgtgatctcggctcgctgcaagctctgcctccygggttcacgccattctcctgcctcagccycccgagtagctgggactacaggcgcccgccaccacttctggctaattttttgtatttttagtagagatrgtgtttcaccgtgttagccaggatggtctcgatctcctgaccttgtggtctgcctgcctyggcctcccaaagtgctgggattacaggagtgagccaccatgcccggcctgccaaaaacttttaacagcttagctgacatatagtttcctgtgcaaaagtattattttaataaaaatattctcattctggaattctacaagaacgtgacaaacttgtgaacatatgtataaaatttagtaaaatgtggtcacctagaattttaaaatttatactcgcaaagcacctttcctaagaataagatcaacaggtaaagtaaaatatactaaagtaatcactaaagtaaaatatacttctaaccactaargtaaaatatacttctgtgatgcaggcaggctattgggttaacagcctgtaaacacttaagttcacaaacgctaaggaccatttcctcaattctcaatccaaagaagtaaccacagagccatagtctttccttcccttctaccataccttgggcttcatttactattcctcctagcttataatggaatggagagtagtataaaagcataagaaggaacttattccatgaagccaaccatacctcctaggtttctcaaaagatcctgatttcaaatatttgatcataatgtcattatcataaatcactgacaatattaactactgagtaaatagtttaaaaatttccagtgctcatggaacactttccaatgaaagcaaagacctcactctacgtatcatttccaatactacataacaatacacttaagttccaatttattatatacaattgaaagtgataaaaggtttacataagaaattaataaatcataaactgtatatgttgtcttaataaaagagattatgtgagatggttaaccatctaaatgatgcacagttaaatctaaaaactaggtaacatactgcttaactgattttagtcagttaactagttaactggttaacttatttgtaaacccctagacttttctagaaatgttaaatttctactttagatacttcttgtcttagcattatatatgaatctttwaaaaaaattagtgccatctccagcctgggcaacagagcgagaccccgtctcaaaaaaaaaaaaaattagtgccatctaagtagcttttgcaacagttttaaaaatatctctggtaggcttacctccaaatacgaaaaagctgagaggctcctgctgcccccacaaagaaattaacagcaaacagactccaattttttggaataattacaagtgagtatcttgaccaaataaaccctgttgaaacaaaatgttactttaaaaagaatacatactgcttcaataacttcagtgaatacttmatattgagtaaagtaattacaacaataatgtaggatgagggacaaagaaatgctatactctgaattttcaatgtttctgtaacttagtgtcacagaaaatactcaatycttacatgaaagaggaatctttaaagtgactattaactgtaattttcttcccacttataaaaatatgttcatggcaaaaacctgaaaagcaaaagcccattcagatacttattctttctgtgactcctccatccataacttaataacttcctagacataatactgttaattcctttgtgtgtgggtgtatttcaaacactaagccactaaataaactgatataaaagaaaacaraaatcatttatgttctacaagaaacacagaagatatttatttaatttacctgtagccatcaaaacagcagattgagctgtgctaagtttttctgcaggtctggccatatcagccaatccagcacacaccaacccctacacattaacgcatagaaagaaaaaaagtatcacaaatgtggagtaatagttttaactttaaatcaagcacaagacatttttgagatttccgtaagttagcagctataattttagtgtccattcattaagaaaatgtagattacaacaaaaaaaaagcacaatgaattaaaaaactgctttttgaactaattttattttgttaggtacactaagcagtctcacatatctgaaagtcagtagtacatatatagataagatgtatatgtatgcattacacgtacatatatattttgggttttttttggtctacctatttcacatatgaatttatatactctttatatatgtcaggaaccactaaccactagcatggaagatacctaaaagctgttaaggtcatttgtatagattcttcctttgatgttttctgccaatgttatcatttttaaattaaattaaattttagatttggggtatatgtgcaggtttgttacatgggtatattgtgtgatgctgaggtttgggcttctaatgaattattttttaaaagtataaatatcagaaaaacttataattttagttttttggttagatcatttttttttttttagacagtctcactctgtcacccaggttagagagcaatggtgcgatctaggctcactgcaacctccacctcccagtttcaagcaattctcatgcctcagcccccaagtagctggaattacaggcgtgtgccaatatgcctggctaatttttgtatttttaatagagacggggtttcaccatgttgrccagsctggtctcaaactcctgaccgcaggtgatccgcccgcctcaacctcccaaagtgctgggattacaggtgtgagccaccatgcccggccttggctgttacgccatttttctttaacatcagcatatacatggccatttctcttctgtgtttttaacactgtctctattgcactcatgcgtttttgctcccaccagatgagctgtatttttaccaagtcactatgtttgtccccaatctatttatgccagttttacttgttaatgtaatttacatgatttaataaattgtttttttttaaaaaaactaagctggaaattatataggatgcactgtagtgtaatttatccaggatagaaaatgtggagctcagaaatccatacacaaataaaagatttagctttaaaaaagactgattgtcaatgaatatatatttatatcctttaggttaaaataaaatatttaaggtacataggtttttgtttttaggattatccactttgacctttatgattagttatgtggtttcaactaaagtggttacaaaggactctactacagttatatgtttgaaggcatatggtctgagagtcttcatgttatagaacatatgtggcttgcagaagcaactgttatgtgtcatgtatagaattctacagattaattatcaaatactctgggatagtaaaacacagtaagaggtatataaggtaagtatctaatagaagaagtctccccaccagagaacaaaacacagaagtttctattgctatgctgtcatctggagactatgtatgatttcaacatgtacttaaaatagatgttcttaaagagacagatagtcaagaaggcatttatgagtatataatgctgtcaatatctcacaacagtaatgaaccagttcaaataaaccccaaagctattgataaaatcaataaactcctaaactgtggtaaatttgagatcaaagaggcccctaaatttattgtgaatagatgaaatcactcaaactcttttaatgattgaatacttcagcaatcaattccactataaagatatattattactatgtaattttaagtgtaggtagggagagaagaaggaaatggtaatgtaacttccattagtatagggggttttaggatcttttctcaatatgtagatatgaaaaaaaaaacctgctccctagatctctgtaaaatacagctcccgaatgacttatattctaatcttgtcactttatagttgaagagacaaaatgacaaagagactaaacttgcccaaggccataagattgagtcatagccaattccaactctaacattctcaaccacttgaatttacaactgagtttctgaattgttctaaccattttaaaagtacatttaagagaattacaacagcccatcactcaacaacaacaaaaaacaccttgattaaattaaaaaacaggcaaaggacttgaataaatatttctccaaagaatatacacaactgaccaataagtacaataagtatatgttcagcatgactaatcattagggaagtgcaaataaaaacaaagatatctaacacccattaggtgcctatcataaaaacaaaaacaaaaatgctcccccatcaaaagtaacaagtgttggtgaggatgtggagaaattagaacacttatgaattgctggtagaaatgtaaaataatgtagttgctgaggaaaacaaaaaatattaagcagaattatcatatgatctagcaattcaacttctgggtgtatactaagaagaattaaaagtattgacttaaacagattcttgtacatcaatgttcatggtagcattattcacaacagcaaaaatgtggaagcaaaccaattgtccaatcaacatatagaagaataaacaaaatgtggtaaatacatacaatggaatgctattcagcattaaaaagaaaggaaagtgacacatgtgacaacgttaatgtaccttgtggacattatgctaggggaaataagccaactacaaaaagacaaatacattttgattccatttacatgaggtacttagagtagtgaaattcatagagacagaaggtagaatggtggttgccagggactgggagaaggagaatggggaattatgggtacagagacttgcttttacaagataaaaagggttctggagattggttaacaatgatgtaaatgtacttaacgctactgaactgtacactttgaaaatggttcagatagtaagttttatatgtattttaccacattaaaaaaaaaaaagcctacagaccagtggttttcaaactttagagggcattagagaatcatccgaagaggttatgaaaacagagctcactggactccacatctagagtttcagatttagtaggtctgtgatggggcctaacaagttctcaaatgatgccactgcaggtccagagagatgacactttgagaagcacagttatagacccaaactggccctttcaacataaaatcaatgatttgctacaaacagccaccacaattgtttcttttcagctaagtaagaactttaagaaagaaaactttggggaagagtaaaagcactgggcttggagtcagaagtcctaggttctctcatttaccaaatgctaatatttatattcgaataaatccatctactttttgagagtaactttcctcacctatattttggtgatagtaccttcagttctcatactaaattaataataaaagttaacttgggggttctaactagcttaatgttttacttagtaataacattttagaatgaaatttcatgtccatgtggtgcacaattgtaagttttttgataacaagtatgttcccagaaggcctcttatctaaagagttcagaaaaactaaagtagatagttgctttatgtagaaaacgatatgtctgagaatatttgccatgaaatcatctagaggcataccaagaatactctaaagtatatccttcataaaagttacttcaaattagtaaattcctattaaggaatttgtctttcagtagcttccgtaaaaactcaagacttacccatttcataattggagcccagaaraaaactgttctgggacctgaaaaaaaaaagaaaagaaaaattcaggaataaaccaaatatattatacacgtcttttaacagctgtcaccaaattttaaaaaccaaaggatttatcaacctatttttaaccacttttactatgctttttgcatactttgtatttcagttaacatttagagaggcaccacagtatcacagtacagttgacccttgaataacacaggtttgaactgataggttcaactgtatgcaaatttttttcagtaaatatactgccatataaaaatattttagggaaccttgattctaatgtactttcatactagttttacactcaagtaacactctcatcccaaatgaaaatgaacccagtgataacaccccatttttgtgcattttggctgaattactataacaaatagttgggtaatcttaacattaagcagcaaaatttgaaaaatgtaaaaatggcagttgcttccctccaatttttgcttagtatgcaggttttgaaaagtatcaccagatagygcaaactacttgcctttagccttaagtgatggtaatgctacacattctgtcttccacaatttaacatagtccttgatatttttgtccctctcgaattcacagtattcttacagcaaaattcattaattcaatgtcattttaaaatctaccacagtacattttacatattttactccagttatttgtaaatctatgtacctatcaagattatgactttctcgaagctagtggctcaatactattcatacttgtacccctattacctaatagaatgtagaataataaataaaaaggraagttagccagtagagttggaagcagtttatactaacatttattaccctaatatatatgtatgtgtatatataatatacagatatacatatacacrtatatatatatatatatatatatatatatatayatatacatatacacacacatatatatatacacatacaaacaacgttttttttttttggttttttttttggttttttttgtttttttttgagacagagtctyrctctgttgcccaggctggagtgcrakggcrcaatctcrgctcactgcaacctccacctcccgggttcaagtgattctcttgccttagcctcccaagtagctggkattacaggcrcntgccaccacacccggctaatttttttgtatctttaatagagacagggtttcaccatgttggccaggctggtctcarrctcctgacctsgtgatctgcccgcctcagcctcccaaartgctgggattacaggcgtgagccaccgtgcccggccacaaataacttttaaagtactttaaaatcataagttgtttttatcagcctgatacttaaatattgataagtctgtcttatgcttttaatagttttaaaatatgtttgctgattttctaatttaatcctaaagtcctacagcaatctaagtttcattttctcattcttcagagaagctgggtatcattagaataattcttcaaacactagaaagaagatcacggcacaaaccctgtggttccttgtgggactactcagcccattataatgttaaactttattttctcacatacatctggtatctaaccatttttacattttcttgtgtacgttcgaattttccgtattttaagttgtagaataaatctaaaaacagtgctgaaacagctggtgagagaatttaaactatcaaggagttctaaattttgatgttcttacaactgagtgaaaaacctatctatattcagtttctgttatccagttctctaagcagtattgttctgggcacagccaccacacacatagaactctagccacatctttttctctctacaagatagaaaataatttagtttcttctttggttaaggttggaattgaagacatttttacgaagggaaaaaggggaatataaaagaaaacatgaagccactgagtttcagaatatataatcctaatttaactaaatattagccaagtcagcggttctcaaccaggagtgtccccccaggggcatttttagttgccccaactgtggtgccccaactgctgcagatgctgctgctgctgccgctgctgctgccgtctagtgggtagaggcctgggatgctgttaaacatcctccaatgcgcaggacagccgctcccagaaagtagagggttaagaaatcctggcctagggcgactgataagctaggcaaacattcaactagtttcatgctattttatggctcttcagttcatgctgtcccttctcaatatcctgcttagtctttacctaactcctatccatcagaaactcatctcaggttgcatctcctcaaggaagccttaaaaaacaaacaaaaaaactccaggttaggctaaattgctccttctcttaactaccaaagcagcctgtatattcttctatcattttctgttaaaatgattatttatgcatctgtcacattaacccgaagacaaggtccttttcttaatcttccttgacaaataataggtatgtgccaacagaactgaattggatccaccatgttcaggatagatgctaatcaaagatattcaaactttctgtctgacccagatttgcctcgacactgcttcatcctcaaggctggaatttgctgttttctcatctctagggacatcaggttccctttatgccaaggatatattagatttcactcattagttactctactcttagaccacagctctcttcccctgagtctgatgccataatgcattaatcctataagtcagtcttctcaaactctctggaaatttagggtgagattctgggattcctatcattacacctggttcatttttctttgtcatacacagtgtctctggctcatacacagtatcaattactaagtttagtttttatcctcgcatggagtttcgcttcatcaatcaagagtcagtccatgtattgttttagtctctggctgaatgggtgttcatttttactctgaactcttcagcagacttctcttgttctatttgaaagctgaagtttctgtcaccccaaaattgttttctgagtaaagcctctagattctggtttcaagcttaaatggctgacaggcttaaatggttgatcctttggggttaatagtcgatcttttcagtaggtttgcctggtaactaatttactaaactgcctagagctaggtaatagttttacaatattaacaacagcccttccccaccaaaccaaacaactgaaaaaacttcaaacatcaaattatggttgctagaacctggaccaagagaggtattttagtgagtgaataattttaaactatgaaaacaagctctaattttagtttaacaactgctatgtactaaacagaaaaatagcagtagccaatacataaggccttctaaattgctaatttttctgagatactaaaagatgtggacaagtgacaaaaaaatcagtttaatatctataactgcaaacagtgttttcttaactgttaaaaaaaaaggtcggccgggcgcggtggctcatgcctgtaatcccagcactttgtgaggccgagatgggcggatcacgaggtcagaagatcgagaccatcytggctaacacggtgaaaccctgtctctactaaaaatacaaaaaattagctgcgcgtgstggcaggcggctgtagtcccagctactcgggaggctgaggcaggagaatggcgtgaagccgggaggtggagcttgcagtgagccgagatcgcaccactgcactccagaaaaaaaaaaaaaaaagtcacacaatgggttaacaaaattttaaagaaaacttaaccctttcattgtagctaattaacattcaattaacatttcttagcttttttttcctgtaagagtaaataatatgtcaaataaagctagacaggtaaatttagacatatataaaacagatacagaggctgtcttccagaaaacagcaattgatcaacagtggatatggtagcgaaaaaacattccaacttacttcaacatttctaaacataaagttttgacaaaacaaagcatttagaaataggtatcactcaaatagtgacaatacaatgtcacatgtgtcattctagacctggaaaacacaggcttatgttctgtacaatgacacagctattctcataggagagcataaaaatagataattatgacacgtgaagtgattataataccttaatattagaataagcagawgtataaactaacagatacctggctaacatccattatgataaatgaaataacttgattaggtggaaaatttgaactgctgaaaatatactgaagaaaaatctcctcataagacattaatttatagcccaagatgaaagaaattgtccacatcaaacatactatatattcttttagaaaaagaattaatacattttcatcttgtttctttgaacagtactactggatgttgaagaaggcctccaatgctgacaatttagaaacattaaacaagtatttaaaatgtctatacatttaggccgggcgtggtggctcatgcctgtaatcccagccgtttgggaggcggaggtgggcggatcaccagaggtggggagtttgagactagcctgaccaacatggagaaaccccatctctactaaaaatacaaaattagccgggyrtggtggtgcaygcctgtaatcccagctacttgggaaggttgaggcaggggaatcgctagaacccaggaggcagaggttgcastgagccdaratygcaccattgcactccagcctgggcaataagagcgaaactccgtctcgaaaaaagaaaaaaaaaagtctacacattttaaactatgaactatgttcaagaatgaaaaatactgactataagttattttgtgttttattgccttatttttaaagtgaaactcatgtttttaaattctaacttttcatagaatttgagaaattctacaagtgaatatcataagcaaataataacagacataaattttcaaataaacaaatttagttgccttgaacttcaatgaacctattaataaactgacataaacttacttcctaatttccttatttgagagaaattactgttaataaaatattatatgaatcctacccagaaagtaggccacctatcgtatatatgattccctccctaagtaaagactaactttttggaacagaataggtaatttttactctcaagcacatatacacacttacaaatactggattgaggtattcactatatccctctgtgaaaaataaagtttcttactgaatgctaagaggtcataaaatcactacatttccctacctcttcccatccctttcatgccactcctttatggtttgttactttttaacacccctcttaattccttacattacacaagttcacctgtttgctatcatgtgacaaactagatacaaatccttagaatatgtaaaggttaatctttgacatggatactgacggccaaaaaatcattcatttttatttgtgccaaagctagttctgatttaacactaagaacatgactaagctaccattttagagccatataattttaatattttccacaatgccttggaaatagctatcactaaaatagtacccaaaacatcatgggtagataatgtttttaaaaatgttgactgaaaatacactttggtttgaaattccagagtaaagaacaggtaaagagactaaaatagctaagatgcattgtagggatgatacgttttaaatttacttatttcttcaggtacaaagaatcagttacttttagatttagaaagactgttgaaatcatctactgtaggcactcataaatcaggcaaatgaggcccagtaaacaaattacttgtttaaaataaataatccaacaaggataaaaaactagatccctaaatcctaatctaacaataattatatgactttccccaatgaaatctgagtttcctgaaggttctgaatgtaagaaaagtcctaagagaataccaaattatagattattagctggaaaagactttaaggaaagtccaagctccctcatttttataaatgaaaaagatgaggcacttacaagttaagtaatttgtcttacactcaggagagttctggatagagcaacgactagaacacagtttctttgatcctagtcctctttctactgtaccatacagcactttaaacatatttcattctctgttataagcaaaattaatatttttacatgacctggaaatgataaactatttatagcttagggctttcttctcctttagcacatctgcataaacagttctaatttcttaaagttagtttaaaagcaggatagcacacaaaaaatatgttaagtgttgaacaactgcatcaaggatgataatctgctctgttgcccaggctggattgagtgcagtggcacgatcttggctcactgcaacctccatyttctgggttcaagcaattctcctgcctcancctccagagtagctgggattacaggtgtgcaccaccatgcccagctaaatttcgtatttttagtagagacagggtatcaccatgttggccaggctggtctcgaactcctgatttcaggtgatccacacgcctcggcctcccaaastgctgggattayaggtgtgagctaccgcgcccagctgatattcctttttatgaattcttctgagaatacaaactctgtgtgggtgggtttcgttattttatccactgctttatcctgagtgccagaacagtgtctaatatacaataggccctcaataaatattgaataattcaaccttcttggtagctgattgtttgaagatattctatttttcaccaatattttacaattgtatttgaaattctaatcttacatctattttagttatctcttaactttaaataagttattactttaaaaaataatatatgtatatttagtgtatttaaacttaatatattaaatatacacttaagaatatatatggacatatattaatatcttagactggcattaagattcttcactgacaatctgtggcaacaaaataagttctaacagagatgctaaagaactgtgtaattcaaactatgtaggtacgtacactcattatttgatccatattagattttatttacatataatagaacaatatatatttgcactaagttgtatttaaccatctattgtaacatcaattctcttagcattgaatataaaatttttatgatacagatatttccttataaacactgataacattggttcatttagtttatttttatttaaaaagaaatatcctctaggtctttaaaattaaacaagctaattatctaggaaaaatgcaaatattattcttatttagactttaaagtaacttttcccatgagtcttcagagggaacccatgtaatgttaagaatgatattctcagcaccagcacattaagcactgcaacaagtttcacagaactattttttcaaaagctcttccatgtaagccaaaatgtaattcagtaaaaggagagctataatgcgttaaaatgatatggttcagatagctgtttttgggactaacttcaccaaaggatagtttttagactctttagagctgtggtcttccagctcctcttgaacatatgccctatcagtaaaaaacaatttgagtatacatcctgtttataaatcatttatatatttataaattatatagaattactgcaataatatatttttgtattacagaatgtatacacaatgaaaaatttaagtggatgaaataacagtaaacgttactggaagttctataattttcttcctacattccagtgtttcattgtgtgcaccccttgggatgacttaccccattttggaactcacaaatacaaataaatgacactcctccactgataatttttttgttttccttaactaagcttttaagaaaacattgggccgggtgtggttgctcacacctgtaatcccagcactttgggaggccaaggcaggygkatcrcctgaggtcaggartttgagaccagcctggcmaacatggggaaaccccatctctactaaaaacacaaaaattagctgagcatggtggcrcatgcctrtaatcccagctactcrggaggctgaggcaggagaatcrcttgaacccaggaggccaaggttgcagtgagcccagatcacaccactgcactccaacctagggaacagagcaagactctgtctcaaaaaaaaaaaaaarraaagaaaagaaaagaaaagaaaaaataacactgggcaacataacttcaagattatttctttgacaaacactggagtacagctatgcaactggctagggtggagtcacatatttttatagtcaggtgggggataatgcggggactgacatccttttttgtgagttgaggaacttgaccaggacacacatttggctagaactctattccttctctacagtggcagatcatgacatgccagcaaaaacacataggcaaatggataatgagagcctcaaaattctggctcacaggtcagagatgcaatactgtaactaaaatatgtatctatacataaaaacacattagtttttttttttttttttgagacagaacctcgctctgttgccaggctggagtgcaatggcaygatctyggctaactgcaacctccacctcctggtttcaagtgattctcccgcctcagcctcccaagtagctgagattactggcacccgccactacacccggctaatttttgtattttagtagagatagggtttcatcatgttggtcaggctggtytcaaactcctgacctcaggtgatccacccacctcagcctcccaaagtgctgggattacaggtgtgagccaccgtgcctggctaaaaacacattcttgttacctgtcragacatacagtgtcagtgataaaattaaatctcaaaaatctagaatcagcaatgtatgatttccaactgttaatattgtagcatttcatatcatttaataaactccttgtaggtgaatctagaaaaatgtttcaatgacaattcaataacaaatactgttaggcaaaatagtatgcaaaatccttgaatattcactctggataaactcttaagacaataatcagtgtttccttagattttattcaatactcatcagtcaacgtatttttcaagctcctccatttctacactggtgtgcctccaacttgtcgatcataaataattctgctgtaatagatatccttactctktatgttgctcaaattttagaactgacagttattgagagtctaagtgcaaacgctgtgctacatgttttagagacattagatcatctgattttcacaacaatcctgaaatgattacaattactcccattttatagatgagataactaaggcaggaatttagggtcaaggtcacacagccaagactgaaacgtaggtctatttcccttcaaagcctagctccttttactacactgaaaaagggggttaaaataactgaacgaatccaaggattttcaggtgaaatgcacatcctgcaagtgaaaggtaatccctcttcattctgaaagctgagtagtattttaagcagtaattacaggtggctaaaaactaaaggcttggaaaggatcaaggtaagactaccctccaattttgtattattttaagtagtttaaaattactcttactctgtcatgcccttatcctacagctaaaacacaaagcttatgaaggtcagggttgacttcacattcagttgactctgtaaagcccagattattacaaaaagcatagctcaaccctccttcccgaaaatctttgccacaaaacacagcataattccaaaaaaattgaatgttaaaagaactaaaaggcaaataaacaaaaactttttaaatcagtaacaaactgtccttaatgatcagttttataatgggttcaatgttgcagtaaataatattaagggttagagtataatccagatgttcaattcattccattatcaaactggaaatcagatttagtaaccagttcagactccagagagctggttcataatcagataatgggggaactagacaactttcctaatgataccaactacagaatacagattttaactatgtaggagaataaaagccacttttcgggtagcacttcagtctttcaatttacaacacattttctagtttgccaagtcttaggcttgaaacagacctcagaatatatctgatgttagcccctagcaaataagtattattacaactcactttatagaagaggtaacagaattctagatctttaataaagggattggaatctttcagtttcttacagttttttttttcaaccacaagaacacagttttccagtaggcaaagagagatgtaacgtttactgagcatttacaaagagtcaagcacatatgttatctgtcattctcatagaccgcgtattacacaaacagagatctaggcttttgctcaaggtcacaactataagtggtagaagagaatgatatccaggtctgtccacacaaaaagctctgggtagagcttgttcaacaatttcataaataaggatagacttaaaaaaacacactggacctatgggatgagaaatgacactgactcaagcctggatgaagtaaagcatgcagtttgggggagggctcagtctgcaggcctctgccagcagcagctgaagaaagtgacctttactccaaaccctacagtgcgacaaaccacccatccagctctgcctagagtgggtatgccacaattcgaaaagagaaagagaatgagtgtttcatggtggccccagacagtttggtggccgcagaagttgagaaggctcaaatctggagatcaggtttgggttggagtcgtgcgtaagggagcggatgtcacataggtggggaagggagctgacttgagatacgttggcttaggaagagatgttgcaggagagagggtgaaatgcacaggctaggagagtagacggcttcacttgaagggaagggattggggctgtggatgcctctagaggcagtygtcagagggcctctaaaaggtccattttagaggaagcgagaaggaaggtctcgataaggagccattcagggtccattacctgctggatggttgtacaacggcctcaatttctcgggcagcatcagctccactttatcgaggagccggtggtaggtggcccgcaggcctcgggcaccggcggccgacatcgccgccgagggatcgttggcagccgggtgggagcgtggctgtgttctcgtccctggctgacaacgaaggggagctagtcacttttcctgccacgacgactcgcgtccgcctctcgcctggagtacccttcccgcggctttccctgcccgctgtgaaccgaaaagctgcggcccgcgccccgcgaaggttgagggggcggaggctgccgactgccagcccccggtccgcctccggcccccggcaggagagagggaggagccatggcaacaggtgccaaaataatcacctcaccaagtctgcgctgcgccctgctggcagcgcgcttgcgcargccgagctgcccgccatgattggcccgccccgaggcgcgggcggggtcgagcggaaacctcctccttctccccatgccctcgaggccatgttggagaagggaaagtgaagctgcgctggttctactgccctttcactttgattaagcaggcccgtagttaaaatgggtttttgggccttcagtgcctaaagatgatgccgcacaattctcttgcttcttttcactggagactcgtgagcgagagactacagaattgagtagcttctctctctactcgtcttttatccctagcgacttaaggatctggttagagtggcccgaatgcattcttccagggtgagggcagccgcagcacacaccagcctcagtccccrgggtggtcgtcatctcgcgagaaagggttggcggggagggtatccaggacgaggagagggaggagtcgccatcgcctccgcctccgcctcctcctgttggaggggggctgagggaggagactgttgctgatctttggatgttctggttagtctaagaaggagagtatgaggcgagctccggcccgggtgcggccgggcttcrggggcccaggcgccgctgctgccaccgccatctaacgctgcgccctggaggyccggcgcgcggatggtgccggtgcggctcgggtgttgaaacgggtgtcccctccccctcctcccctcccccacgcggtggtctcccctcccacccggctcaggcagagccatgtctcggggtggctcctacccacacctgttgtgggacgtgaggaaaaggtccctcgggctggaggacccgtcccggctgcggagtcgmtacctgggtgagcgggggccccggggcggaggcgctgaggtcgccgcctagagtgggggagggggcacgctgccgggtctgttggaggtgggacggcgtctcggtgggggcgcccggagactctggggtgttgggtggggccttggttgccgaattccgtgccggtgcctcccccagtcaagccccctgtgcatgctgccagccgccgcccttgctgggtttttctcggagggccgggccgtgggcagaaggtactggcttgtaaaggtgttggggtcgctgatgggttgggactcgggagacttgcggaacctccaggagctgccgcgtttagagcaaaagttagctcttttgctcttttccagcgcgctttccccgctcagccgaagaacctaagttgttgcccaccctctccttcaatctccagagggtttaggtgtcggctgcgacgcgttgaccaccctcagggacttcacgctccagacagaatccgtgtaaactgtttttgcggcgctgagccaaaacctaaaagtgatagctgagctctccccacccccgcgcgctctcccagttccactctgctcttcagttcgttttgaccgcttaaaggtggtgtagggtttcacgttcctcttcccacccctggaaaacacacttggcatttacagtttcgtagttaagctttctaaaaacaaccttcagtacttgggggaacagtattccacttttttcgttttgcataacattttttttttgaggattctaggtcacgcccgagtcaactaaaaagtttggtttcttaaaaatggacgtacttagtaaaggtcttttttgtttcttcctgtatactcttcattactctttctttctatttggagatacggcaaacaacatcataaaatttttttctttccagttttgccacttgctagttaaaaagtgtttgttgctctcatttgtttttgatttcaagtaaagagaagaaaatgaaatctcattacaaccaacagttctggtttgtaaattatttaagaaaagttagcatgcaattttttaattctttttagtgtctcaagtaaaatacgaatacattttgtttataaaaactcaataaaaatgaagcaaaaatccctttgatccctcccattcaatttcactccgccacccttagaaataatattttctgttttctgaatattcttccagacctttttgtttgcattcttacaagtacatatgtacatgtacaaatgctggggtgtgtgtgtgtttgtgtgtgtatgagagagacacctgagtgcatggtgtcatattgtaaacattgttttcacttctccacattttggagatctttccatggcagtaaaaatagattgattctgtcttttaaattattacatagtaggtaacattatgaagtaccatagggtactcaacctttcttctttaagtagacgttcgcccttacagcattttaatgaacatcattctacaagcttctgtgcatttgttgtaggataagtacctagagtggtgattaatcattttaaaattgaacatagctggagtctggtttttaaaactatttaccaaaaaaagtgtgcagtatttcttttagaatttatttgcggagaaagaacttaattttagcttaataaaacaaacgttaacattgttttgcatggatacatttataatttggtcctttatctcagttggacagtttaagtacttgtatatagttctatattttagtgttttcttttggttcagttacttcagctatatctacaaacgagttaattaaaatataacaaaaccatatacctgcttttccccctcctactccaactccctaatggaaatggaatttgtgtattgggtctaggggaattgaagggttcactgactatattagaaagcctgaattacagtttttcaaatgtgtatgtatacatacagggagttctttatcttaaataatattttagatatgataatatatactcttaaaataggacatttttggaatgacttcctttaaaagtggttttctaagtacttgaaaatactttttgaaagtatcgaaacttgaaaatgtttgcaaagaactaatttattggcctttacccttagtagacctttacactgttattcagctcttctatactacagtgctaatcctggctttgcattcaggaagcagcaaaatccacattggtaatgtttgaattagtgatggttttttttaaaaaatgactttccctcccagttttattggggtataattgacaattaaaaattgttatatttaaggtgtaggacttgataacttcatatacaatcaagttaattaacatatccatcatgtcacataattaccatctttttttgtgtgtggcgataaaatgactttatcattattattaattttatttttattattagataaaatgactttttaaagtacagtactcttggccgggcgcggtggcttacgcctggaatcccagcactttgggaggccaaggtgggtgatcacttgaggtcaggagtttgagaccggcctggccaacatggtgaaaccctggtctttactaaaaatacaaaaattagccgggagtggtggcgtacgcctgtagtctcagctccttgggaggctgaggcaggagaatagcttgaacttgggaagtggaggttgcagtgagccaagattgtgccactgcactccagcctgggcgacagagggaaactctgcgtcataaataaataaataaataaataaagtatggtacacttataaagccttccttttaaaagtcaaattccaagttaggattttcctaaggaaatagattccttttttaaaagacttcaatatttaaacattacgattgtctatctacagggttgtagatttaagtatttttctgatacattttcattatttgtatttctacagattttttagcagtgaattactgctaaatagtaaaattgggatagaacaaatagataaatttttcttgtagcctttacatttccagttatttcaccatagcatgtgccctttcaatgttaatattcaagctttgtaattgattttacttaaactgattaattatctcctttcttcccatcaaagaaaattatacttcagaaaacttcctattatgttgtgggaatgaagatgaataatttcccagatgttatttatgattaaaagatatgtttacttagagctcccaaatccacaagattcacctgggccaacagagtgttgttttagactagcatggatttagaggataggccagggattttaatctttgtgagccctatctaaatttcaatgtaggattcttttttttggtgggaggcggggggcagggtgaggcagggttttgctctgtctcccaggctggtgtgcagtggcaccctcatggctcactgcagcctccacgtcctgggctcaaggccatcctcccacctcagcctcctggaatttttttttttttttaaagaataattatcaaagtcagagatacctgtaggtttaaatgtttaaatgtaatagtttctcaaattactgtatactaggtgtagagtagtgcttttggaaatcagtgatttattagccacacagattttattatcccatatatatacggttttgtaaagataaacattgttaataaaataaacttatttcaatacattgcttgtttctactcatatttctttccttttggacagacactcctacaactttctaacccttctaaattaaaagatagtaattgataaaaaagtaattttaaggtacttctcaagggagttatttattataatgtataaaatgtgtaaattatgattaggcagccagtgacaattttttagtggagattgaatctcatctttttgtaaggagtttatgaagtcagtgtcctttgaatatcattagagtcagtatgtactgaaatggataattttgcgtgtcgattactctttagtgcatcttgaatacatctgcattctagattaccaggttcttcataatatgttgccaagttacagtgtatttattatatgaagattagtaacttctgacttttgcctctttttttagccattggggaaaagttagtgaaatatttgtattttgtttctttagtcttgaaatttcagtgaaagctgaaaaatgtatgattttagtattgaaaaatgacggtcaattgtgacaaacgtaagatatactgataattccttaaggcaggacaccaaaggcatataagtaatcataacaaccatagacactatgatagctctactgtgggtttcattgcttcctaaaataggatgaatcaagttataagtgcttagaaggtttagaagcttctggtagcatggagcttatgttacaagtatgctttaggtcagtgtttttaaaatgttttaaaaatgatccatgataaaagtacatttatgtggcaacctgtgatatacacaacgaaaataaaggattctctaggtgtatatataaaccttactagatgggatgcattctgttttttttcatattgttacaactgttggtgttgaactggtagagtacgcactaatgagtctcagcttgaggtttggaaaattgttctagatggtgtgtagttcttgtaatttaatgttgcttcaggtttaaggtgggcaggcttccccaagtacttgaaggagattaaaaaaatttttttttaaacactgctgatggctccacagggaaaatgtaaatagtgaaacttcatgtacatcttggacaaaataactagggtcgaacacttttaaatagatatctattgtgggattgctgacttgtatggtaagtatgtttaactttataaaaaacttccagactgtcttccaaagtaattctaccatactgcattcccaccagcagtatatgagagttccaattgctccacattctcatcagcatttggtgtagtgagtcttcctaattgtagccttcatggtaggcgtgtagaaatatatcattgttttaatttgcatttctctttttttgtttttgagacggagtttcgctcttgtcgcccaggctggagtgcaatggcatgatcttggcttaccgcaacctctgcctgctgggttcaagagattctcctgcctcagcctgccaagtagctgggatatgggcatgcgccaccatgcccagctaatgttgtatttttagtagacatggggttttgccatgttggtcaggctggtctcgaactcctgacctcaggtgattgacctgcttcggcctcccaaagtgctgggattacaagcatgagccgctgcgcctggcctttaatttgcatttctctagtggttaatgatgttgagtatcttttgtggcttttgtttttgtcatccatatagtctggttaaatgttcaggtttacctttttaatattgtaagaattctataattctttatataacagtccttaatcagatatgtactttacaaatattttctgtcagtttatgtctttttcttaacaggttcttttatagttcatactttttatgtcctatctaagaatctttacctaatccaaggtaacaaagatttttactttttttttcctggagattttatctttttacctcttacatttaggtctgtgaacaatttcgagttaagttttacatatgttgtaagagtcaagtttcatttctttgcatattaatgtgcaattgatctaacagtgtgtggaaagactacttttttccctttgttgaaaatcaattgaccataaatgtttaagtcaatttcctagccacattccattgatctagcttcatgtctttataccgaggattgaaatcagctagtgtgatactttaaacttggtcttttttttgagacagagtcttgctctgtcacccaggctggagtgcagtggctcgatcttggctcactacaagctccgcctcctgggttcacaccattctcctgcctcagcctcccgagtagctgggactacaggcacccgc

SEQ ID NO: 97254 - DNA, 12525 bp, Homo sapiens
ttctttgtgcattactgaagttaactttaggatgctaaatgtaatcctcatggtaaccataaggaaaatagctatagaatatatacaaaagaaaatggggaaagaacttaaatgttccactatgaaaaattaaatgcaaaataagacactagttcaggaaatgaggaatgaaaaagctgtaaggcatattgaaaacaaatagcaaaatgatacacacaagtccctctttatcagtaattactttaaattgaattaaactctcaacaaaaaaacaagttggcagaatggattttttaaaaacatgatctaattacatactaaaagagactcactttagatccaaagacacaaataaatggaaagtgaagatagaaaaagatactttatacaaatagtaacccaaagagaataaaggtggctatactaatgtcagacaaaataaactttaaatcagaaagaaacttacaagaggcaaagaataatatattaataaaaatttaaatacagcaaaatatatataacaattataaacatttgttttataattatatttttaaaataaaaatataacaattataaacatttatgcatctaataagatcgtcaatatatatgaagcaaaaactgacaaaattaaaggtagaaatagacagttctataatagtagttggagacttcactaacagtcaataatggatagaacaattatacaaaagataagacacagaggacttagacaacacaataaaccaactaaatataacaaacatacacttaatgggtatagagttgttgtttgacaagatgaagagagttatggagatggagggcagacatggatacacaacattagaaatgtatttcataccactgaactgcatacttaaacatgattaaaatgttaagttttatgctatgtgtatttggatcacaataaaaaaaaattaggccacacgtgggctcatgcctgtaatcccagcactttgggaggccgaggtggtcggatcacctgaggtcaggagttcaggaccagcctggccaacatggtgaaaccccatctctacaaaaatacaaaaattagccaggcatgatggcgggtgcctgtaatcccagctactcgggaggctgaggcacgagaatcacttgaacctaggagacggaggttgcagtgagccgagatcacgccattgcactccagcctgggcgacagagtgagactctgtctccaacaacaacaacaacaaaaattagacaaaaaaaaaccccaaacaccttcaggtgagcccccacagttttgtgtgttttacctccagaagctcaaccaggatctctcagtaaatattggaggaaaaaaaatctctcattctttcagcagaggaagaggaaaaggaaccattttgaaatatgccagagtactccgtttttctaaacaaggtgtgccctcaggagaaactatgtaaccagagcctaacctccaggggttttactagagtctaactgatcttggggaagaggaatacccaactaaacccagttctagccattatgtcccacctaaggaagaggggactgaaaagcacttgtgaagttcttagtccagaggaataggctcactaaaagactgagacctaatcataggactgtagaatgctttccctctcctcacaccttaccatcacattactaaagacttatttagacaaagtctttttacctgatacatcatatctggctatcaagaaaaattacaaggcatactaaaaggcaaaaacatagtttgaaaacacaagtcagaagcagacatgacagggatgttgaaattatcagactgggaatttaaaataactatgattaatatgctaaaagctctaatgaataaagtagagagcatgtaagagcaatataagcagagagatggaaatcctaagaacaaaaaataaatgctagagatcaaaaacactgtgagagaaatgaagaatgcctttgacaggcttattagtagacaggaccccgctgaggaaagaatctctgagttcaagagcatatcaatagaaacctacaaaactgacaagctaagagagcaaagactagaaaagaaaaaccataacagaatatccaaggattgcgggataagtacaaaaggtatactagatgcataatagaaatatcagaaggagaagaaagaggaaagtaacatcagaaatacttgaagcaagaaagactgaaatgttttccaaattaaggtcaaacaccaaaccacagatccaggaagctcgcagaacaccatgtaggatatatgccccaaaaccccaacacataggcatataatttgtaaactacagaaaatcaaagataaaaaattttaggtcaggcacggtggttcacacctgtaatcccagcactttgggaggcagaggtgggcaggtcacttgaggtcaggagttcaagaccagactggccaacatggtgaaaccctgtctttactaaaaatacaaaaattagtcaggcatgttggcgggcacctgtaatcccagctactcaggagtctgtggcaggagaattgcttgaacccaggaggtggaggttgcagtgagtcaagatcacgccactgcactccagcctgggtgacagagtgagactccatttcaaaaaaaagagaaaaacaaaaagttttaaagaagcccaagggacttctataaaggaacaacaacaaaaaaagaattgcctttcacttttcctcagaaaccatgcaagcaagaagacagtgccatgacctgttgacaggaaaaaaatccctagaattctttacccagtgaaattatccttcaaaattgaagacaaaataaagacttctcaaactaaaattgaaggaagttgttgctaatagctctgacttgcaagaaatgttaaagaaattctttagagagaaggaaaatatgtagttcagaaacttagatctacataaagaaagaaagcattgaagaaggagtaagtggaggtaaaataaaaattttccttttcttattctaaaagatgacagtttgttcaaaataacagcaacaatgtgttcaattattcaattatgtctacttatgtaaatacatctcctaagcagagatcccagaccagaccacccaggctttggacccgccaaactgtgagttaagaagtggtgttgttttggccttggcatggtggcttacacctgtaatcccagcactttggaaggctgaggtgggtggatcacttgaggtcaagagttcaagaccagcctggctaatgtggtgaaatccccatctctactaaaaatacaaaaattagccaggcatggtggcacgtgcctgtaatcccagctacttgggaggctgaggtacgagaattgtttgaacccgggaggcggaggttgcagtgagtcgagattgcgccactgcactccagcctgggtgacaaagggaggctctgttaagaagtgggtgttgttttaagctgtttactttgtggtaatgagtgacagagcaatagaaaactagtacacctgtgctcagtgtttacaagaacaaggcaaacgtgtcaacccaacaccagagatttagccctttattctcttgggggcttgcccatgccaggttgtaaactcttggaggtgtttaatttgctcactcttgcgccccagcactcttgtattaatatgcttaatacatatttgaattttttaaattgtcgtgtggaatgatttgtctaccaggatgctttatcacagcaatagcaataaaatcatacagaaaagttctatccaataataattaggccatacaatcatatatctgtaagataaagtaccatgcttccttttaaatcgtgatgtgaaaaacaatttaatgacaggaaattattcgtaatatatttaatagcaaattacaaaatagagaaatgtgcatgcacacacacagaaaaatacttgaaaagtgggatctcaatatacaaaaagtacttatctctgagtagtaaggttatgggcaatttatattttctttcttactttggggaagtgccttcaaaaacttctattataaaaatatatgaattctataatgagaaaataattagcacaggaagtagacagagatccatttaaggcatattttatactggaaactggagaataggcctcaccttgagtagctcctccccactggcttgggcattctctgactgttctttgatttgtttttgaaggtgaagaacttgcccctccatgtacctagatattccgtcatagtaagtaagtgtcatggttcttcttggcaaaagatttttagctctattggaaaatttgtaaaagttgtcccattcctgaagtctggcatacctgcattaccacaagagaataagaaaaatcagtatcacccattaggaataggctggctttctgaaatgtctctctggatgtgcagcttcctttacctgggtctctggaagtgtgtagtctcctgcctacccctgcttcacactccctaaaaaagcaggaaattatgtgatacagagcaaggaaataataaatttttttgatgacttgagatgaatagaatccttggaaacactcaggtaatattagccaccattgaactctttggctttggctttttttctttttttgagacgaagtcttgctcttgtcccccagtctggagtgcaatggcacaatcttggcttactgcaacctctgcctcctgggttcaagtgattctcctgcctcagcctcccgagtagctgggactacaggtgtgtaccaccacgcccagctaattttttgtattttaagtagatacggggtttcaccatgttggctaggctggtctcgaactcctgacctcaggtgatccacccgccttggcctcccaaagtgctgggattacaggctgtgccaccatgcccggccactttggctttttaaattaaaaagtgagggagatcagacacttggagctgtggattctggggcttgaagaaattgttccaataccaaagagagatgatttaggccagtactgctcaaaatgtagtccacagactggcatcatcagtatcacctggattctcattaatgcaggttctctggttcagtccaggtctactgaatcagacaggctctgggggtgtggcatctctgagttaacaagctctccaggtgattttttttttaacccttcaaagtaattaaaaataagacatttattccaacaattcttacattgcatgaaatacctctttaatattctacctgcatttggaactaccttcagagtatatggtacaatcctttgaatattttctgtgtagaaaatccgatttttttttttttttttttttagatggagtttcacccttgttgaccaggctggagtacaatggcacgatctcagcccactgcaacctctgcttccctggttgaagcaattctcctgcctcgctgggattacaggcgcctgccatcacgcctgcctaattttttatatttttagtagagacacggtttcaccatattggccaggctggtctcgaactcctgacctcaggtgatccacccacctcagcctcccaaagtgctgcgattacaggcgtgagccactgctcctggcctgcttatgatttttttattttttatttttttttattttttgagacccaagttttgctcttgttgcccaggctggagtgcaatggcgcgatcttggctcaccgcaaccttcgcctcctgggttcaagcaattctcctgcctcagcctcccaggtagctgggtttacaggcatgcgccaccatgcctggctaatttttttgtatttttagtagagatggggtttctccatgttggtcaggctggtcttgaactcccgacctcaggtgatctgccggcctcggcctcccaaagtgctgggattacaggtgtcagccaccgcgcccggcatgattttctaatagccaaatatttaaagccaaatcggatcaacagtaggcaaaacatcttctccaggccatcaacttcatcttcatctgtgctgtattcttccattgttttgccactaacaaagtggatgactctccttgggactttcttcttttttcctatgactcccagttctacgtttcaaagcctctttcgttactcatccttgagataaaatttggctatggttgtcctgacatcaacgtttccttttggaccatgactcagctttttggatcccttaatttcctgccccgcagattccccgaatgccgcggcggccgcagctcccgaggctgcgacggcttctcctcgttccacagggcccactggstcctggtccatcgtcgtcgccaccacagggctgctgrcgccgcagcgccggccgcctagccaagtctctgggaaggggactagccggccttgaggggcggggccggccagaggggcggggccagcccgcgcctcgcctagcccgcctggctcagcaccccgagagctggccgactgccctccaggtgatttttatgcccactaaagtctgagcagcattggcctaggacacagctgtttaaaaaattctcctgctgagatagacaagaaaaataaatttggatgatttctggactttagattccttaacctttaactcacattggtaagttatttgattttgaactttaattggcaagagtaatcaatttttggattttaatttctcctcattaattttaataataagaggggatttcttgccaggtgcagtggctcatgcctgtaatcccagcatttgggaaggctgaggtagacgggacctgagcccaggagttggagaccagcctgggcaacatcacgacatcccatctctacaaaagattaaaattagccaggcgtggtggtatgtgcctgcaactccagctactcaggaagctgaggtgtttgggaggatcacttgagcctgggaaggcgaggctgcagtgatccgcgatcgcaccacgggactccaacctgggtgacacagcaagactgtctcagaaagaaggaaggggtggatttctattccaatttggagctgttctaacttgtagcattttatataggaatgtcttcatattgtcatttagtctcatcacaaacctctgatagaccatacggttgcatataattaagataggaaataaaataatagggggcgattttcagtcttggggatagtcatggaaataatttaatgaatgttctgttctgacccattttagaaccttagcattcatctccttccttaagggtatgaccataatagctacatgcttaactgagttaaaaacgtagtaggttaaaggaattgagccttaggcttaatgagttaatggggtgcggggagaatgctgcttcctcactcctgaaatttccttccatgtaaggggcctctatttggtgcaaagcaccagaactctttccccgctttacttgccccttcaatgataaggagagatcttgctggtgatttgggagatgaattgggcaagtataactcagtccgtgtctctctctatcttgagagccagtgaagccaacagggagtgtgatactgatctctctgctacaagaggcctgcctccatgtgagtagacctacagttttccagaactgcctgctgctgaatgggttaagtctaattccagtgctcaatattacgaagcccgctttcgtgaagatataagccatgtcttccaacattggctttgtcaatccatgtgattagatatgggcaggtgccgggtgggcaagtggtgctattcattagtcttcctcaaaccccagcacccctctgaagaaagcaatcttttcttatttatccctgtatcaccacaacatgatatgtttgcgataaatgtttattgcatggatgtaattgagataaatttacttttctgtccttggccaagggggatgaactagttgatccctaacatgtctctctgtgtaaatatcctctgacacccttaagctgtctcaggtataaattatgaatactttctaaaagatttttcaagaactcttccttgggattcaacattttcactttgggaatttagtgatatgccacacattgttaccagatagctacagaggaataaagtcccaggaggagtccactgtggaacttgaggattctgttgttttcgtattggtgtatgaattccaaacattcttcaaatgttctataaacaaaacctaagagagagaggaatgggtgagagttattagtaggtgtgggtgatcatctttctagcctagtcactctcagttgaatttcccactgcagggagagttgcctctgattattgtatgaatccagagggtcccgtggattgcaacaacctcatgactggattgccctgtgtttgctgagtcctacctattggggagtgttatggatatatactacagttccacagtaccgaccaggcaggtgtggggtttaaactaatccttcctggccttagtgcagcctaggacttctctgtctctccacacatgcttcctttgttgatggcaatgtctgcatcccctttcaagatcacatgtggggaaaacaattcaggttggttcctgtggtttagtgtgtacacttcaagtgacctacttggtgtcacttgaaggttatcaggaagtaacttattttccaaatcaccaatagctaccagcctggaactctcacctcaagcaatctagtccttcattctaaagcgtgaagtctctaagtacatcctgctaaaagttaaaaacccctggtaaaaggcacatagtaagacagtcagccactatcacttaggtgcaaattgatctgacagtttaactggcagctcatatccatcaggttccttcagacttaattctccttcttgccgtgcctttacaatctcggcaccttctagacagtgcttcagctcacacaaccagcctctctccatccctgccctgtaagtccaccagccagaaacctagtggtcccaaagccccaacctgagagctgccacaccacaccagcacaggtatcaacacccccaagttcttttacatcccaaacccacacttaccagaataaagcaggatgtccaagcagacaaaatagaaaaatgccttgctgaagatgtgttcctgtgttacagaaagctcccacagccgccccagcacctggatcaattgcgggtatctatggaaaagaaaaggtagtggccattaaaaagtggtggatattgtaatcccagcactttgggaggctgaggtgggtggatcacgaggtcaggagttcgagaccagcctggccaacatggtgaaaccccatctccactaaaaatacaaaaattagctgggcatggtggcgggcgcctgtaatcccagctacttgggaggctgaggcaggagaatcgcttgaaaccagaaggcggaggttgtggtgagccaataatgcaccactgcactccagcctgggcaaaagagcgaaactccatctcaaaaaaaaaaaaaaaaaaaagcagtggatataatggactttggggcctcggaggggaggggaggagggaagtgaggaataaaagactacatgttgggtatgtgtacactgctcgggtgacaggtgcactaaaatctcagaattcacctctataaaattcatctatgtgaccgaaaaccatttatacccccaaagctattgaataaaaaaagcagtggataggatgaggttcagtaaagtcccttcctggtctagtcttggtccttctcagtaattcggaaccaaatatacctcttaaacagatttcaaacacacccctatccaggactaaaacctcaatctcaaattggctcttttttcaaattgttctttcctgggtcctctatatcagggtgaccagagtcagagcaaattggccttgacctctagtcctggttgctattctctggccatttgcctccctggaagacttttccctttgtctccacctgacagaagtggaggcctgattcccacagctgggatgactgtctgactaccctctgatcactggccagagcaaccagattagagatgatgcatggcaaagaattctgtttaaaataaaaaagacaaggcctggcgcagtggctcatgcctgtaatcccaacactttgggaggctgaggtgggtgggtcacttgaggtcaggagttcaagaccagcctggccaacagggtgaaaccccctctcttctaaaaaatacaaaaattagctgggtgtggtggcacgttgcctgtaatcccagctacgtgggaggttgaggcaggagaattgcctaaacccggaaggcagaggttgcagtgagccaagattgcactactgcactccagcctgggagacagagcaagactctgtctgaaaaaagaaaaaagggtgactactatcagttacattttcttactgcaaactctactcccttccccaccctaggactaggctaaagttgaacccagaatactcaataatacggcctcctccccctaattttggaaaatgctttaagataaatacctgctgttcagaaggagacatctgctaagtctgcagagggactgataatgtcggttgggattctggagcagtgcccacatctgaagggctcgggagcctgggaagaaaacaattccagtatattgtggggcattccttgtatcctcatgtcccatcttgcccagccagcccttacctaactcaatggccaaatccaggtgtcccattatgagcttgttgaagaccagtgtctcagccacgtatgccacgatttcaatgccctcgcctttcagggggaggttgaagatgtgctccatggccatgacttcatatttgaaccacacacctttgtagccagccaggtggtggtatagcgaatagtctaggtaagccttaatgatctgaaatggcagagtggaggaagagtgaggcagaacgcaaagcagaaagctcaggaacatcactcaatgtctgccagtaaatgtttgtttattaagtttgggaatagagctggacatttggccgaagccatgggcttagaaatagaaatcaaattgggtttctgctacctgtttactgagtcattcaggataagcttgatggccccttgcccatgtagtccttaaatgaaatataaaaattttaatttctgtgaaaaataaaagcaatagcttacatattagatgtataattgcagagcaaaaaggctgcaaagatacactccaaagtgtaaacagtagttatatatttgttgggggtgggaggagagattttactttatgcacctctgtgatgtttgttataacaagcatgtataatttttgtaatttaacaaaaaagaaagaaaggttggttttgtttgtttggctttttttttttttttaaataaggactagttttaaacctaatttggaggtcaggtgcagtggctcacatctataatcccagcacttctggaggccgaggcaggaggattgcttgagctcaggagttccagatgagcctgggcacaatagtgagaccctgtttcaacaacaacaaaaactagccaggcatggtggcatatgcctgtagtcctacctactcaggaggctgagacgagaggtcacttgagcacaggagtttgagcccagcctgggcaatatagtgagacctgatctctacaaaagattttaaaaaaaagtagccagcatgatgacacaagcctgtaatcctagctactcaggaagctgaggtgtttgggaggatcacttgagcaggggaggttgaggctgcagtgagccatgatcacgccactgcactccagcctgggtgactgagtgagacccttctcaaaaacgaacaaacaaataaatctaatttgcagatttaagagaaactggttactctaaacaactctttaaaaagataaagttgcttcagagtatacatgcttagagaatagtgaggagaaaagggttccttctaaagaagcagttttattatatatacaaaaacaaaataatacatgtaaactactttgaaaaatacaaacaggaaaaataaagtatctctagtggtgggagtattggggtcggggaagtgttttagagtagaggcttttttcttggaattcctcagatgggacaaaataagcagcctacaaattctgtgttataggcaggtccctggatacttaaaccacatcagtcttagagaattcctttctttctggtttggaacatgttccagataatgctaccagaaggtaaggatagccagaaatggtggtgggggaagagagaagtgttgggcacgagaaatccaaggctgtaataaagcctaggacctcttggatttggaccaagagaatggaggtccaactgcttcactttacagagaaaatataaagctccttgtttatgcggcttttcagtggtcacactgcagataggcggagtcctggaaaccaccctctggctctcagtct

SEQ ID NO: 97255 - DNA, 243145 bp, Homo sapiens
  misc_feature (1)...(243145): n = A,T,C or G
agtgagtggtgagtgaatgtgaaggcctaggacatgactgtacaacactgtagactctgtaaacactgtacactcagaccacgctacatttattttaaaaattcttctttcttcaataataaattaactgtggcttactgtaactcttttgctttataaacattttaatgttttaaactttttgactcttttgaagaaacacttagcttaaaacacaaacacattgtacacctgtacaaaaatattttctttatatccttattttataagcttctgcatatttttttattttttaagcttctttattaaaaactaagatgtaagcctggtacagtggctcatgcctgtaatctcagcactttgggaggccgaggtgggcagatcacctgaggtcaagggttcaagaccagcctggtcaacatggtgaaaccccgtatctactaaaaatacaaaacttagctgggcatggtggcatgcacttgtaacgccagctacttgagcaactgaggccagagaatcgcttgaacctgggaggaggaggttgcaatgagccaagactgcgccactacactccagcctgggcgacagagcaagactccaagactccgtctaaaaaaaaaaaaaaaaaaaaaaaaacgaagacacaaacacacacattagtctaggcctacacagggtaaggatcatcagtatcactgtcttccacctccacatcctgtcccacttgtaagtcttcagggcaccaacacgcatggagctatcatctcctgtaataacaatgccttcttctggaatacctactgaaggacttgctatttaacaggctgtttacagttacctgaggctattttagagttaacttttttctaagtagaaagagaacactctaagataatggtaaaaagttttgtataataaatacataaccatttattagaattatcaagtgttttgtactgtacataattgtattgccatacttttatatgactggcagtgcaataggtgtgtttacaccagcatcactatagaaatgtgagtaatgtcttgtgctacaatattacaatggctatgacagcattagcaatagcaatttttcaactccattcattattaccttatattaccactgttgtatatgcaatccatccttgaccaaaataccattatgaccggtgcatggttgtattcaattaagtttcaattgtatcttgagttggccagaagtggattcagtttactccaatctaactagacagacttacatggatacgagaaagtgaacttctggtttaaaaaataataaacgtccctattactaagaggcattagatgggggtgaagtaaataataggattatggtctttgctcctacatgtaataaaggtacatgttcctagttcaagcactttccttcaggatggatgtgactcatggaagaaatgacattagtgagtgatggattgtaattttgccatcagggaaacttcatctttagattccagtacaaaaggttcaaattgaggctcaaaactaataaaaaccagcaaaatacagactacaagaatcacaccccatgttctcactttctgttactttcattttcagttactaccacctggagatgagggttgtttcttaccgacttacttttcagtgacacttattaaaagccagtgctggctggacacagtggcccacacctgtaatcccagcacctttggagaccaaggcaagaggattacttgagttcagcagcttgagaccagcctgggcaacgtagggagaccttgtctctactaaaagtttaaaaaattaaccaggcatggtggcacatgcctgaagtcccagttactcaggaggctgaggtgggaggattgctcaaacctgggaggtagaggctgcagtgagccatgatcaggccactgcaatccatcttgggaaacagagcaagacctctgtcaaacaaacaaacaaacaaaaacacaatgcctaatagttaatggctcaactctttattaaaggaaaaaatatttagaaaaaaatatatgatactaaaacactctgaacttagcattctttgatgatcacatggcagccatttttgcttttttatcctactacttagaataatatgtaatatagatcacataaaaatataaaaatcctatataaattctactacttaggatcatatataaatcatgtttaactttcctttatttcatagctagtatatagtgcagtgtttaagactgtggactctaaaatcagaacaattgagatcaaatcttagctctgctactttctggccatgtaataacatggcccaattatttaacttctctgatttcagttttcacatctctaaagtgaggataataagggattctactttacagtttatatggatgagtaaatgagtcaatatctataaaagatttagacactgccagagatataagagctctcaaggtgaggaaaatcacaaagtgtaattttaggattcctctatcgatatgtaattatttctattgtcccttctggggaaccagaaatcatcaataccctccacatggctacatggtcaagtccgagtcttcatcttacttaactcaccagcactgggaaacactgtcttcacttggcttccattacgtggtcctcctcctggttctcctcctcccaatgcatcccttggtcttctgcttatttcaccttttctcaattgtacaggaaagtaccatcaggttcagtgcatccccttttatctttatgtaatttcacctagataatgatttatgaatacactgttaagtgatgtttcctacatttaaatctcccagacagaactgccccttgaactcaaaattcctatatccaactacctagaaaagatcaccacataaatggctaagagatagtccaccttcaaaatcttccgaactgaaaatttgatctttccctatatctgtcttgccgcagtctttctgatcttattttacagcaatgctaaccttttagtagtttagggtaaaagtcttgaaaatatccagggtcctcttttctctaaggacagatatctagtccgtcagtaaaattttgctcctaccttcactccatatcccaccaaatatgagcatttcatggcatttgtacagcaactactttggtctaggcctgcatcatctcttgcctagattatttcatcgatttcaaattggcctccctgctttcacccttccctcaatagtgagctagaaactcagtggccaaagggataaaatgtaattccaatcatgtcactcttctgctcacaatccttgttgctcacagtaaaaatgaaagcctttcaaaggtcccacaaggaagggccctgtctgaccaggccttgttacttctctatatcacctgctcctctcctaataagtaataaacaataacaatgatagtccctttcatacctaaaaagaatagattgagcaacacaagcaatgcatctataacggaatgagagaatcaaaaattctatgtctcacatggttaaacaacttgagccattcccaaatggactcggctgggcgcagtggctcacgcctataatcccagcactttgggaggccgaggccagcggttcatgaggtcaggagatcgagaccatcctggctaacatggtgaaaccccatctctactaaaaatacaaaaaattagccagatggggtggtgggcgcctgtagtcccagctactcgggagcctgaggaaggagaatggcgcgaacctgggaggcggaggttgcagtgagccgagatcgcgccactgcactccagcctgggtgacagagcaagactccgtctcaaaaaaaaaaaaaaaaaagaagaagaagaagaatattattccactctttcaatggccttttcttttttctagaaggccacatatgggagaatacatgaaaatgagtttgaaaaagttactaaagattttattattttgtctggtttttgctgactttgcaaaaaacaagatgggtattagaaggcagaaagaaagaaaaagtaggaaggaaggaaggaagaaaggagggagggagagaggaaggagaaaagaggaagaagagagagggagagagagggaaagaaagagggaaggaagattgagacggggaagaagaggccaggcaggcatggtggctcatgcctgtagtcccagcatttggggagactgaggcaggtggaatacttgaagccaggagtttgagataaacctggccaatctggtgaaaccccaggtctacaaaaaatacaaaaaaattagcgaggtgtggtagtgcatgcctttagtcccagctactctggaggctgaggtgggaggatcatctgagcctgggaggcccaggctgcagtgagctgtgataggtccactgcactccagcctgggtgcagagagagactgtgtttcaaaaaaaaaaaaaaaaaaagaggggaaggaagagaggaaggaaccaaagagagaaagaaggaaggaagatatagatatgctgcatgccaataaacctaaaattactttgcataatatttctgtatttataatacataaagcaacaactcattccaaaataaatttcactaatctatatgtcttaaatatatgtaaaaccatatatacactcaactaagttgcaaaacatgttaaataatatcaaatatttcaatattgatacctactgacgcactacaagagttccctaactgaagaactctgattatgattcatagtaactaacatattctgaaataatttatctataaatacggaacttaaatacagcttgccgatgtacacttttactcagaaatgatttttattcaaaacctcatatatttgacattcatatgcaaatttataactaccgatggaattgttttccttgtgtttgagatggagagcaatcctgtctagctgccatatctgcgggttattaattaacttcacattcaccattattaaaatattttattacccatgattgaatgtggtaatgaaaaataactacttgtcacaggcaaatattatcaaaagtgcaatagggcaacgagggccacacaaccaaaaatgtaatccatttttctttcatggaagaatccaataaagctagagacatgcaatagtataactaaatacctcttggtttatttgtgggggagaaggagaaactaagggaaacaatgacactattttgatattatttatctttaggtgctccaataattcttgcaatacttaacatgtctggaaacatagaatctttgccatttatggaaaatatgaaaaataaagctaaatttagaaaaagtcacatattctaataaaatatactaagggaattagttctggccataagataaattgatcacataaatctccagcaaaatatattaatagctacagtaaaatccaataaaacaaaattagcagctttatgcctcggggcacattcaacttctcttacagatcccaacttccagccaccattttcagctcaatgccctgtctctctgctttaaaacgcattttgtttttaagaaatccattttttctcaaataaggaatgtttgtattagaaatgtacaaatgttttaaattagcatttgaacaaataactagagaaaaacttacatttacttgcctttctatcatttgtagtttaaaaatataccaaaacaaaaataatgtttttaattctggaagtaatgttcccataggcatgtctactaaatgaaatattataatgaagatattttgcaaactctaaagtaataaaatgtaaggcagtattgtcattttatttgcaaggaaacacttaagacagagactttgtaatataagttggcaaacaaaacattactaactgtcctacaataaacgttttgattaacagaactttgatattttttaaaaacactcttttgctgatatattaaaccacccaatctgcttccaaagtaggcaaatttattttgttcagcaaatatcatagttacgtattagcataacattgttattaatttattattcacaagcttatttaagttgttaaacagctaatctttataatactttacatgtaagatccacattatttatacgaagagaatgcatgtcttcycacaatgctgaagtagggtcatttcagttcttaagatgcatactgatgagatgcacacaagttcctcagaagccaaccagactcaagacatatgtcaaattacattcatttttccaattctgtgaagacaaattaattttcacactatgttagagaaaagcaaatcaccttgatctcctcagaaataccatgtgtagccaaaatataaattaattaattaaatacaattttaaaaccacccactcttttgttagtccctgtgtctcctgtacagatgctagcttaatgtcctgtgtactgactgaatgtctgggtkgcccagagtaaagacactttcttatccttctctatccctgaaaagccatgctattcatcacactggaaaaggcagatatttcaaggggaaacagtaagttggaaagagggtttggataacagagcaggaagtcattttgtctttcttgagtctcactctataggacttagacaccaaggagcccaggtaagttgaggctcttctttggtgaagggatgaaagacttcacatgaagccaaggactgtggtaggaatattctctgtccaggacctcaaggaggctgggcgcggtggctaatgcatgtaatcccagcactttggggggctaaggtgggtgggtcacgaggtcaggagtttgagaccagcctggccaatatggtgaaaccccatctctactaaaaatacaaaaattagccaggcgtggtggtacacatctgtaatcccagctactcgggaggctaaggcagaagaattgctcgaacccgacaggcggaggctgcagtgagctgagatcatgccactgaattccagcctgggygacagagtgagactccatctcaaaaaacaaacaaacaaacaaacaaacaacaaaaaaaaacagaacctcaaggaatagttgagtaaaactctgtagtgtaaactattttttctaattgcatgtttttatattttcttgtcttctccaaacatttagttcagtcttactgaaatattttcacctggcctatacgttgctaaaaagaattaagaaaagtgtgtcttcccaacctcctcctcttaggccagaggttaaataggaagaaacaactttcctgaaatcaagaagacagtgacagtggtaatattctaaaaaaaaaaaaaaaaaaaaaaaaaaaaattaagtcagggtagtgtggagagatgactagaatcttgcttctgcataagaaaatatttcctctattgccaatcttagagtatgtgcataatgttattaaaaaatcagtgggttttcattcagttgaagaaataagtaagcattttagggaggaggtattttttgggttttcagttttttgggtatttttttggcttgtttaggtttttttcataacattttcattctagatattaagttaataactagtagaactgaatgaaaatttttcaacattttagaagcaacctttcatggattgacttgtgatttggaccagcttaaaaatgatatttacagattcaggacaacatccaatccatcagaaaaccctttggctctacctttaccatatacttggaatccagccgcttctcaacagctcccctggtattatctaggtaatctgcagcaaaggcctcctaactcatccgcctcgttatacccttatcccctgcagtctatcttcagcacagcagccagaatgatcatttaagtataagccacatcatgccactctgatgaaatacccagaaatatttttccacatcaatcttggcaaattccttttgtggcctcagagaggatgtataatctacactcccttccccaccttttacatctcagaatccctcttctactgctctcttgatgactttattcacttggctccagtcacaatgacctcttcatacttgctccartaccaaatgtgcttccagcagcaggccttttgtactaactgttccttctgcccggaaaaaaaaaatccccctcttctccaatgtatctgtaaagctaaattcctccttcacatttttgactgtcaccttcttaacagaatctaccccaaccaaagtacttaaaactgcaactctccttacctacatccaaactccctaacttgctctaattttccattttcaaatctccgtgtattcttcaaatatgcagtatagcttacttatatattatgttcagttttatcacctatgatctgtattccatgataagttccattgagtgaagacatttttgttttgtttactactacatctaaagcgtttggaacagtgtcgaacacacaacaaacactcagtaaattgttgctctaaaaaaattatggaaacagcagatgcaaacaagaccaccctaatcctaacaaagaattccacaactgctgcatagaggaggtgttctcattcattattttaatccatattaatagagcctaactagggtcccgacagagttccaggtgtggaaatataatgaagtgaaaaagctaacatggtcccggactacataagcccatgtgggagacacaaaaaaatttaaaaatctcaaaagtaagcttaatttgttttaatacagccacaggcaggtacaccagtgctctagggagattcgacttaaggaagaatgccaacaggcttacctaaggaaattacaactgaggggaactctgagggatgagtgtgagtgattaaaatagaaaaaaaggaaagaaaatttcatgagaatggcataacatgtgcaaagatccagtagtgaaagaaaacacatttcttaggcatctaattgatgacaatggcggcaagagctaaaaaaccaaatgaagcccgggaggtgaatggtcccttgcagtcatgtaatttgacaggcatgaggatgatctttgtaaatcatggtaaagatttacacctttacactaagagaaatcaggagctattaaaggatgtaagtgtatgtgtatgcattcatgtatgtatgataaaggacactggactagttattgacaacatcaaatcctggtttgaaaatagggctgtgataaccagacatccagatgcattagaaggaagttggactccttcctcacacgctacacaaaaattaactcaaaatggatcagagttgagctgggcgcagtggtcacgcctgtaatcccagcactttgggaggccgaggtaggtggatcacaaggtcaggagatggagaccatcctggccaaggtggtgaaatcccgtctctactaaaaatacaaaaattagctgggcatggtggtgtatgcctgtaatcccagctattcaggaggctgaggcaggagaatcacttgacccagagagtcggaggttacagtgagccgagatcccgccaccgcactccagcctgggcgacacagcaagactctgtctcaaaaaaataaaaataaaaatacaaaggatcagagtcttaaatgtaacacttagaagaaatagaggagtaatgcttgcctcggcagcacatatactaaaactggaaaatagaggagtaaattgttgtgacctggggttagacaaaggcttttttgatatgacatcaaagtacaagcaacaaaagaaaaattaggatttcataaaaattaaaaacttttctccttcaataaatgatgtcaaaaaagtaaaaagaaaaattacacaaaatggcagaaaatatcctaaagacaactcaacaaaggacaacacagttaaaaaaagaataggaaaagaatttgaatcaaagatatgcagacrgctgttatggtttaaatgtttctgtcgccctccaattacacatgttgaaaccctaagccrcaaagtgatagtattaggaagtggggacttttgggaggtggttagrtcatgaggacagagccctcatgaatgggattagtgactataaaaatggttgaaggctgggcatggtggctcacacctgtcatcccagcacttttggaggctgaggtgggcagattacctgaggtcaggagttcaagacaacactggccaacatggtgaaaccccgtctctagtaaaaagacaaaaattagccaggtgtggtggcaggcacctataatgccagttactcaggaggctaaggcaggagaatcaattgaacccaggaggcgaaggttgaagtgagcggagatcacgccactgcactccagcctgggtgacaagaatgaaagccatctcaaaaaataaaaataaaaatggattgaagaagcttgtctaccctttccactgtgtaaaagcacagctacaaggcactctgtctgtgagaacaagagctttcaccaggtaatgccagcaccctaatcttggacttccccgtcttcatcactgtaagaaatgaatacatttcttttgcttataagttactcagtttaaggtactttgtcatagcagcccaaacagaaataagacaatggtgagtaagcaaaatgtaagctctacatctttagtcattagggaaatgcaaatcaaacccactaggaggtaccaacttactcttccaagaaaatatatataatcaaaawgccacctaataacagtttttggtggggaggatgtgaagaaattagaaccttctatggtttgaaggtgtcctctccaaaattcaggtgttgcaactaagggccagtgtgatagtattaagaggtagagcctcagagaggtgattaggccaggagagctccctcatgaatggaaataaggctgttacgaaggaggctttgcacagtcctgcttgcttacttgctcttctgccttctgccatgtgaggacacaacgtccctccccctaatagtatgcagcaacaaggtgccatcttggaagctgggagctaccctcgccagacactaaccccgtcggcaccttgatcgtgaacttcccagcctccagaactgtgagaaaacacatttctgttcttcataaattagaacagtctcaggtattctgttatagcagcacaaacagaatatgacagtaccctcagaaactgctgatggaaatgtgtcatagtgcagtgctttggaaaaccgttcagcaatctctcataatgttaaacatagagtttccatatgattcagcaatttcactccaaggtatataccaaaggaaaaacatacagccacaaaaaatttgaacaagaatgtttataggccaggcgcaatggctcactcctgtaatcccaacactttgggaggccgaggcagacggattacctgaagtcaggagttcaagaccagcctggccaatacggtgaaaccccatgtctactaaaaatacagaaattagctgggcattgtggcacaggcctgtagtcctagctactgaggaggctggggcaggagagttgcttgaacccaagaggcagaggttgcagtgagccaggatcgtgccactgcactccaatctgcgtgacagtgagactccatctgaaataataataatagtaataataataatgtttatagcagcattatttgtaacagtcaaaaatagaaaaaccccaaatgtccatcaactgatgaacagataaacaatgtgatttaatcatacaaaggaatattatttgtctataaaagagtattcagtactaatacatgttacaatatgggtgaacctgtagaacatcatactaagtgaaattagccagtcacaaaaagtcatatattttattattctatttgtgaaacatccagaataggcaaatccatagacacagaaagtagtttagtggttgccaggggctggaaatggctaaagagaaaatgcagaatgactgctaataggtacaggtcatttttggtgggtgataaaatgtcctaccattgattaacaattgcacatctctgtgaatatactaaacaattgaattgtacacttgaggtaagtaaattttgtggtgtataaactctatttcaataaaactattataataaaaaaacaaaaagttaatgattactggcacagactgtggagttagactgcctagttttgagttctggcagcagtaccacttaattaaacttgggttattttacttgaatttgaactttactgtgatagcagtgcctgccttatattgctattgcttagtctaaatgacactacacttagaaaatgctaagattagccggnnnnnnnnnnnnnnnnnnnnnnnnnnnnnnnnnnnnnnnnnnnnnnnnnnnnnnnnnnnnnnnnnnnnnnnnnnnnnnnnnnnnnnnnnnnnnnnnnnnnnnnnnnnnnnnnnnnnnnnnnnnnnnnnnnnnnnnnnnnnnnnnnnnnnnnnnnnnnnnnnnnnnnnnnnnnnnnnnnnnnnnnnnnnnnnnnnnnnnnnnnnnnnnnnnnnnnnnnnnnnnnnnnnnnnnnnnnnnnnnnnnnnnnnnnnnnnnnnnnnnnnnnnnnnnnnnnnnnnnnnnnnnnnnnnnnnnnnnnnnnnnnnnnnnnnnnnnnnnnnnnnnnnnnnnnnnnnnnnntgtaagcactaaataagtgttagcagttactacgacccacctcagcacccacgtaacacatgactataccagtttcacctggagcttgccaatatgaaaaatgccatttttgaaagttgctaatcatttttaaataacattttgtcatttcttatacgcaaatacataaattcatctaagttcagaaaaaaaacagaaagagaaaaacataaaatgtctaggtataatcttcaagctatgtgcatatataaataaaaccctgaaacttttcctcagagataataagtaagtctaagtaagtctttgataaatggagagatttaccatgagtctggatgaggagatcaactactgtggttcttttttaaatagtttatatttccaacacaataacaaattatttatttctcatcttttttaaaaaactataaacttcatctggaaaaataaagaggcaataatagctaagatttttggaaaagaaagagtaatgagaagtgacatgactttctggatattaaaataaattataagctataaaataattaaaattgggctatataaaacaacacagtataatcaatcagtataataacaacctcttacaatatcatatttaacaggcaaattcatggaatatagtaaacttccataaaatagactctaatggttataaacattgatttcatgctgaaagaactatcatgaaccaatggagaaggaacatagtagtcagtagtgttaatgccataaaccaaaatcagtttcaaatagacaaaaaagtgaatatttaaataaattatttaaaaaataaagaaatatttattgctaaattggaagcaatttgttaattatttaaaaaacgaaagcaattattaaagaaaatgttgatagatctgaatgaaaaataactaaaccttcttaatgtcaaaaagaacataaattaacatttttttttaattggaaggttatttttcaatgccaagtttaatattgtattctctctctcatatacagacacataagcacacacacacatacactctcttaaaataaatgtgaaaaatagggaaatctaataatgaataagcaattaaacaaaaaaattgtttaatgaatatatttaatactgtatttctgtagttgttgcagcaaatgaagaaactgatgctttaacatatggaaaataacttttaaatatgattttgtgttgaaaagttggtacagaatataaattggtttgaacatctggaaagcattcaacagtttgtatcaaaatacttacaaatccctatataatttaacttaattattcttattctgatatctttcctaagtatatcatcacacatttaaacataaaaatatgttaaaaaatcttcatcataatcttgtgtatagaagataatgtaaataagtcaaaatttcaataatcaaaaaataattatggcacatctatacaaaagactattttaggcagtataaacagatgtttgaaggattttaatgacatgagacaatttttacaatataatatcaagctagaaaatcactcttttctctttttgagacagagtctccctctgtcgcccmggctctgtctccctctgtcgttccctctgtgcagtggcacgatctcctctcactgcaacctctgcctccggattcaagtgattctccttcctcagcctcccaagtagctgggattacaggcacttgccaccatgcccagctgatttttgcatttttagcagagacagggttttgccatgttgcctaggctggtctctttaactcctgagatgaagcaatccagctgccttggcctcccaaagtgctgggattacaggcatragccaccacggctggccagaaaataaccattttaattgtacttagagtttaatcacaatttgggcatagaaaaaatagtgacaggaaatatatataatgcaaatatgctatgatggctatacttggtgagtataaagttttttttgtttttttgtttttttacttaatttgttctccattttctaaaatcggcctctattcctgtaataagcatgtacaccatagctgaatgtgcattctctcaatatgtcttatgcaattgcttcaatcatgttttcttattttctgctagtttacaattattaaaatgtgactctgggatgcaggcttactttaaattttatttaaatggcaaagcaagtattttgccactaccaatattacaataaaattggtattttgtgttagagtatctattatcaaaatggatgttctgtgatttataaaataattttaaaggcattagtacattcaaatatttaaagtattttcatagttcatttcttcctccaactctgttaagtaataaatgttcaaaataacaagtctaaacaaaatatgatttactcttttaaacttcacacctctatatgtcaccaatttattgggatactgagagacaggactagccgactaagaattcctaagcctagctagggaaggtgaccgcaccctcctttaaacacgggacttgtaactcagctcacacctgaccaatcaggtagtaaagagggctcactaaaataccaattaggctaaaagcaggaggtaaagaaatagtcaaatcatctatcatctgagagcacgggggagggacaatgattgggatataaaccccaggcattcgagccggaagtgggcaacccctttgggtcccctccccttgtgtgggagctctgttttcactcttttaaatcttgtaactgcatgcttctctggtctgtgttcctgctggagctgagccttccctcactgtccaccactgctgtttgcagccatcacagacccgccattgacttccacccctccagacccagcagggtgtctgctgtgtttctgatccagtgaggcacccattgcccctcccatttgggctagaggcttgccattgttcctgcatggctaagcacccgggttcgtcctattcgagctgaacactagtcgctgggttccacagttctcctctgtgacccttagtttctaatagagctataacagtcaccgcatggcccaaggttccattccttggaatctgtgaggccaagaacctcaggtcagagaacaaaaggcttgccaccaacttgggagcagcccaccaccatcttgggagcggactaccaccatcttgggagctctaagaacaaagacccacccataacaatacgttcagtaaattaatgcaaatttgaattacaaatgaaacttaggagtttaaaataacatttaaattacagacatacagatctacacaagacaaaaccactttataagtagcaaaataggtgaatgtaatactaatcaatttgcttacattcaaatgcaaattaaaactgaagagtttctgcacatcactgtttttgctttatctaacaaagatcagactgataagaaataagcatcattcttttgatacatgatactacttttgaaaaacaaatattgcaatagtaaattatatagaacactttggtgaaatcatttgtgaggttattatctctcctgttcctgcatgccctttttcctcaaaaatccaaatattttactctttggtcaagttcacacattaaaatgagggtaatcattcagttcaaacctgccccccttctcctcagctattaactcttttccttctaatgctttagcgtgcataataatagcaaaatggattgaaagagcatcaactgcctcttctaatctaaatttaagtaccctgattgcaggttagaagctttcctttgatattttttaagaatctgtttcatggaagtaaatttttaagcacaattttttatgcatcacagtcttttgaaagattgattcaacagaccttcacatttctttattctcatctatgctagtttagaaattggctgtttaattttttttaatttacagtatatattggtacaagttagattggtttgcacatctcatttttattccaaatctatttcccctgagtagtcaaaactactggagtaaaacatttattactctctatttttgttagctctcaatcctgtagttatgcatcagttctctgaatttctctcattaagattaatacacatgtatgttttcatcttataattatgtttcatgtcatatcctattggaatagctagggtgatattcataaatcaattcatctttgcagtgcttttgctcccctctttgtttttctctctttctcttaactcagcatcttcaaaatgcagaaatgattagattttcattaattctgttaaataggttcgtacacattacagtgagcagccatcacttagaaaatgtcaataaccttagaagtcaaatcatgctgattcgcttccagtgaagcatggaaaaaactattaccccggatttattagctatgcatattgggaacactcaaaaacaattaagcttttgaatgtggacaagagtcatggagtacagaaagcgcactatgttgaaagtagaagctactgcttctaaacatggctctgatcagctttgtcagccttgataggtcagtaacattccctggacctccgtttcatctgttaaaacaatatttggttccaacttcacacttttaaaactattgttaaagaaatatacttaaaaacgaactcttctgccaacccagaaaattgctccaataagatagaaaagaaaaaataatttcattattgaatagcattaaaccaggacatgatgtgcatcacaataattgctaagagattgcaaaaacagaaagaaatctcattttatatagccaagcagatacaacccattacatatatgttcccaagataaacaataactagtcctcaaatcaaaggacttcacagcaccactgtgacatatgtgacaacacatagttcatcctggattcttggtcattgggctggccatctgtgtttcctttggctttatccaaaggaaaaacaaacttctcatatctttatgaaaagcagtagttttgcaacttggagtgagatgcctaccaatgtcaggttcctaccctcccacagaaattgggaggtcggtgtacttttgtaattggggacctcagttttaaaaatgcatttttaaatcacttactctctttttcttcctttccttccctcaccccttcattccttacctctctagacactcccctacccccccgccccagcaatgcacactcacttaattattttcttccttaagaaactcaaaagactaatcttttgaaacaaggcatggakccctaatggtagaattctctttaggaggaattgtgaactatcaatccaccatcattgggctaaagtcaagataatgccaaccagatcttcagatgggcgagtacccaagatagccagcagaaaaagacactcggaccttacactctgcaccagtcctgcatgtctcccatatcaagtttcccttttaaaaccttatgataaactttaaaatttgagatggtctttatgacttgagttcagcatctycacaagccctctggcacttgattcaatccgatttttccttccaccaaaycttgtctctcaagactggcttttgggtagtggactgctggacttaggtccagttacacttttttccttgaggatgattacattttcaagagatggttctcagatcctcaagcaaaacattcctgggtcctgaagcttccagagattctttagctttttaagattgaaatatatttttaaagacagagaaagaataaacaagtggtctaaattaaattatctgagaaaagagagtgggaagaagtctttttccttattttcaacagaaagaattaagtctcttatttttaatttgaatttatccttacactataaaatctcaacattgcaaataagcacacatcagtctaagcaaggagaggaattgctccttgaatcagtaaatacacagatgtttatttcaaaaaaaaagttatcttacagagagtatatcaccattcagaagggtgttctgaatatcacttaagaatgtgagtaggaaatcatgtaccagataatataattaattttgaataatttcttgatattttgtaagtggagttatgcttaaaatttcctctcagggtccctgggaagggataaagcacgactttggagcagcatgctggcaaacggagcgttcagtgcagattagacctccaaatgccgggggccgggggtcggccctcagactacttttattctctaactagactctctccaggatccaggttttaaatgttttctatattttgatgattcccaaatttacatctctgaccccaatttctaccctgtgaagtctcctaaatccaactacctgaacaatttttcttgttgggaattggcccccatgtctggccataaactagccataaacaaaatctctgtagcactgtgacatgtttgtgatggccatgacacccacgctggaaggttgtgggtttactggaatgatggcaaggaatacctggcccacccagggtggaaaaccgcttaaaggagttcytgaaccacaaacaatagcatgagcgatctgtgccttaaggacatgttcctgctgcagataactagccagacccaaccctttatttcggcccatccctttgtttcccgtaaggaatactttcagttactctataatctatagaaacaatgcttatcactggcttgctgtcaataaatatgtgggtaaatctctgttcagggctctcagctctgaaggctgtgagacccctgatttcccactccacactctatatttctgtgtgtatgtctttaattcctcggtttccatgaccgagctggtctcagcaatttttactctttaatgtgcaaaggaaaacacctcagtctcttccactccctttctaaggagcatatgcatcctaggaagcagcaccaccactctcccagctacacagaacacaggcttatgaatccaacctccctatccaactcatcagtgacttttattaggttggtgcaaaagtaattgcagtttttgctattgaaagtaatggcaaaaccttaatagctttaatctacattgaaaatataactgaaatacagtcacttctcattgactcgccactaccactcagatccaagctgccatcatctcttcacaaaatcacccacacttcacaatatcagggtgaccttttaaaaacgtaaatcagattctgtcactcccctgctcaagatcattggattagtctgttctcacgctgctaataaagacataccgagcgactggataatttataaagaaaaaaagattccatggactcacaattccacatggctgggaagtcctcacaatcatggcagaaggtgaatgaggagcaaagtcacgtcttacatggcagcaggcaagagtgtgttcaggggaactgccctttataaaaccatcaggatcttatgagacttattcactatcacragaacagaacaggaaaaaccaactcccatgattcaattacctcccaccactaggtccctcccacgacatgtgaggattgtgggaactacaattcaaaatgagatttggatggggacacagccaaaccatatcaatcatctaatagcttcccatcacgcaggacaaaaaacaaagttcttactaagtgaaataaaccagtcacaaaaagacaaataccgtgtgattcacgtgagctatctaatgtagttaaatgcttaaaaacagaaaggaaattggttgtgaccaggggaaaagggggagttgtttcacaaagtgaaaaagttccagagatctatttcacagcaacgtgaatgtatttaacacagctgaactatgcacctaaaaatgcttaagactgtaaattatatgttatctgctttttaccacaattgtaaaataagctttcactggggtctataatgttctaaggacatgtatatctgtgtttaagagaaaaacctctggaatggtgatgggacagaaaaaaamaaaacgtgctagagtaagagtctggtaatagcagatcaatgatgaaaggtccagtgtagtgacaaggtcatcaggaggtgggtgagagggagaaagagtagagtaagaacagraggggccgctctaattctcgagtagccagtggtaattttaaagctccataggcttttaattaatcatagatcttcattaataatgctggtagtatttagttagatctatgttccttctaaaatcttaagaaaaaaaatgaacctattactcacctttcattgacgaaaccacagatttatttggaagaacaatgtgataatgcacagtaatgtgtcatttagacagaaaatgctactcagcccctgaggaagtatatagtaacttgtttctaagatttgttttattttccacaatattcaggagctttcttctcaagaaaaagatgagctattgttcagtcaataaagtatagaagtatactcttaataaatgttgatttcttataaagtttttaaaatacggctattttgttctttttgtgtgtgtgtgcaattgtatacaaggcaatttttgtgcctgttctatgctgtcactttagtgatctttctactccttttaagagctgcacagaacctctgaagaaagaagtcactcacagaagactgcttaacatatgtaaagaaacatatttagtttaagttgagataaatttgatttaaaccacatcactacaaccccaacatgtacacctcaatactcaaccatgcctgcagaaagaaaaacacgctagtagaaagaaatgcttcattacatgttttgcctactttaaggtgctgactatttaataattctgctgcctcagaactaggttaactacttaaagttgtgtaaatgttactgattatttctgttgctttttcatacaattaacataaacttgatctatgttggtaattttaaaaaacacacacacaaagggtcttaggcagcactaaaaatgctgatctgcaatttgctcccaggaatgcagaagctcattctcacataccctgagggtgagcaagtttagtatattttaataaattcacaagttaaattctataaaagagaaccattagaaattaatgttaaactctgaacaggcttggatataccatgttagatcataaaagtgatatgcaaatgcttatttttagcaaaaccccagcgtcatagtttatagaattattttcaaattataggcatctgaaagaagtactcacaaaactactcaatttacagttgacctggaaacaaagaataagaatatgaaatttctaaagtctgtaatgtaaggtgtagttcttaaaactaattatacggaaaatcatctaagaaggggctaaaatatagcaatgactgtgactggctcccagaaactcttatttaattgttctgagacagggccactgagtctacaaggtcttttatcttggataaaatcattgaagaggatgatgcttatgacttcagtacagattatgtgtaacagaacaatggctttttatgatttttttttaacattttaagcagactgctaaactgttctctgtataagttatggtatgcatgagctgtgtaaattttgtgaatatgtattatattaaaaccaggcaacttggaatccctaaattctgtaaaaagacaattcatctcattgtgagtggaagtagttatctggaataaaaaaagaagatacctattgagaatgactcgattatgattacattgtaaggccagaatactcagmctttagtgttatatacctatccttccccaaccaacacacaaaaaacacactaaggacagaaaatacctcaggtattacactatttttccagtatcttataataatattgtctaaccagagtcctttataacttcagttataaaaagcattgggatttgacaaatgaatactctggaggaagggggaaagagttggaactaaaaggagaaggcacaaattctgggataaaatattgaaaaaatttgatgtcaaacagattcttctagacatttcccaatggatgagaccatttttccagctccagttatggtgataattctctgcaatctccagtaacaaggatggtagtcaggagacaagccctttgcctttctccctacaaactgttttgtttttgtccctgaatgaaatgaactccaagttgtgctaatttcagatggacacttagaaatagaaacaaaaatgaattcacttaattcttgaggtaaagtgggaaaagatatactttagatacactataacggaattatgaacagaataagatataagcatatattagcaatattgcagtttctgttctggattgccacaataaagcaaatatcataataaagtgagtcacacaaaattttggtttcccagtgtatatatgtaactaaatctcaggttcagtgactggctgcttrcagtccaattagcaagagtgaggtctgatataaagaaagtgactggttttatggtttggttttttttttttttttttgacagagtctcactctgtcgcccaggctggagtccagtggcgtaaactcagctcactgtaacmtttgcctcccaggttcaagtaattctcatgcttcagcctcccaagtagctgggactacaggcataccccaccatgcccggctaatttttgtattttttaggagggacagggcttcaccatgctggccaagctggtcttgagcttctgacctccagtgatccacctacctagacctcccaaagtgctgggattacaggcatctgaccaaaagcgactttttatctcaaagtttagcttaaaggaagagggacaggctcctgcctttgagggtgctacttctcctttgggacagaacgcaggggctttaaaagcaggagttggtgaacagcatgcaggggaggcagtgagcaggtggggatctatgtgactcacttcagtgccttctctcctgggtggtcgagttggcaccattaggggaagaactaggctataaagtggacattgtatgagatattttccaggtgggacagagttttctctggtgggcatatgttaggtttttgtattagtccatcctcgtgctgctaataaagacgtacccaagactgggtaatttatgaaggaaagaggtttaatggactcacagttccacatggctggggaggcctcaccatcataatggaaggtgaaggaagaacaaaggcacatcttacatggtggcaggcaagagagtgtgtgcaggggaactcccatttataaaaccatcggatctcatgagacttattcactacaagaacagtatgggggaaactgcccccaagattcagttacctccacctggtcctgcccttgacacatggggattattacaattcaaggtgagctttgtgtggggacacagccaaaccacatcagttgtaaattgactgttgtctcttgaggcaatctcctggtgggaaagagctcttgctctggagcttctaagtaagtacatagttagataagcttgtcctgtagtaagtgtcttgtgaagagaaggtaaaggttataactgtatttctaaagagcgaaataggaagtagggaacaggggaaaaggagaaaagagaaaagaagaagaatataatgaaaaacacatttctcttagaaaaaaatggggtactcagttaatatataggagttaaatttatagaatactgtggtctgttaattatgccatagcattatgtctaaaaaacaatgtacgtgccttaattttaagatggtttattggtaaaaaatgctaatgatcatctgagccttcagcaagtcgtaatgtttttgctggtgggaggtcttgcctcaatgttggtagctactgactgatcagagtggtgattactgaagattggggtgactgtggcaatttcttaaaataagacaaaaataaactttgctgcatcagttgaccctttatttaatgaaagatttttcagtagcatgtgatgccgtttgatagcattttacccacagtagaagttctttccaaattggagtcagtcttttcaatcccagtcatggctttatcaactttatgaaatattctaaattctttgttgtcattaaaaaaaaaaagcccactgcatcttcaccaggggtgaatttcatctcaagaaaccactttctttgctcatccataaaaagcagctcctcatttatgtaagtattattttgagatttcagcaattcagtcacatcttcaggctccatttctacctctaattctcttgctatttttccaccacatctgctgtgactaattccactgaagtcttgaaacactcaaagtcatccctgaggattggaatcaacttcttacaaactcttattaatgttcatattttggcctcctctcatgaatcatgagtgtttttaatgacatctagaacagtcaatcctttccagaaggtttttcaactaactttttgcagatttatcagaggaatcactgtgaaagctacagacttatagaatgcacttcttaagtaaaaagacttgaaagtcaaagttactccttgattcatgggctacagaatggatgctgtgttagcaggcatgaaaacaacattaatcccctcatacatctctatcagagcttttgagcgaccaagtgcattctcaatgaacagtaatattttgaaaggaatttttttgagcagtaggtctcaacaggtgttctaaaactgatcataacctcacacttactatctcaataatggaacccactctacacacaatatattcatctactcattcttttattcaaatttatttaaaatacatactctaacaacttgcagaatggaagaaaatatttgcaaactatgcatctgtcaggggacttatattcagaatttacaaggaactcaagcaattcaacaacaacaaaaacgtaacactattaaaaagtgagcaaaagatatgaagacatttttcaaaagaatacatacaaattgccaacaagcttatgaaaaaatacttatcactaatcatcagagacacgcaaacccacagtgaaatataatcttacgtcaatctccacatggccattattaaaaagtctcaacataacagatgttggcaaggatgtatagaaaagggtgcacttatatactattggtggaaatgtaaattagtacaacctctatggaaaacaatatggagatttgtcaaagaactaaaaatagaactaccattcagtacaactatcttactactggatatctacccaaaggaaaatagtttattatatcaaaaagattacctgtactcagatgtttattgcagaactagtcacagtaacaaagatgtggaatcaatctaagtgttcatgaaaggatgattggatgaagacaatgtggaatatatacatcatgaattactatgcagctataaaaaagaatgaaataatgtatattgcagccacatgaatggagctggaggctgttatcttaagtgaaacaactcagaaatagaaattcaaataccacatattcttacttataaatgggagataactaatgtacacacatggacatagagtgtggaataatagacattggagactgagaaaggtaggagggggaaaggggggtgggtaaaggatgagaaattacttaataggcacaacacacattattcaggtaatggttacactgaaagctyagatttccccatggtgcaatatatccatgcaacaaaactctacttgtaccctttaaatttatacacatttttaaaagtgtattctatttgtagtgcacaaaatatggtatatattaattatgctttattaatttcattgctcaaatccttyatttgtcatattttatatatttcatagtattttaattagtgatgtactaatagctcttccagtaattgtgtgttatctatttattttagatttttgatggtttttgtcataaacattttgctgctctattatttgtcacagttttatgatgggattgtcttcattatgaattgtatctgaaggaactaaggcccataaaagagcttcatgatcccttccatacagagccaaagagtgagtgattattattaacttttagcaacaaaaaattactatccttggtccattttatttaataagcatctgttccatgcgcttgtcactgtgtttggccctgatgataatctctattcccaaggttcacattttaatgagactcattaatattacagccttactgtggaatgtaccttttctcaatataaatataatatcaatatattactttttattctttcaaattctattttgtccatcactaataaaattgaggtgtatctttccttttctttgtctaataagcttttgcccattctttcaacactttaagtgtaactatgctttaagtttttccattatgggcaatatataattgaatttcctttagtttttgtttataatacaatctcagagcattttgttacaataggggactttatcaattaacatttagagcaataactgatgaccttggttatatttctgttttcttgttttatgttttttatcaggcttcctaattgtttcatttattttcagtctataattatgtgtactaagctattattacatccattatctgcaatgacttgaaagtcaaactttaaaaaattccagtgttatttgtctgtaagttttttcaaaacctacatgaatttacttctcctaatacgaaagttaaacaaacacaccaaaatattgaccttcttttccttcttgctggagggaaaaatatcttttatttttcttcatctcacccacttctatttttcatgaattcaatcttgaaatatcaaactaaacaatcattattgtattttaaggaatcataaatattccccttttgttttatgcagtcaaatgagaacagaagaggattggatttgtcatttcatgttactatttcagtgctcatgagtagttctttcaaactgaagtacgtgtttttgaattattcagttgtatttatctctaagccagtttctcagtaggagtaagtcttggaatcagtcactctactgccgctaccccagcatcctggaagccattagatttctgagaaagttattttttctgttgttgcatttacaataaacatcaacttgcttcactgtcaacattttgattaaaaactgttttctctcaatatgttatcattggttattgttccattgtcttctggaattttatgttatagaagactattattataaattttttaaagtaaccagagttttcttattgttacttttctgcttgagagccaataggatttttttctttttcttgagattgaagacaccactaatctatctctaggtaagggtctcttcttaaattttgcctagaaaacagcaatccctttttcccttgagattttatttttactttattacagttatctttattcatrtttaacatttgtttggtatctctttactgatttttgaattaggattttttttttagatctgacttttgccagcaaaataatgttaatttttttctaattgcccactcctaattctcaactccatgtaataactggaaaagttttttctcaaatctaaagccagaagtaaattgttgcactactatctttaatcctgtatccaataattacctcaggatcattctacagtgactatattgtactattgacctttgtctaattctaagactttaaaacaggaataagtgcaaaataaaatcagtggtccccaaactcttttaatcacaattctctatcagggaaaaaaaaaaaacaccatacataggaggtagtatattaatatgattaatatgttactctgttcatttcccatttcacaagagattttgtgagtgcctgcatgttttttagtttatgcattcactttaaccccagctagacagtagataagtaaaaatctggtgtctatcttatttccctcaaggtaggcatagccaagggtcatgttattccagccccacccatttttcagttaattcttgcatgggttgatgactattttttagtttttatttttttatttttttttgagacggagtctcgctctgtygcccaggctagagtgcagtggtgccatcttgactcactgcaagctccacctcccaggttcacgccattctcctgcctcagcctcctgagtagctgggactacaggcgcccaccaccaagcctggctaatttctttttgcatttttagtagagacggtgtttcaccgtgttagccaggatggtctcctgaccttgtgatccacccacctcggcctcccagagtgctgggattacgggcgtgagccaccgcgcccggccttgatgactatttttaagtttcattgtcaaggtgtattttcatcacttctgtgtgtaatggaacagaagagaatcatgagttttgcttgaacatgatatctggactatcatatatgaatatttcaaatgtcaacctctagaacaaatatctgattatgtcatccccccagtacaaatcctttagcgacgcaaatcacctacagaatataattcaaactcttcagtggggaaagcatggtcattcatgatccggcttctgccctccatttcagcatcatctctgaccactgcaccagacataccctggcatcttatacttagaaacgaatttactcccgcaaacacaatttgctcttataccattatgtcttggcatgtattgtttcttccctaagaaatgaagagtgtcagcttctctccactgttgtctgcttgaccaataagaagttgctgttcaagagagccaatatgttcgtcatcatcagaaatgggctctcagcctactacatatatgaattaagatatgtgtatatatgtatacatacatatgattatattatgtacaatacaatagggctttaaaggaagaaaaataacacttggacagttttctccctctcataacggtgctatgtatgtatctatttttctgtctgtctgtttccttgttctttctctgtagactggcttctttacttaccatctgcttggtgtattatcctaatttgcatcttccagtctccatatcccaaatataaattgataaacctggaagaggcaatcttatttgtgttcacccataacacatatattagataacaatattccagataattgacacattgaacaagttccattaaaaacaaatatctagttttratattttctgaataacatgttatgatagtttcttaccaacgttagaagtcagcctgttactaaaaggagttctaagtaatttaagtaaactatagccagaggaggggaaaaaataattatctaaaggaagagtcataactttgttctagtaattcagtaacttgatggagagtatataaaatcattcataatgaaaattaccatttctccaatatttggaaataatgctacacatttgattaaatatatagcttctctgtgatattagcttgtaattatatgctgcttatagaatgtcaggtaccattttaagagatttacaattaatattcacaacaactctagaaaacagacaccattattctcactttttatatgaagtaactaagacatagagaattcaaataatggacttgagctcacatctctaatatacagtgattgggctcataactacaatgccataaatactgcccattcaaggtttataagtgtcctcatgaatcagtttatgattaatatctaaaataaaattatacattgtacttatgaatattttaaattataaaagccaagtggtattttccaactagtagctgaatgctgaatttcaatcatcttatttctgtgacaaaaaacatgattatttgtagtagctcagtaattataaaagcttcatccacactgctgtcatgtaagtgaaaattggaaattactgagcaatttaagattgtggttagagaacagtactagtttaaaaactatattagaacaattttgtaagttattattcaatcttctagaccttgggaaatagtcaatatctaactaatagtagtctcttcctatgtacaacagaaaaggtaacttgtggctcacatcagcaaatgatttgaccgttgatgagaatgacttcccaacagtgtatgagtacattgtcctttttctgagactggcttccctactcagtgtttaacaaccattgtggaagtcagtgtggcgattcctcagggatctagaactagaaataccatttgatccagccatcccattactgggtatatacccaaaggattataaaacatgctgctataaagacacatgcacacgtctgtttattgcagcactattcacaatagcaaagacttggaagcaacccaaatgtccaacaatgatagactggattaagacaatgtggcacatatacaccatggaatactatgcagccataaaaaatgaagagttcatgtcctttgtagggacatggrtgaaactggaaaccatcattctcagcaaactattgcaaggacaaaaaaaccaaacaccgcatgttctcactcatagatgggaattgaacaatgagaacacatggacacaggaagggcaacatcacacttcggggactgttgtggggtggggggaggggggagggacagcattaggagatatacctaatgctaaatgacgagttaatgggtgcagctcaccaacatggcacatgtatacatatgtaacaaacctgcacattgtgtacatgtaccctaaaacttaaagtataataataataaaattaaaacaaacaaacagaaaaagttattcaatgatagttgttaaagcatgataaggaagtctttcttcaaggccatcatgatagatattaagaacaaccgcagcgagattttgcagtaagggagagagattgggtttaatgcccaatacagcatgggaaagcggaaatttatagccaaggagcaggatgggggccagtggataggaaatgactaagaagtaaggaggattctgtctaaacagacctaacagaattcttgctgaagacaggccagggtgatcagaccttacctgggggatggcagaggatgaggatcccgcttagatattgaggatgatcagatatcgagggtgaggttttcttgctaaactgatttagcagggttcacagatggacataggagaacgatcaagagtttggtcatgaaaataatctttgtcaccaacatctacggaacatattgttccagcattgctttccctggcctcattaccaggaatacaaatcaatacatctagaagccagaactgatttttcacttaataaactgtttcttcatccatttcctaactctgtgttagcacatattgcagatgagggtaggcaaaatcaaagatcaaatactacatatatttgccaaatgaagtctgcctcatgttatagtgaagttcccygaggataattgtttagtacctataagctaatagacaagcggaagctatttgccacactcttgtatgactaattcctattagtttagatgcgttaaaaataagtaaatatcatagttattttaagtatagctcaatacaatttatttttctaattttgcaccatttacctttaagttctctaaaattacatcataaaattggggcatttggaaagacaatgagaaaatacaaacaggtgtatttaagctcttcatgcaccttcctcatgtcaaagttccacaagtacggatcctctgaagttaccatatataatataatacaccatgaaacaagtcttatgaactatatgtataaagcaatatcttacattacaaaagaaaattctatattatgcacagtgcacctatcttaatatatagtttctgttgtgaaatgtgtttgcatccaaaacaaaaagtcaagaatttcctgattctacttttcccaccatattgttttatgtcttttctaaattaatgttgcttctctggcattccctaaaagatcacaccaaatactctctctgtatccaaggcatacaaatttttaaaaattaaaaatatatataaatgattttagtaactgagtgggaatgggggggaagcaacataatttgaattttattatgtgactacacaaaacataatacattttaaaacccttcctgaactcttcttaatgatgctgggcatataaaattttaaacacagttatcaaaaaaagcatcaaactatggatatacttcattacttaaaatattatattatttgcacatattaattaatttcccacttattctgcaatgaaattaaagtcattgtaataaaacatgataaaatatcttggagataatcgaatctaaaacctttttaaaaatgagaagccaaatgatttctgatgacttcaaaaagctcctacatatataaaatgcgcagtttatttttatgaagaataagaaaacccactaaattacacctcagccctctataagtgccgaactaaaactctgtatactggtttatattgcttcttataaactggattatatatatttccagaattcaagcctgtaaactaagaattgtctctgttttcttttataatgtagacatgatcattttgtcatagcagcatttttgtctatcttagtgagaatgttaagtctctttgggggattattctgactgctgctaacctagggtgttattttaatgtttaaaccattgttttgctattttgcaattaaagagatttttcttgatgcaaatattcagcaacattctttagggacatttttaagcaaatgctcacactttgtgtcatgtagcaaacgaagtgatttttatatttttcctattatatttagtaagattgtggaagtgttttgctgtgagaatgccctacaatggctataagcacagcagtctgaagaaaagctttaagaatacaaaaacacaatttgaaacaacatggagttaactgtccactttggggaaataacaacagcagacagaccgacctggcacacagcaatcagaaatgaggtcattcacatttcacaaaagccttgggcattttcaagggcagagaataagccaaaacaaccatttccccaagccagaagattcttcacatgtacagtaaaaaagactcctgattccatccaggtccttccaggtacctggaggcctgcagctcacaatgacatcagtcggttgtattatcttcaaaaatggagtccaccaagataatgtattagtgaggtttcaataagtttatttgagcaagctattcaacattactttctctattttcaactgctgactttagcattcttattttctatatctatttcttcatgtaattttccacatattcagagaactggaaaaaagtttatttgaaaattgtgaatcatgttcagctagctggtaattgaaatgctttcttagcacacactttccagtagggtcttgctatggggggaaatttacctcctgtggattgtcttcaaagctataaaaactccttattttgttttcttttgcttgagcttggggtggggagttgatgttacatcctcattctgataaaatgatttttgttccatatgttgtgtttgaaggcctataatttcaccactgttgatggtggaaatgaagtttggtggaggaaatgatgtggaaagttgcatttgatatttctggattgtcccagcacatttgagagtgagcaagtgaacattttacactcagcatctttcgtggcattagaaagctacaaatatcctttccttttcaaagaataattattttggtttgatttatcaataatgttttcactgtaattatagtagaaatagtgaatggatcttctgtctgctaagaattatgctctcttgcatggtccttatttggtgggctctaccaataagtcaaacaaatttaatatattaaaactgttatacacagtaattttcagcagagcaacacaatagctctacttctaggcaagagtttcttataatacattgacatcaaaacaaatgaaaagttggaaagttatttctgctaatataaaaatatgtgttatataatgaacctgtttccatacaggtttatggtgagatcaagacttcatcttaatgcatagtacactgttaaaatgcagaaatgaaccaggctcaagaacaataagtttatggtagagaaaagcctaagttcaaacaacatcaccactattttggtggacttcccttcctcctgcccttcttttctttattttgttgacagaccttactgaaaaacacaatgtgatcattggatgaactgctgctaaatgattgctcaatcagttggccttttgcttggccatttggagtggtcacgcctgtcacctcatagctacatgcagtaatgaaaatggacctgtgaattagttacatacaacacatgatggccacaagactcgaacatcctttatgcaaatgattctttagaaattattaattagtttttgaggaacattaatttctataacccccccaaaattattactacctggaaatagacctgaattcattttaactatgataaaattgcattcagtgacaattaatcgagcaaggcagaagagactttggtgttaaatgagaagtgtactcttattattgcttcttctggatacttttaatttgtatgcacaaacatgattttaagcacaagcactgtctctggccagtaaatgttttgaacacctgatttaaaaataatttatatgcagtaacattaagatgagttcagaggtatttttataatcaacatgcttatgtttacatatattttaaaaatcaaaaagtagaaattcaaaatgtgcccaagggagcatctaatgtttttcagaaacactgctgagctatttaatctcaaccaataggactgccaggtgatgctcagagtccatccttcttgactgcagatgaggtaatttgtttcatctagaaatatcctggggcaaatatataaagaaatataaaacactcacaaagcacaaagttaattttgttaaaattaacaatatcttctattctgccattttaccattagatacaataccttaggcgatattatgaagcaatctatattcaaattcctggggtggatatgtcagatgcttagttcaattttgtattagttcaattttgtattctaccttagaagtaagtgaatataattttagaattcaaatatattttaaaaatatattcttgaaaaactgaagttgtaaatttcacataaaaaatcttttaagaaataaacaaataaatcaaaagattgtgaatcacatttgtttactccattcaaaagtgttttgaagttagtaaaagtcaaaggtttttaacattttgaaaggtctgatatcccactgaaaaatataagtaaagttatagaccctctttctaaaccatacatacatatatacgtgtgtgtatatatatatatatatatatatatatgtaaacatgcataaagaaattgttgcaaactctttgaatggtttcacgaacacctggtcctctgaaggtcatctgtgagtaactttgtgatctaaagatctactaggctaagaaactatggtttaatcagtgatatgcttttagagatgttgaaaaactgacatgtccaacaatattattcttatgtgtctgccaacatgtctaaattgattcattaaygatattaacatgttatatcttggatattacccacttagcatgttatgataactgtaaaaacttacataataatatagccacatggaaaattttgtcagaatacaagcatataaccttattagggttatatgctaataagtagaagttaagagaactgtctactctgcagtttaaaacaaaactacaaacaaataaaactaaagcccattcagacccaggtaaagtactataggagccaggtcagaggcatgaagattcttgggtccaggtggttgtctgggatgcaaaaggaagaagtagaatttttctatactgaatgttactagtttgtgatagagctagtctaatgcatattgtgcatacagatggtgaccaacaaaactgtacaaaaccaaaactttgaaaatatgttagcttaacttataaaaataatacattttcaatatttatcctgaataaatattattggcattaccaattcacaagaaagtagccttactcttccagttaagaaattatcaggggaaatttcaggtaatcagaatgtgacctactgatcaaatgagaatggaagatcagctcaatgaagcacctgagaccagcatgcctcattaatcattagtttcctcatttccattttctcrttaaaaaatgatttattccaaataggactccttgtaaatgggaaatatagttcattcacatatttttatccctagtgataaccttaacactcagtggtatgtggtagaggcagaaaaaattcctccagataaggaggtaaaaatataaagagatagacaaatctgcaaagaatgtgatgagctagagagctagctaaagggatggaactctagggtaagtaggatttcagcattttgaggttgtgagcctgaaagtggaagttgggagcacagaaggaaaaaaaaagaaatatgaaggcattaaacccaggaagtgcaggaagcaaattaggaagacggaatagagagatgagaatgcaacaaagaaaacaggaaacctaagatcaactctgataatttactctcttcacaattcagagtaaaattgtaggaatcttgagattcatcaaacagatggactgctacactgttaccacactaacaataatcttcaaagtaagaattgatgatttttcctctgaaacagaaaagggcagaaaatacgaggacattctaaggcatagcacagggagcttacattaaagagtcttggtaattttattaaaatagaagagaaagtcatgtaatgagagggaagtcaggtcttgatgggaataaaatagtttaggacagctactgttcagaattcaaaagctaaagagaagtaaagagatttgtggagcagcagtgaggatccaattagtcttgaataatatgaatttgaattgaacgtaatcagttcgatcacataacttgccacacacaacacttgtcagaatggaagagagaacagtggaatcagacagtgaaaatatatatatatatatatatatatatatattcaccagaattattctggggaagagaactttttgaaagaaatatgttgataagctacttcaagggcaaagttaaccccatccaccgcctaataaccaaggacatgatcgtgtaacaaaggatcgcttctgaatggattctaaagaggctgggtttgtaggctgaatggcattttggttgctgagcactgagatgggttttggtcagcaagttgaagacagatggtgaatggagcagaatggcttttcatcatgtagaagagaagagcaatgggcctgtgggcagaatggctaaatatccaggggaaaatagacctgggtatattggagtatatcattttatttttattgtttgcattcyaatgcttctttgtctacttattttattttttaattgacacataataattatacctgtttatgggatacatggtgatgtttccatatatataatggatagtgatcaaattagggtaattagcatatacatcatctcaaagatttatcatttatttgtgttggaaacattcaatattctccttctagctatttgaaactatattattgttaactatagtatattgttaactatagtattattaatatattactattatatattatctatatagcagatattattgtcaactatagtaatatattattgttaactgtaggaatcctacagagctatagaatgcyagaacttatttctaagatctactgtatctttagaatgttttaggaaactgccaagcagccaagttttgcaaatagaacgcccctagtcctataagccctgacaagaaacatagaccttttacgaaagcactgggtgtggggtggggggcattcatagtctctaaagtggagtcttcttatatagtggcctactttggggtgagaataaatcaggcagttctacttggatgtctgcaagatttgggattttgccagatagatgaaatggagcaggaggtttagcatacagagaaaagaatggctggggtgatgcatcttagaatcctaagggtatatgaaagaaagtattaagacaagggaccattatattgtataaatgtgaaggaaacgatagattgaaatttcaaattagatcaaaaaagaagtgaaccgtgaacaatattgaaagtgaactagaaggacgatctttaatttctttttaacttcacatttttgaaatgttactcttccttcttcaacctcccttcacccaaaatattttgtgcattataccaagcacgtggtagggatttaaagtaggcaaatagcatttacttggattatgttctaagttgttttttttttccctagctgaggtaagagacctaaaaatttcctcttctttgtcttaattttgtagtggccagcctcctgcaaatgcatatgcttccagaatggttttaaagcaagagtattatcatatgatatgatttaaatccttgtagtctatgccatacagggggcaagatttctgttcatagtgaaatacaaaatatgagcaattaactccaaatttctcaaaagaatggggaaaatattcctctagttttttttctgtttttactaatgacctgttattttacacatgatatatgaaaaattaaaaggaaagcaatagctaaaaataagtaggaaaaatacttcagcatgctgccagtattgctcttaaggcacctgtgggagcaaacattaaacaacgagttaatggcttattcagtggaccccagagtatctcatgcaaaatgccattttaattatttatgcagggaaaagaattttcatcagatacttgagctttttttttaactttcaattcacttttagaaagaaggaaactgggtttatatagagagttttgccttaggaatacaaagtgctttgaaaacattactgtaggttttctgatagaatgagattagatgcctatttttatactcatgcactaggtagaaaagtgacttggacaaagtttgccaagttactgacagaattcagaattaaactcgacactctgaattctaaaacaatrcagtatcaaaaaggataaatactccaagacaaagagactcattcaaaggaaagtggcacaggatttttggcattaaaatacatgtgttatcggatgtattttaaatagcttttgcaaaacagaattaaagataggtcaaactgttaatctgtcctatccttaaataagtgaagttttaagggcatgtaggatatcctgtggatgacccaactggtttgagtaaaacacataatgctgaacaaatacctaaagacaagtcagccacctttgtttttctcgggaattaagtttaacgatctcagtactaagaaagcaatattctttcaggtaagaacacagtgttattgttgtttatttgtttgttagtttacattattttgagactaagattgagattttcctagttgtgtaattgcaaccttaataaaaataaaagattgatgcctttgatayttttcttcaaaataaatagatacaaaacaacaacaacaacaaaaccaaatacttgtaaccttagtctgggttcagcattctcccagctcttcatgggggtcttcataacatcccaaataaaacttcgccaaagaaaacctcgcagcatctggcaagggcatccacatgcctttgtttaactgttatctatagacatctgctcctttctttctgatttttgaaatatttttattacagtattttagctcaacagaaagtgtttatgggtctactacacggcagattctgaagacatgaacatgagtaagaaagtagtttctatagtcacaactctgagaggaagacatttatgtaaataaataattataatagaatataaaagatgaaataacagaacggtttatggagtacacagaaggaagtggaaggaagcccccacgtaaccacggggctacagcagaggaagcccagcctcagccatggttgtagggattggctgaggggttggaggcagctcaccaccatggcagtgctttgggactgacagctgtcagtttggtgacatcactatcagttctttgtaagctggaaactacatttctcagaaaccacttgtcttgaaaagtgccaggttagattttgtcactgaaaygaactcctagaagactgggaagagggaaagcagaaaccatgaagcttggcattttatactgtctgatgcagcaggtttccagagccttccacaaactcctgctgggtgggctacaggatctgcagcttcctccaggctgacatcatattgagtatttctccaatctcccagactctaatctctcagtcttccagatcctaccacattcaggtaaattctcattcctacattaaatcctatatgtagattcctagataaaatcttctatttctctaatacttgtagtgaactttttctcagtaaacccagactgatgcagacaatttcacagagaaagtgaaagctggacagcgttttgaacactaagtaagcgttccacacacaatatggaagtcatccctgtaaaaggaaagagcatgtgcactggaggaatttgaatcctttaaatccttgagagaacagaaagaattcatctctagatgctcacagaattgccctctctcaatccactaatgcagatgatgcattttcctctttaatttaatctctttacccaaattccaagaagtggctcagatttgggatcaaaggtagamaggaagatggcaacatgggacttgaagcagccctcactcacaccaccacatagagatggctcttctgagagtcaatccaggcagggtaagcagagccagaaagggagagggcatcaagctgtagtggcaccatgaggccttagatccagccataactgacattcattcacctcttggatttctcagttatggcaagaaaatgacaaagagtaaaacacttttctataaaacactttgacatgagtttatattcaaaaacaagggtcctcaaaaacaagagtcttggttaatattacagtgtttgaaaaatgtaagcatttcagttactttgataccagtttgtttgtttggcataccaattctgcaatccctacaaactctatgagaataatgttttatatgtgcaattgattttccaacaaatatttattgaacgccaaatagtaccaagcattatactggattctggtccttcaaaaagataggcaaagaagctcatcctcaaggagcttaaattctactgggtacagacataaatgtaggtttgttcttccacaaccccaggtgactcaaatgagaaggactcaccagtttgtaatgtctaagtgacaactgcttgtcagctccagggatgccccagcaacgtttaccacttgcctctccccagttcgttttctccttaaccaacacccataactcatatgggttaggttgataaatggccctcatcagaggctgtgatacaaaaagaaaagcagattccctttttggtgatatctgcaagtactgattgggaccaaaatccaatcgtatggtgactagtaggaaatgtactagcaggaatttacattatagtaggaaatgaaggcataaagatactgttgctagatgttgtgaggttttctttggcgaagttttatttgggagggtatagaaactcccatgaagagctgggagaatgctgaacccagactaaggttacaagtatttggttttggtgtttttttgtatctatttatttggaagaaaaatatcaaaggcatcaatcttttatttttattaaggttgcaattacacaactagaaaaataatctcgatcttagtctcaaaataatgaaaagtaacaaacaaataaacaaataaatgtccctccctaattaatgcatacattctttcccttttgtttcctgccacttcccctgttgttctggaccacccacctccagctggtgagtctgctttccttcctggaatcctcaatggtatgagtattaataaactgctttcatcttgcaggcttgctgttggccatgtcattagctcaggccctggtaacttcctggagaatcacagtgaatttggggatttcagcaggtctctctaaagttgacagaaatactgattcattatttcacatacctgctcatatcccaaacctcttccttcatgcctcccacccacacctttagttaatgaatttactcacactcacatagaaaactggagccaccgtaaggtgacatttaacagtctcaccaccacatctactacttactccaatctgcacctgcctaacctactcttccacctgttaacttagatgaatttgccatggtcttatccaaaaccaattcctcaatttgtcctgaatctcatcccctcttggtatgctcatagacattgcggaaaattattatttctttgctttctgtattagtcagggttctccagagaaacagaaccattaagatatgtataaatatatgaggaagtttattatgggaattggctcacatgattatgagggccaagaggtttcatgatatgctgtttgcaagctggaaacccagaaaagttggtggtgtgattcagtctgagtataaaggtctgaaaatcagggaacccatgccgggagtgggaaggacttgtgtaagttccaaagtctgaaggcccaaaaaccaggagctccaaagtctaagggaaaaattagataaatatctcagctaaaggagagagagaaattttgcctttcttccacatttttgttgtatttgggcccataagaagtgggataatgcctgcccacaatgatgaggtcagatcttctatactcagtcttcttaatattccaaaggtaatctcttcttacagcaccctcaatgacagacatacccagaagcaacctcttaccagctacctggatataccttaattcagtccagttgacatagaaaattaatcttcccactttcttgtatcattacttttaactccggaatggcttattctcatgacacacaaatatgcagtttatgtctttcatataagaaaaataattcattctctattttacctgcaaaggaacccaagaagttcagcgaagtgggagggaaagaaaggacatctgtttgttttagtccatgtgaaaatctagtgtattaagggaaaatgaatattcattttgccagtgctgctaccaagtcagataagatgattatatctcctaccaacaagggtggcaccaacatgaagtcattagtgagctttaggagcaattttgatggagaagtgaggggaaaaaattgataaaagtattatttctaaaataatgggagaagaagacttagacataggaagttaactactacaaggaacaaagaaatggcatggtatggacaagcaaagtagagacgttgattggttttagacggtatcacagaaagtccatccacagtaacatgcagaaaagcagagtttgcatgtatggaagacagagagtgagcagtgagagtctgtggaagacatctcttgattgcttcaatttttcagtgaggaaaaaaccaagctgagagtggggaaggaggaggaggcattggggtatgaaaatgatcagccaaggtctgaaagggtctacttatgaacagacacttctcaaaagaagacatacatgtggccaacaagcatatgaattaaagccccacatcactgatcattagagaaatacaaatcaaatcacaatgagatgccatctcacaccagtcagaatggctactactaaaatgtcaaaaaatagtccaggtgcagtgacttacgcctgtaatcccagcactttgggaggcagaggcgggtagatcacttgaggccaggagttccaaaccagcccagccaacattgcgaaaccccgtctctactaaaaatataaaaaattagctggacatggtggtgaatgcctgtaatcccagctactcagtaggctgaggcatgagaattgcttgaacccagaaggcggagggtgcagtgagccaagatcatgccactgcactccagactcgacaacagagtgagacactgccttaaaaaaatcataaaataaaaagtcaagaaataatagatgctggtgaggaaagtggtatggtgattcctcaaagagctaaaagtagaactgccattccacccagcaatcccgttactaggtatatacccagaggaatataaatcattctaccataaagacacttgcatgcaaatgttcactgcagcaccagtcacaatagcaaagacatggaatcaaccctaatgtctgtcaatgacagattggatacagaaaatgtggtacatatatgccatggaatcctatgcagccataaaaaagaagtagatccattatacccacacaaaaacataaaacagcttgttttaataaacattaaaattattttaagaaagaagtaaattatttcttttttgggaacatggatggcactagaggctattatccttagcaaactaacacaagaatagaacaccaaataccacatgttctcgcttgtaagtgggaactcaatgatgagaactcatggacacaaagaagggaacaacagacactgcgatctacctgagggtggagggtgggaggagggagaaaagcagaaaattaactgtttgtattggatgtaatacctgagtgatgaaataatctgtacaacaaacccccatggcatgagttcacctatgtaacaaaccatcacatgtacctctgaatctaaaagtttaaaaacaaacaaaataaaataaatttggaaatgatctcctttggagaatagcctgtggatatatacagtgtgattccaagcagtccacttgaggttcaccatcacaacttgaaggtgataccagtcatagaattaggtagaaaactgaatttaaccagattgtaggttttccaacctagtgcaagcaagaaagttgaaaacaaggttgaaaatatatgcaaagctattataagagtgattgattatgagcttcattctgagtaaggagggcaatgaggacataatcaaatcaggtaagggccaattaaataacaccagtggagtaaaggattagagtggcaatggaagatttctggactaagagtaagctgtctttataggaagtgaggtaagaatacatgaaagtttgacttttataggggtgctaattattgagcaggtccagtaccactcttgaaagtacatgtctgagatagagtgaaggacaagtgagatgaattcaagtggtgttatatggtctctctcattcatattattgagaagctcggttatttggaagattaaagtcaacagttctayagcatatcatccaaggccctttatgggttaatcctctacttgccctagtttgaatttccactactcttccttatgcactctacacttcagaaatttcaaattacctcagtgkctctgaatattacttttattttcactggctacatctcccactatattaatattgttccctcttcctggaatgctttttccttccttgcctgactgacaaactccattaagctcaatcacctgtaaattttttcctgattattgtgtgtgtgagagagtgatagataaatacataggtaataaatagatggatagatagataatagacagtgtgtgtgtgtattctcttatcaaaccatgagttccttgaggaaagagccagattactcatgtttgtacattttgtgcctaatagaatggctatgtgcctgacacataaaatgaatctatctaaaatgaataaatgtagagatgagcattaacacagtttgtcttcttgacaaaatgttcatactccagtacctaactcattttacaccttcacttatggatatttccatatgaaatcaaagccttctaggttgattgaaaagggcacctgctgctattgatataaagaggaaaaataaattgagcttttttttttcctatttctccatcacccaagtatctttagattgacataacctagaataccaaacgttgatggctcccctcttacataagctaagccacacatttacacatcgtccttatatgtgggaacatcttgttactgaagtctacacataagacagctattttcttataacaggaagggccccattgaataatattattagacttttcaaatggaaaaataatattgttaactgaatattgtaacttaaaaatgattctgtgaatgcaggaagatatctaataacttctaaacgcagcaactaatacacattttgacttagtgcaaagggagtgtggtttgtaagaaccaccactctaggaaccttaaagagaaaaacaactaccatcctggctaacacggtgaaaccccgtctctactaaaaatacaaaaaattagccgggcgtggtggcgggcgcctgtagtctcagctactcgggaggctgaggcaggagaatggcgtgaacctgggaggcggagcttgcagtgagccgagatcgtgccactgcatccagcctgggcgacagagcaagactccatctcaaaaaaaaaaaaaagagaaaaataacgaaaagaacctgattcagggcgtgtgaatcagagtaaccatactgtgtaatataacagaagtctctccaagacaccagacgcacatctaaggaagaagtgtatagcaaaataattattttgtggttcagcccttttctcttactcaaatgttagatgaggtgctgggtgtgctgtcttatctgttctattggtccttctcacaagttactgaagtgactttatttgaccaggacattcacaaattgcccagagaacccaggctttttgatccacagagctgttacttctctctttatggattataaatgtaacactattcacactgggtcttcctgagggagaatcacaaaaggattacaagcttgattcccttgcaagaaacagctagcctaggagatggcagctccaaacaaaatggtaaaatcccatccatccattctgggagggagacgggattgttcccttgaccttgacccccttcgtgggcaggaactggaatggctcgtttcactcagcctccagtccatggacaaataagtgttaacagctcagtgaagggtcaggttgacagccagttgcacctacactttttgacacccgagttcttgtttggtgtctggaaagaatcaggtcacacaaactatttgaaggctagtatatgtggaggatttcactgggtgttaaaagtgggtctcagaaggatggggaattggaaaggagatggtgcagaaggtgatctttccctgaagccgcaccatctgaagataacccagtgtatccatagcctccgatgctcagcagtgtgtatccccaccgttcagcagcttgcatccccaaactcttacattagccgcttctattgctctttttcttgtttgtttctgccaactggtctggtttttaagggcacaggatataggacggggcaggccaaaaaggtaatcatttgggaggaaaaatggggtcagctgttttcacctagcgccaaagttccaggcttgagggtggggtttagccaggagcccctgttctgtatcaggaggaacactagaatcccacaaacaagcagagaagcttcactcttcatttctcttcctctgtcagtagaaagaagccttgagtgagcscttgaaaagtctcccagaataaaacctttagaaatgtwtacaaatagtgatgagtgtatgtgtttatgtgtgggatatctatcaataaataactgaacagaaaagtataaagaaaatcatgagggacaaacatggttatgcccatgaattgaagctgcaactggctgagggattctgctcatctcaataaccaagaaaaccacacgtggggacaggcaaaaaagccttggggaattgttgtgaagaattccacatatactattcttctttttggagaaaaatggggcctcactctgttgcccaggctggagtgcagtggtgcaatcacagctcattgaagcctagacctcctggcctcagcttctcttgcaatcctcttgcctcagcttctcaaagtgctgggattaaaggcttgagccactgcacctggccaaccacacatatcatttagatgaaaacacaataaaagagtgaaagagaaaaaaatattcccactgatagaggatgcccacaaacattgtttgcctattttagcctgggctttggtccaaaaaaatctcctggaaacttacaagcacaatgggcctgcagcttaaatttcaagtatgatctgggaattcctacctcaagacatcaacagcaaatgcagcctgaggtgctgagatacctgtagcaaccaaaaagcacagactgaaacacaacaaaaccaaaccaaaacaaaaaaaaaagctctctcttaaactccctcttcagacttcaacacaacatgagtgtgaatatggaaaactagaattcaaccagctgatccaaaactagtagaaagaaatattcaagtacagacagtagaactatcagatatagactatctgattatatagagataatacagtgactccaaaatgagtaaaatataaaagaattaatcaaacacataaaaatcccagattagtagactatwaaaataaagatacatgtaaataaagtagaaatttgaatattaaaagatatttagtaattgcagtcaaaaactgagtgaactagtcaattaaataaagctgtaaagaaaatcagtaaatttgaatattaatcagagataaatcacttacaatttgcagaaaatataaacagacatggaatatatgagagtacaatatgtaagttaaaataggaaatagaatgtatggctaatataaagtttttaaactgaaaaagaatgaggaaaaacttatatttaaaagtattatcttggagaattttccttacatagaaaaaatatataattcttagattcagtagtacaaaatatcccataaaaagtaaaattttttagatccacagataattaggtaaacattaaccagaagaagaaaaacagtaaaacagaggaccttaataggtaaggcaaactactttcaaaggactgatttttagattaagggcagactactaaagagctaaaacaaaatataaagacaatgaatgtactgagaaagaaaagttcagttcgatatctatacccagctaagcaaaagggctgtattttcaaactaagagagaaaaaataaaaataaaagactggtgcttatccataaaagaattccagcccagtgtggtggctcacgcttgtaatcctagcactttgggaggctgaggcgggcagatcgtctgagcttaggagttcgagatcagcctgggcaacatgacaaaaccccttctctacaaaaaatacaaaaattagccaggcatggtggtgcacgcctgtggtcccaactattcgggaggctgaggtggaagrattacttgagcccaggtggaggctgcagtgagccaagatgttgccactgcactccagcttgggtgacagagaaagacccagtctcaaaaaaaagaattctttgtaataaagcatatatttcaggtataaggaatttgaaccttataaagaacgtctgaaatacagaaaggaatggtgagcaaagaagttactgaagtggtagataagactttaacaagtattaactatataacagcagcagcagtataaacaaaaattattaataatgggttttttgtaaacatagaaaaagacaaattcaattatattatatcaattacctgtgagacaagaaagaagttttcagaggtaatgcagttaaaactcttttaatatagggagggtagacatatacattaatgttagaaatttttaaggcaaatagacatgcaacaattttatggttaacctctaacagaaaaacagaaaatacaatttctaaagaagtaagctttctttggtattgtgtattccaatactaaatagggaagaaaatgaaaaaaaaaagaaacagagaaaacagttgggtggatgcaaatcaaaattaaatattaaaaataaatgcaaacatactagcatttacaatgaatataaatacataaattggactaaatttaaaagcagagattgagtgcgtttttttagactagtaatgtgaaacaatatatgccaggtaaatattaactaaatgaaatctggtatggagatattaatcagacctaatacattgtagtacacaataattaagaggaagaaatatagttattatgcaatgataacttttttttctcaatcagcaggtagatactataacctcaaaatacatgagaaaaatatgaaagaattacaaggtgaacagaaaattcaacatcgtagttgaaaggatatttcatgatatttctttctataattcttttaaaaattatgaaatatttgaacataaataactgatgagataattatatatacacaaatatatataaagcaaacaattagacaatttcttttcaaaaatatatagaaacatttggaagttaagctaaagcaaacaattagacaatttcttttcaaaaatatatagaaaacatttggaagttaagcagcatacctttaaataattatgggccaaagaacaaatcataagaaggaacattagaaaatattttgaaatataaaaacacactgccaaacctgtaaaatgcagctaaatcaggacttaaagggaaatttacagtcttaagtgctttattttagaaaacaagaaagaccaaagtcaaaagacacacacacacaaatatctagaaatgaaagaacaaattaattctaaaataggtagaggaaggaagcagtaagagcagaaatcaatgaaatagaaaatgggcaaacaatagaaaaaaatcaatgaaacaattaaaggtttactatttagaaagatcagcaaacctgataagccttagccaggacaaccaagaaaaaaaagagaaaaaaacaaattaccactatcaagataatacagtactagcataaggatagacaatataggtcaatggagcaggacagggcattcaaataaagcatcgtttatgtgagggaccctcacataaagcatcattgactctcaacaatgctgctaagagaatttaataggaaaagggtagctttttcagcgactgctgctggaacaactgaagaatattttttagttaaaccttaattgaatctcaccacacctaagaattaattttaaatgaatcagagacaaatataaaagccaaagctataaaatgtcttttaaaaagtgaaaaactcattgcaactttgggtcaggcaatcatgtcttctaaaaaatacaaagagcaccaaccagaaaaggaaaatagtaataaatttcacttcattaacttttaaacttctacttttcaaaatatgccctttagtaagtgaaaaacaagacgcatattggaaaagatatttatgtatttaagcaaggtcttgaaccaagcatataagaattcttacaacgcaataataggaagacaagcaatccaattaaaaacgggcaaaggatttatacaaacacttcaccaaagaagctatatgaataacaaatcagcacatgaaaacacacacatctttctttattcaatgaatgcaattaaaaccatatttgagtaccactacacacccacttgaatggctaaaaataaaaagatgtgaggaaactggaattcttatattttgtgtgtgggtatgttaaaggctataactgttggagaaacactttggcaatttcttgtaaatttaaacatacacttggataagatcttgctattccatttcttggtgttacccaagagaagtgaaaacatttgtatacaaaaaaaagacatgtaggacggggcgtggtggctcacaccggtaatcccagcactttgggaggtcgaggcaggcggatcacctgaggttgggagttcgagaccagcttgaccaacatggagaaaccccatctctactaaaaatacaaaaaattagccaggcgtggtggtgcatgcctgtaatcccagctactctggaggctgaggcaagagaatcgcttgaacccgggaggcagaggttgcagtgagccgagattgtgccattgcactctaacctgggtgacaggagcgaaactctgtttcaaaaaaaaaaaaaaaaaaaaaagacatgtatacaaatgttcatagcagttttactcgtaacagcccagaactaaaaacatcccaagtgaccataaactgaagaatggataaaagttgcgtatgcgcatacagtagaatgctacttgggaataaaagtaacaaactactgatgcatagaacatgaatgaacaaaactagtatgctgagctaaaggggagggtggaggccaggggcagtggctcacgcctgtaatcccaacactttgggaggccgaggtgggtgggccacctgagatcaggagttcaagaccagccttggccaacgtggtgaaaccccctgtatacttaaaaatacaaaaattagccaggcatggtggcatgtgtctgtaatcccaggtactcaggaggttgagggccaggattgggttttgcttcaccttccccggaaggtggaggttgcagtgagcgaagattgagccactgcaccccagcttgggcaacagagcaagactcttgtgttaaaaaagagagagggggggggagagagagagagagaaaagggtggaaagtgggaagagggagacaatcaggaaaaataactagtggatactagtcttaataggataaaataatctgaataacaaatcccatgacacacatttacctatgtaacaaacctgcacatgtacccctgaacttaaaagttaaaaaagaagccagatgcaaacgaaaccataccatactccattacgtgaagtcctagaacagacaaaactaaatcatggtgattgaaatggggtggttcccagggcagagtgttgaggagatcactacaaagtagcttgagggaccatttgtggtaatcgtggagtcctgataaaataagtaaccaaggaggacgtgcccgaggttggaaagaacaattgctctaagagacagctaatcacaaccacccactcrtacaacaatcctgttcccaaataccttgctccacacataggcccagcagcacaacctcgttctacacacagctcctcagcaccaccctccagcccctgccgcttttagcagacagccccttcgctgctgtgctgcctgttgcacccttggatgtatctttgtactttctctaataaatctacctttctttacccacaactgtgtcagtaaattcttttaccccctgcaacgccggccccagccagccacgtactctctcccgtactcttcccatttcctcttttccaactgcaacctctcagcggacagcgtccaagtctggagacaactgatggtcccggacaggggctactccccagcgggccagaatgtcctagtggaaagacagctgactgccaccacctgattgggtgagagtttagagttttcctttcagttgtccagtggacaatctctagtatccctctggcaactgaaggcaatgggccagggccactccctggtgtagcctgatggccaggggatgaacaggtttggctgccttccccggaaaggaggaaggttctctcctccttattctggtcaaaagtccccagtccctacatgtgatgcatctggaggcagaagctcaaacaggacaaatccacacatgttctggggaactcagaccccatctttctcactctaaattctcctatgaagacagccagccaccatgctctggatgtcttaagtcaggtgatctcaaactgcaccaggacagtgagtcttcccgcaaccttttatcctcgtacctggattggtcactcaacataattcatacctgaactgacctggggttgctcacccactgttcattcagtgtaaggttctaacaccgagagatcctttctaataggggggatgcccctttggaaagtgcatcttggagtctgtcagtggatgtgagtggatcccttttcccttggccagattgcctgagacaaattgcagtacatgtccccagcagacgttctttcccattcccaccatggggyraagcccctctattcccttagactcgccccagggttgcattttaaagcagcaaggaggacggggtcccaggtggggaaggrcaattgttctgagagacagctaatcagagacaacccactagcacaatcctattaaaattctaaaatgtaattgtgatggttaatactgagtgtcaacttgattggattgaaggatgcaaagtattgctcctgggtgtgtctgtgagggtgttgccaaaggagattgacatttgattcagtgggctgtgagggacagacccaccctcaatcttggagggcgtcatctaatcagctgccagcgtggctagaataaagcaggcagacgttgaaagagcagacttgctgagttttccagacttcatctttctccagcgctgaatgctcctggcccttgaacatcagactccaagttcttcagcttttgcactcttggacctacaccagtgatttgccaggggctctcaggcctttggccacagactgaaggctgcactgttggcttctctacttttgaggtttggggactcggactggcttccttcctcctcagcttgcagacggcctattgtgggacttcaccttgtgatcgtgtgagtcaatactccttaataaactccccctcatatatacatctagcctgttagttctgtccctctagagaaccctgactaatacaattatagtaatgaaaacttcaaggtccaaaaagagccaagatattcctaaagaagaataatagtggagagagaggggggttgatacctaagaactgtattacaaaatcctactagtaataatgtggaatttgtgcaaggataaataagaaggaacggaaagtgctccgaagtgtagccatgcatttgtggaaacctgatctaagatagagtgcttgcaaatcagtgggaaaatgaagactttttcaatacattgttctgggacaattggttattcatatggaaaataaacagaatgaaattaagtccgtacttcaaaccatacacaaaagcaaactccaggtacattaaagatacatatgtgaaaagcatttctgtaaaagttttgagaatagagtatgcaagattatcttttgattttaagatgagaagggattttttatacaagaggaaaatgaacgaaacataatacacaatattaagcaatttctgtacaacaaagttcagcatacacaaagtaggaaagaaatgataagctgggccagatgcagtggctcatacctgtaatcccggcactttgggtggctgagatgggtggatcatttgagtccaggggttcaagaccagcctgggcaacatggtgaaaccccgtctctacaaaaaatacaaaaaaaattgtatttttggtggtcccagctactcaggaggctgaggtgggaggatcagcacctaagcctgaaaggtggaggctgcagtgagccaagataacgccactgcactccagcctgggtgacagagtgagaccccatcaaaaaaaaagaagaagaagaaatgacaaactgaaaaagacatttacratctatgtaaccaaaaaagaataagtaatcaatacgttgaaggaattcctttgaattgataagaaaaaatggccaggcacagtggctcatgcctgtaatcccagcactttgggaggccgaggcaggcggatcaccaggtcaggagatcgagaccaacctggccaacatagtgaaaccccatctctactaaaaatacaaaataaattagccaggcgtggtggcaggcccctgtagccttagctacttgggaggccgaagcaggagaattgcctgaacccaggaggcagaggttgcagtgagccgagatcgtgccatagcactccagcctgggtgacacagtgagactctgtctcaaaaaaaaaaaaaaaaaaaaaaaggcaaaaaatgaatagccaattcacagaaagcaaaatgtctatcaaggatatggaaagtttccaaaactcattagtaaccataaaagtgctaattataaaattaatgagctatgtagacctcttagcacagccagcaatgcgtcagtctcgtaaaagtgaaacattgttttattatttttttaatttgccaatgtttaagtttgacaagattttcaaaatctttttgattcaaaacccttcataggttgacattrccaagtgctgacaaaaatgtgaggcaatatgaactcttacaaacagctgatacgagtgtaaattagtacaaccatttcagagaaatatctgaatatagaacttcacacccatttatacacaacatataaacaaggaacatactcaagagcattcactgaaacagtgttggtaagagcaacacatatgcatgagtcttccttgaaggaaagtgaagcatagggacgtgggtgacattaatagggtcactcagataataactggtggaaccataagtcaaacccagaagtctgaccctacagtctccatactaaccatgccactgacctgtagtatataaatactcactagccattaaaaagaattatccaactttgtgtttactaagatgaaatgagctccaatgtataccattacataatcaatgctaatgaatgcaaataatctaacagaatctacagataacacattacaactaataagtaaatatagaaaatttgctggtgacaaggtcaatatatgaaaattgtttttatttctatacaccagcaacaacaattacaaaatgaaattttaaaaagataccagttataagcacacaaaaagtcaaatacatggaagtaaacttaaaaatatataataattcaaagaaattaacaaatctgccaggactggtggctcatgcctgtaatcccagctacttgggaggctcaggcaggaggactgctggaggccagaagttcaagaccagcttgggcaacatagcatgatcctatctctaataaaaacaagaagaaaaagaaaaagaaattacccaggtgtggtggcattcgcctgtaatcccagctactctggttgctgaggtaggaggatggcttgggcccaggagttcaaggctactgtgagctatgatcataccattgcactccagccagggcaacagagcaagaccctgtttctaaaacaaaggcagaaagaaaagaagtttacaaatcttaaatcctaaatgartgtgtgtataaatacatagatatacccataaaagattaataattcaaatacagtaacattttaaaattctacttatcagaagacatcactgagaatataaatgaaaccatgtaacaagaaaagacacttgcaacacatataaacagcaaattatttgtatctagaataaataatcccttcaaatcaataagaaatgacacataactyaatcataaaatgggcaaaaagaatatcctttcacagaaagggatacaaataactactaatgtggaaggtactcaccctcatkattaatctggcaaatttgaaataaaatctcaatgagacactattaaccatgcattataagggctaaaattatgaaagacttacaactacgttttggttgagcatgttaagtaataataggaactctcatccagggctcatgggtatgcaaattggtacaatcactttgcaaaaacagtacttactaaagttgatgtataacccagctattccactcctagcatctactgaacagcactgcatggacgtatgcacctaaagacactttcaaaatattcatagcagcttaatgtattatagcctcaaactgaaaacagaaatcatccacattgaagtgagcaaattaccagggggacactgacgttaatgaaataccatagagcaataaaatgcactacagacagctatactcacaaacataatctcaccaacagaattttgaaccaaaatagccagacrcaaaagaatataattccagttatataaacttcagaartaggcacacacaaaaaaatgatctatggtattaaaactcaggaacgaggagagagaagtgacttattgcaagaggcgccagggcagtagtttggggatgtggccatgttctatttcttgacctgggatgtgattatgttggtgttagctttgatagttctttggattgtacatttatattttgtctacttttatatrtgtttatcattcttcaataaaaaaatgtaagaaaacaatattcaagacagaatgtgtatttttcatattgtctgcctgcatgtgcgtagcttatctttttttttttttttttttttgatggagtctcgctctgtcaccgaggctggagtgcagtggcacaatctcagctcactgcaagctccgcctctcaggttcatgccattctcttgcctcagcctcccaagtagctaggactacaggcgtccaccaccacgcccggctaattttttgtatttttagtagagatggggtttcaccatgttagccaggatggtctccatctcctgtcctcgtgatccacccaccctggcctcccaaagtgctgggattacaggcgtgagccactgcacccggacagcrtagtttatctagatgtacagtcaaacactgtttaatgatggggatacattctgagtacggcatcattagccattttcctcatagtgtgactatcataggctgtactcacacggactgagttggtacagcctactacacacctaggctgtgtggtatagcctattgctcctaggctacaaacctgtacagcctgttactataatgaatactatcagcaactggaacaaaatggtaagtatttgcatagcctaaacctgactaaccatagaaaaggtacaataaaaatatagtataaaagacaaaaatagtatagctgtatagggcacttgccatgaatgaagcttgtgggactgaaagttgctctgggtgagtcagtgaaagtggtgagtgactgtgaaaacctaggacattactgtacactactgtagaatttataaacactgtacacttaggctatagttaatttataaaacaaaaatttatttctttaataaaaaagtaaacttatcttactgtaacttttttactttataaactttttartgttttacctttttgactcctgtaataacaaagcttaaaacaaacacattgtaccactatacaaaatattttctttctttattctttatattcttattctataagctttttctatttttaaattttttgttttaatttttcactttttaaatgtctttgttaaaaacaaagacacaaacacacaaattagcctatgcctacacagggtcaggatcatcaatatcactgtctttacctccacatcttgtcccactggaaggtcttcaggggcaacaagaagcatggagctgtcatctcctaggatactaacgccttcttaaggaatacctccttgtctttgttttgtgttgctataaagaaaaacctgaggctgggtcatttataaaaaagaggtttatttggctcgtggttctgcaggctgtgcaagaggcatggcgtcagcatcagcctgcttccactcatagtggaaggcgaaagggagctggtgtgtgcagagatcatatggtgagagaggaagtgagaggaggtatggaggcctcagtctcttttttttgtttgttttttttgtttgtttgtttttgagatggagtctcgctctgttgccaggctagagtgcagtggcgcgatctcggctcactgcaacctccgcctcctgggttcaagccattctcctgcctcagcctcccgagtagctgggactacaggtgagcgcaaccacacccagctaatttttgtacttttagtagagacggggttcaccatgttggctagaatggtctcgatctcttgacctcatgatccgcccccctcggcctcccaaagtgctgggattacaggcatgagccaccgtgcctggctgtcagtctctttttaacaaccaactctcatgggaactaataggctgcgaactcactcactcccgtgacccgtccccatgacccgaattcaaacgtttcccattaggccccacctccaacgttgggaataaattttcaaggtgagattgggagagaacaaacatcaaaactatagcactcctgaaggatctgcccgagactattttacagttcagttgtttaatactcaggagagtgcactttaaaataacaataaaaagtatagtatagtaaatacataaaccagtatcattatcaagtattatgtactgtacataatgtgtgtgctatactttttatgcaaatggcttgtttacacaagcatcaccacaaatacatgagtgatgactgcattgtgctaagatattaggatagctaggacatcactaggcaatagggatttctcaactccattataatcttattggaccatctcatatacgtggtatgtcaatgttatatggtgcatgaatgtattacataactaataatagtgacatttgagaataataaagacgagggacagggctggaaggatgtagtggatactagatatttttggctgtccaatgtgtttgaaaattatccctacatttaggcgatttctcactttgtatttcaagctacaaagcttgcctgtccagatttaatggtcatattatgttagtttccaattcagactctccaatcatcttggagaatcctttaggtatcttagatacctaaaattcatcccttttctctgttaagaaccagagtggtgtctgttttgtgttgggggaaatagtattaaaaacaaaatctcctaccaacccagaaaaacttgctatataggtagaagagaaagaagacaattttatcgtcgaatgagcattaaaccagaatgtgatgtgcattccacaaaatctgctaagggattgcaaaaacagaaggaaacctcacccgtttatatagccaagtcctcaagttagaggacttgacagcaccatttgtcacatgtaattcatcctaaattcactcgatatttgggatgatcatttgtgtgacttaattggatttatccaattgagaagtaaactcgtctttatgacaagaggtagttttgcaacttggagtgagatgttcagtggagttaggctcctaccctcccacagaaactgggaggtggggtgcttttttgcttaataattaaatttaaaagaggtgattcctggtccttgagaaagacatttctgcattgtaaagctggtcagaagctyatttagctttaaaaaatttttccatacatttcagagaccaagaaatgacataattacaagtttcctaaagtaaacgctctaagaaaaggtaagggagacattctcttgcttttaagaggggaattaagcttctaacttcaatttttatttgtccttacattagcaacttaaaaacccggtgaatgaagagataaactatatttaataatataacctcttacacattttgaatttttttactatgcccatatattatcacgtatatacatatatttctatttgtacatttgtatatacacatatataagtatatgtgtgtatttttttaagagaaaactaaagtagaaatgctcattcagttcagagatatggagagttaaaaaaactcagtttaattatttccagtgcaatacctattagtactgcaactattttctccattcaaatggcaatactgaatcaggctaaattcctagtagcaattcagaggtaaattaatacttgttaattcaacaaagtgctgtaatgaatcacagggttgaagggtggcggtgggggttgggggcagggatttggatttgtggctgcaatagcacctccaattttgtcatcactgtgtttaaacagcattttaatattttgaaactcagcatctccatttaaaaaatacagtaagtctaattgccagcctcatcagggtcttacctggttgattaaaccttattgaaaggtctagcgggggatttccaagctactcggttgtctaataagcttgtattaagtgattcctctcacagtacaagcaattcagagacataagggacctagttagggcatagtattaaagtgtctggtgagtttcttaattaaaaaaaagaatctacaataagtcaagatattaataattgtttaaaacaccacccttacttcacttaaaaaaagctaataatctatacatgaattttgaatatttttatggctatgtattttattaataattattttcaaacaaatataaaatagcatgtgaaatatagttcttcaccyggggtcaccaaaatcctgataaaaataagagtgaagcaagtgagacataaacgaatttttttattcttgcctttacctatgatggcatttaaacaataccaaaaaaagttttcatggaaaacaccctacatcatggccatccattatgccaaattaaatatatgtaaatttgcttttcctatttctcatgtgaaatatcccaatatgccccagtatccaggctcatctaaatcgtaaaacccttaaaaagtcagattaaattccacctcttcttttttttttttttttgagacggagtctcgctctgtcacccaggctggagtgcagtggctcaatctcggctcactgcaacctccgcctcccgggttcaagcaattctctgcctcagcctcccgagtagctgggattataggcacccaccaccacaaccggctaatttttgtatttttagtagagtcgggatttcaccatcttggccaggctggtcttgaactcctgacctcgtgatccatctgcctcggcgtcgcaatgtgctgggattacaggcatgagcaaccgcgcccggcccaaattcaacctcttctaagtaaatatctatactttgtccaactcataggacttgttctccaaaatgacacacaatcattagtctaaacctcacaatttagaaatcattgcccatggtctggcactattctataactgttttattttccagaatagattttaagttcctagaagccttttctcaatcatctgttcacaggtaaactattccaaattgatggaatccttcaaacaccatgatgatattcttattaagcctcttacatcctctgcattcttctcatgttggattctaatacccgccttaggaatgctggtccctattctattgattgtaatttcatgcttgtttttagagttggagcaaacactagggtcaaattcagcttttgaatttcatcttattttcacttccataggtagtaatttattcacattcatttctcatttggagttttttgttgtttgcttattttcctattgcagtttgtttttctttcccaggaatatttattcttagtgaacctcagatagttattttattattgtggttccagtttccaagggtcattttatactcattctattgctaaaattcacctcttaygaaatgtcacagggaagaagagtttgaatgggtaaaacagatagaagacaaagtaccaggatcagattaaatgcatttaagaaatctgaagaaattcaagggaaaaacagaaaaaagtattagcaaaaacrcataacctgccattgtgaggggtgactgtggcaaggcacttgaaattgccaagagaattaccagtcatgtctcagccctgcctcctgtggttgtcaaaataagggtccaggacagctagactgctgcaccctttcagcaaacagtagaatctgttcaagcagtgtatctataccctaggcctgaatctgaatatggtcttgattctgtaagtctgttcctgaactcagtctccccctccaccccttgctccaagcttcagcagacaatcagatttcaatccctcactctctacgaaggtctttcatgaatcatctcttagaaattgatgcttcaaaaagggaggtggactgtctttcaattatcatcaggcaatcaaatttcacccctaagaccaccactatcaccacaattgccaccacactacctgttatttgaaaggtttagtagccattgaggagagttgtgaattgtgagaattcttgatgtctcctccccataatgtccttcctacatcaattttacaaaactaaagatagctgattcatgtctttggcacaaacacctaccaaatctgtagcagttcatgtagggtttagcaaattcacttattttaattattcttgcctctctcttcctgtttttgttttattttgtctctttgttgttgcttttgttttgattgttcttttgttttgatttctccattgcatatgccctatgagtttgttaaacctctgtatcacttatgcaatattgcttttgtttaatgtgataatgttattttgaccaaaataacagaaaactgtgggtcagaattctacttatcaaatataaataaatttctattcaccaaatgtctgatgcagtgttagtcctcaaagatgcagggataatcaagaatcatcccaccaacaaaggacttcatagctgagtaccgcagtttgatccatagacaagccattctaaccacagtgcaatgagaaacccacacactgggtgacagtgcagaaagatttgtcaaaacaaactgagagaacacttcccggaaaaggtgatagttcaatagagttttaaaacattgatagatgaataggggacattagctatttcagcaagagaaaaaaagagtagataaaagtcaaaggtaagaaaaagctgtaagaatgtttcttactattgattaatacactgcaaacttttgatgcttctccctgaattgtttttatctaccactcaatttcagtgtaagactactccccccaaaaaagaaagaaaaaattaaaaaggaaattgtcctcctgttgatgtaataagtcacaaataaataaagttattatgtgttacaagatagataacgaagtaggtagaaaacttataaatgtcaactctggaaatattctgcctttacaacaattaaataatgtcacaaaacaaatacaaaattatttaaaaggttcatagttgttttgttttgttttttctaaaaactagtaccttaccaaatctcttgtcctacaaagatagcgaaggatacaygtcttgctatttctccttggaagagacatcttgctcgaatttgatttgtatatgaatgaaacattcaatgtgctaattttctggttaatattcccctttggcacgtaccagcaaaggataattggcagtaatgtgatttaaacttacttgaatttgtagctgttaattgaaccttcacttttagtaactctgcatcacagcatagaaataaatttattcacagaagatgttcccaaatctccttctgaagagataaccatcagactcggaaagtttcagtatcctcccttccatctggaatcaaggggatcaactctaaataacttctagtattatcttctaatctcacgagttgatgattatggaatgggctacttacctatttatctctcaaagaaaggagagcgcagtacaaggcaagaaggagtcattaatccaaggaagggactttgaaataatttcagtgaatgatgaacatagtcaagaggtgattttaaattgtaatgatggagaaaggaatcagctgatgcagattttagaagttgtaccaggaacaataatgagaaaagaggatacttaatcacattcacaaaagaattataggaatacataattaaagcaatgataatgagtaataaaactcttggtgagatatctttcaaatatcactagaagtagagtacgaagcaaaaaagtcttctgtgtcagtgatgtagattttgcatgaaagttcgagaagacacttggtaaagtgagaaaaattttcctagagctaaatgtaaatggacattgggtatgtgatagaagggtttaacaaatgcttagggtgtacactgtgcaaagacacaaagcaaaaagaacaagacaatttaacattttaacatattctaaaaataggggagtaaaaactagggttttatacataaagatgatgaaaaattgcaaaaagaaaagcaaatgtccttggaaaatgcaaatgttagcatggtgaaacaacagaaaagatttcaaggattggagaawaaaaggagaataggtaaatttgtaaatagaagcattattagatgcataagcagaatcatgacaatgaatgaaatacactgcaggaaatcatcctggccaagcgataagttctctgaaactaaaactcaaatttatattacacaaaggaaagtgaggacaaattaaaaataaggtttataagcatccagagaccacatataatgtacacaataattagcaaaatgctaaggaaataaaattatagacaaaatgataggcagataaagagctgattgttacatatataagcatatgtataattagttacgtacatgtgtatatcagtaagacaatttattaataatcatccctgatggcctatatgtaygtatgtgtatgtattttgaatccttctttgaatcagtcttaatgtcttattggttctctcatgaatcagtaagtcaaataaaatattcagcatgtattctttttatatttttgtgagagtcatactcattcttttaaaatattttagtttatcttttgaacatctataatacatatttcagtatatactataaggagcaacacacaagaaaaaaaaatgccatgtctgtacgtaggtatgtatatatgtatgtatatagagaatataatattttacatacatatatacacacatcgtatgacatttaaataagaattaaatagttacatagcactatttattaaacaatagtacatagcactaaccagctgctctatacattaattcatttaattattgcaattaccctataaagtagatgtgaggtacataccactaggaccacattttagaaatggggaaacagaaaaacaatgagcaaacatgattacacaaacaaagtggcaaagctaagattctgaacccatgacatttggctccaatggtgtcactcttaatcttacccaaaattctttctcactttctgttgtataaaaatagctgtgcataggcatacaacattccctttaaaggaaattaacaaatatttttaaataaatatatgaaagaggaaatctagaatgttagatcttaaattgtattttctttcctctccccaaaatgaattaagtgtgattgcaggcttcacataaatttgaacactgacagcaaagcaattgcaaacagcagcttaacaggtgagagactacttagtcaaactccatgcttacaggtaatctagacttgatgaagtttaccccagcgcactcagaaactactgattcaatctcactgccattacctcctatatttaaagactcgttgaggaatcataagatcccagaagtctgagcaaatacaaacatatttacaaaaataaatgaataacatctttattaggaattgcagactagtagacccaaggaaggatctggaaggattctgcagcaacaaataaagggatcagtgcccaggacttaaccaattatggggtgatgagaaggaataaatatatattcatcaaaataataatttgctaaattcctccttctttgaagcaaaaacagactttgtaaatatgttggggactgttgaggaggataggtggggtaaatatgggtgaaatgtttaactctaatcctatttctaacatttcctcacatatcagtttcccaggaaaatgttttaatttcaccttcttatgcttgtatgacgaacataactgaccctggatttgagcaacctggaagtataggaaccatgccaatatacactgtattacagttgtgtccatactcaaacttacgaggaaagtaacttcttagatacagaaatagaaaattgaaaaaataagctccaattctgtctttcctggtgccaccttagctcagccaatctgggcttctatttctaactaaacaatggatgtctttcctcattattttaagtgaaattgttttgttgttaatcacaaccatcctttttttctttttcagtttccttcccagttccttttgcccagaggcttcagtttcactcattttttttttaataaatccaacatttcttgttaaacaatgtggcacatttgcacatcaactaaagcttccactcggttctgaggagaaggtgtgctgggacggtccccttctaaagctagtctaggactggagggggagggaactcaacaatgatactgttaatatcaatgtgcctggagtaaatgattaaaagtcggccaacgaaaacttcaggaaactgaaatcagaggttggtttttctcttcatctctaggaattcagttatatcccatcttttttgatgtattgaaagtttttttaatgtatgtttcctgctcctgttatccatgaaacatgatatttttattaacttattgatttatgtcctgttgaggacatttccaaagtgactgcttattgctgcttatcatcttcaaatcctgttatttatactttcttggactttgctttgggaaaggaaacagctgctacaaatgaataaagttagccttaatgtctcatttatgatccaatattatttatctgtcaaacccatctatttaaatcaggtgatagctaccaaagttatccaacaatgcaagcaaaatgtcatttgtgctactcactaagattaaagacttcgaaaagtcctttctgagataaacacagctgatggctatgtgattatttggttttcccaaagcacagcaacaaattagggtggagaggttaggtagaatatattgacaaatgcaaaaagtgacatctgatgagtgagaatatagacaggaaaaaatttatatatatatatatakatatatatatatgtaaagatcatatgcacatacattaaaaggtaaaatatccaaggctatttagtatttattaataatttgctctctagatgttctgcaagttattcaagacaacttgaaataaaagatcaaggcatacagtgggcatctcacaggtataccataaaccaggcagtgcagaaacatcatattaaaataggaagaagyagaagaaagcaaacatactgatgtggtcagttactgtgaatggtattaatattaccttcaaatgttttcaaaacctgaataagaaaaataatgtgagaaatataagcctcaaaatttttaaaaagaaataatagtcaacatttacaatgttttcttactattataagttattttcatatattaatttagtcaaagctcaagaagtgcttatgattatagccccgttttcttttttaattttattttttagagaccaattctccctgtgttgcccaagctggtcttcagctcctgggctcaagggattctcccacctcagcctcctgagtagctgggattacagaggcactagacaatgtgcccagcttagccccatttaaaagataagaaaactgaagcacagatatcctaaacaaatcgcctgaggtcactcagagggtaactgatggaaacacggttcaaacctggataggcagagttgtgaattcataataatatgaattccttaagagggacaaagcttttctaaaagaagtttattaactgagttcttacataaagaacgcgcagaaatatgttggtcactttttttaaataggggatgcctttaaaatgtgtaccaggattttttttgtttaatggcctaagaacccaacaataaagcctaactctgtgaggcaattttggtagcaggtaagctgatttgttcagacatctgttcgacatatttgacaagtcactgatagggaacacaaaatgaacaggatccctgatctcaagaaggctgcaggcccttayggatcaaaacgaagcaaacgaaaggacactggagtgcaatagatgctagaataaatgcagattttacatatgcaatgaaagaggagaggtaaatttactcgggggtgggtcaagacaggttttactgaaaagcgatgtataatgtgcataataaaaggtgaactggaatgcaaacaaaatttaaaagcaggaaaagaggatctaaggaaatgtacttaaggcgatataaagtctttaagaactagaaaactatgtgtttagaggcctaaagttagtgaagtttggatacctaattttcttctattttaattctatttcagtagaagcttaaactttcatcaaatccatatggtgtgattgtggaaagtacatgttcttcaaccattctttaaacgtactccttcagagtccgttgcagtggagcctacagaaccgccttttttaatatgcttcgtgggtggctttatgtgcagggacatttgagcatgatagagatcattttagttgagaatgtttttgaggttttaccaggctctcacttcaatcaaagatcawctcttctgtggaatgctgtattagatttagggtaacattgcctcaacattgcacctagagaattcagttaacaccaaaatatgcatgcatgtaattgaacaaattggcctgttaagtgcaatttttaataatgattatttgcaattataatttggagaacatctgtaaaaacaaaaccaatagttttaacattgtataatggtatgctgttctttatgatagttattagatagcatggtcagttgagtcgaaagttatctcctctgttctgaggacaaagtctcatcattggagacatgtaatatcaagatatgcatgtggttgttcctatgttttacttgatcattcagcattattctttacctgtggttggacgccagcctggcatcagcttgttgagagagcacaaaagagaatcaaattgaattttcattgaaaatgatagtacactagattttttcttttagaatctgttgtaccatgcaacaaagttccaatagaaaataattatagatatgtatttttattaccttcaataatcatagttggatgaatgttcagatagatctccctcgttgaaaatactatgtaataaaattcaggagcagaaaagggtgactctccataattctacaatgttcttccacctactccccttcactcacaatttttctgtatattagaaaagcagagtggcactggggtgctgcagtcactcagactgactcaggacaggcaataatgaaatatttgacaattttgtagccgctttttaaatcattcgtagcttaaatttagccacagtgggagtacttacatcacaaaagtcagcagatgtggcaaagcactaatttttttttttttttaattttacgagctggtttaccagcacaccacagctatagaattgaaaaacaggacttcaagtttggaggacataagcttaaatccttactttgcaatcacaacttacattaatttagataacctttctgaacttcagtttaacttttctctgatagagataaagttacttactttgatagagaattaagttgatataaaataacttttagttaaagcactttatcatttttaaactacacctaatatatcatactagccttgtaaattgtgccccttgtgttttaatataataaatattctgttgaaactgaaattgaaattaccatggcccttattaccaataatttttcagattagaaaaagataattccctcaaagcattctttagaatgtcagactccttatgcaattacaaaataacacagtctgaagaaaaattattcgaagagaagtttcagtagaggccacaaattcaaacaacaaaatcttgccttcaaacaaatgaaagaatgactaattttttaaaggttaattgcaaagtaaataactgtcttagtctgtgttttgctgttgtaacagaatactgcagagtggataatttatgaagaaaagaaatttatttggcacatggttctggatgctaggacatccaagagcatggccctggcatctggtgaatggcaccccatggcagaagggtggaaggcacccttccacaagatagagagataagtccaccttgcacttttattaggagcccactcctgtaataactgacccactgcttccatcggggcattaaccttttcatgaaggtggagccctcataagctaatcacctgttaaaagccccacctcccaatactgttacattggcaattaaatttaacatgtgttttggtggagacattcaaaccacagcagtaaccaatcatgaatacttaatcttttttatttctcctaagaaagtgtatcttctttactctatgatgtgatgagtggttaagctgtcctgttatttaagttcttaaacttaaattttaaattttcttaaacattaatttttaagttcttaaatttttaagaacttgatagtacatagtggtattgatttttttaagtagaaatttgtgaaaagttcatggatgcatactgtagctccataacagcagaaaatatgtatgactagatattaaaatattgaatgtaatgttatgaaagaatcaaaggtgtttaaagacacctccttccacactgagaaatcaattagcagcactgtccaatagaactttctgcgatgatggaaatgttttagacctataccgttcaatcgggaagccagcagccacaggtgattcttgagcacttaaaatgggaaaatgagaaaacgaactttttattttattaaatttaatgaatttaaatttaaacctaagtagttacatgtggctagtggctactatcctaaaagtatagactacacatcttatatgtgttcatacttgtgtttgtgtgtatagcgattgttagaaagaataaatggagtaagctatacttgcagcatttatttaagaggctaaaaacctcccatatctcctcctcattttaaagctatgtaagagtcatgaatcacatctcctgcggcacctgattttgtttttatgctgtaaaactgaaaagaaattacttttcaagcttggtaaggggcttactgaaaggtgacagcgtgctggcagccctcacagccctcccctgctctcagcacctcctcggccttggcgcccactctggccacgcttgagaagcccttcagcccaccgctgcaccgcgggagcccctttctgggctagctgaggctggagccagctccctcagcttgccaggaggcgtggaaggagaggtgcgggccgtgacgccagggttgcccgtgacgtttgcgggccagcgccagttccaggtgggtgtgggctccgaggccctgcactcagagtggtcagcaggcccaggcagtgaggggcttagcaccccggccagcaagcagctgcggagggtgcactgggtcccccagcaatgcccgcccaccagcgctgcgctcgatttctctcctggccttagctgcctccccggagggcagggctccggacctgcagcccgccatgcctgagcaccccccacccccccaccgtgggctcctgtgccgccagagcctccctgaggagtgccgccccctgttccgccgtggcgcccagtcccatcaaccgcccaaggactgaggagtgccggcacaaggtgcgggactggcaagcagctccacctgtggccctggtgcgggacccagtgggtgaagccagttgggctcctgagtctagtgggggcttagaaaacctttatgtctagctaagggattgtaaatacaccaatcagcactctgtatctagctcaaggtttgtaaacacaccaatcagcaccctgtgtctagctcagggtttgtgtatgcaccaatccgccctctgtatctagctaatctggtggggacttggagaatctttatgtctagctaagggattgtgaatacaccaatcagcactctgtatctagctcaagatttgtaaatgcacaaatcagcactctgtgtctagctcagggtttgtaaatacaccagtcagcactctgtatctagctaatctagtggggaagtggagaacttttgtgtctagctcagggattgtaaatgcaccaatcagcaccctgtcaaaacagaccaatcagctctctgtaaaatagaccaatcgactctctgtaaaatggaccaattagcaggatgtgggtggggccagataagagaataaaagcaggctgcccgagccagctgtagcaatctggtggcgtcccgttttacagtgtggaaggttccytcttttgctctttgcaataaatcttgctactgcttactytttgggtctatactgccattatgggctgtaacactccctgcaaagggctgcagcttcycttctgaagccagtgagaccatgaagccactgggaggaacaaacaactgcagacgtgccacctaaagagctgtaacactcaccgcgaaggtctgcagtttcactcctgagccagcaagaccacgaacccaccagaaagaagaaactccaaacacatccgaacatcagaaggaacaatctccggacacgctgcctttaagaactgtaacactcactgtgagggtccttggcttcattcctgaagttggtgagaccaagaacccaccaattctagacacattactacatttaatatttgttgtataattaatggccttaggtaaacggtaaacatataatgttctattttctcaatatttaaatagttgtgtctctaaaaaaaagtaatgtaaaatctatttcagaagccagtgtaagaaaccattttaaactctcctgtttgtaacttactttctttttaccatttaataaatagaagttatttcttctttaactccagtcttttgactccttcatgttattcatagtagataccatttttaaactaaaatgaatacaatctatcacagaatttttagtgtaataattcagtttttctttttacactatcagctgaagatgagtaaatacctttatttcttttgtattcaccaaaataatgtgtttaccctaaatgacttgtaacaaggtgcaagatacctaaataaatgcattatttaaaaatcttgacatctgttaaaaaatagaacattttttaaaaatcaaatgtcaatatgttaagagaaatgaggttatcaaggttcaatatatgatggtttttttcttccttgacatttaacccatcatattaaaagcttcttcaaaggaaagaaatatcagcttgtcacctggagattgaaattgagctgctctaagacaaactgctgttccttccctatgatgaaattcataggatggacaaaaatgtcaggataaaaataggccacctgggaaaaaaagccatcaggagaagaactgtagctattgttataattacaactaaaaatcatttaaaagccagttatttttccctagtagcacatgaaagaacgtctaacacattgatttatattgttaaatacttaggtgagaagaaactgtgataagactatgcttatggcagtctgtggatttaatgttaataaaagatgaatcatggataacatggtattttaaagaatggcaaatattttaattcataatatacaaaggacataccacaagctggcattttcaaactccaggataacaaaaaggaatatctatatcaatattaaataccatgcaagatattgagaggttggatgccaaaatatacatatcttattaggaaaatctccaaaaatgtaagagtgacagaacactaaataaatctaatgagaattaataacttgcattttcccataatgtaaaacttatcttgaataagcacttagaaaatattattactcctaaaaagtattcccccaaaaaactgaatactgttaaatatcagctttttctccttctgtgaaatggaagaacatgaatttgtgaaggtttcattaaatttaaatactgttagctactgctcactccatattattaattgctcagttttgaatgttacatgctaagaaaactattagctactcttatggatactttatcatgtaagacatattacatgcttatctaatgagattttaatccttgggaagtcaatacaggaatcagtcatattggattttacttaacaattttaacatcactttttaaaaaaacatttttaattatttaggaaaaattatataggatacctaactttaactttattctacactgcttttccaatcaatatttctcctatagacaaataatgcaaggagagaagttcaaatgatgtatgggccaaaatccagtctgactttgaagaaaataaataaccctcaaagtgtagtacacctggtacctgagattggcaaaacagtccttaattttataaatgtgttgaatctgaatgtcaacagaaaaacagggagtgtggggagggagtgcttaatggattgttttggattgtccataaaatatgttacagaaagtcaccaactcctcagaaacaaattagtttcatgcagtgaaaatattggcaagtaatagaacaaaatggcacacttgaagttgacagaaatgttttacatactcattgtgtattggatagcattgtaaaaacacacaaattgccttcaccatacattatcaattccatattcaaaaatgcctaatattttaaatcttcacatacagaaaatgtgaagaaacaatgctcaacagtctactgtttgtaaagggatttcctaaaaagagattgatagtagaataggacctgtctgcatgatcaattttcctgtgcattaaaataaaatttcatttaatttttaccccttggtatttgattttttaccacaggtccaaataactgaattaaacatttcacataaatcatgatacatgttcaccatcagtcttaaaggtcccattttgttttattttattttattatatattttatcttatatttctcaccttcctccctgagtcctacccccattcatctatcaatggaataaatgcttgatttcatgtttttggtttttttttcagtatgagaattttttctaaaacaaggataatgttttgtgaaggtacttgtaattattactatgctatcaatattctcttttctatttatttagtcaacatgaagtttttaagatcagacatgttgattatgaataccattgacgtggtttgactctgtgtgcccacccaaatctcaccttgaattgtaataatctccaggtgtcaagggtggggccaggcagagataattgaatcatgggggctattcccccttactgttctcatgataatgaatgagttctcacaagatctgatggttttataagcatctggcatttcccctgctggtacattctgtctttgcctgccactatccacgtaagatgtgacttactcctccttgctttacgccatgattgttaggcctctccagccatgtggaactgtaagcccaattaaacctctttgttttgtaaatttcccagtctcaggtatgtttttatcagtagcatgaaaacagactactacaaccatagtgtgtaatcaacacattttgcttttattcattcccctaataataatagctatgttgcctccaattacctatttccacaaaacatgtccctgcttggaatgggggcaagatttttccagaataaaataacaaagatcacattgttgagtagtacgatataagcatttgtaaatccaccrtgtaatttcytccagaaaggctgcaccactctatgttcccataagctatggatgacaagcatcaattctccatattcttatcaacacagcttcttttccatttggggactccaataactgtgaagtagtattttattttattttgcatttatctgattactaatgtggttgcacatctatacacataattttcagtcattttgtgccatttatatcctttgccaatttccttactaattttttcatctttttggttacttggaagacattctttgtatagttttaatattaaaccctttgcaaatatcttctcccaatctgtcgtccatctgttaatattttttgtaatattcattgctggaaaaatatcctgaatttttatgttgataaatccattgcagttaaatccatatacattgtgcttttaaggttctgtaatgaagtctccatagccccattattttttatggttttactatttgcatttaaatcattaatcaatcagcagtcctcctttgtatatgctatgaaatagaaggccaattttatttttatactttgtaagtctgttttcccaaaacaatttatgaaccattcaaccttttgccactgaacatgataccactttcatctttatctagttcccagatcaaggggtctgctcttgaactctattttgttacattaatattttcactctttatttcctatattattattacttaggctttgtaatacatttatatatcactaagaagatatcctgtttctcttctgtcagctgactttttcacagatatttttgtatctgtrtattttgtatatacgtatatacgttcagttcctcaaaggtactactgaatctttattgaaattacattgaacttatacrtttattttggaataaaaacttttatatttttaaataaagacataatagatttccacatttatttaggtcttccttaatttcctttattacaattttaaaatttctattataaaggtttatagatttctttccaaggttaatttctaaatacttttaaaattttgttgctattgttttatattacattattttttgttttggttggcattacttacttaaatgaatgctgaagaattgagaaagttgacctcatgtttagcaaacttgttcagttctcttattaacactcattctttgttaattctactaggatttcatgcagatcatatctctgtaatcatagagttataatgttttatttttttctcaaaattttcaaaatccatatttcttttacatgaattccaaagaattagccctaatctcaagtgatttattgaaatccaataattaaaattggacatttgttttgctcccaatttaagataatgtatctaatctttaaatgtgatatttgatgtatatgcatcaattatttatatttacattatattttggtataagcttttaacacattaaggaagtttccattcaattttatgagaatttaaaaaatacataatatggtagaaattcaactttataagttgtttgtttcaatttttaaaataaataatgagctttataaaattcttattcagcatctatcaagatatttatgtgatttttactgttaatgagtgaattagaacattgaaaacttttacaaagtgaaaatattcttctattcttctatttatcataaagtaccttttaatatacttttggatttagtaagctaaaaatggtatgctcacatggaattatttccattatgtgtatgacgaagtcctaggaaatgtatgtcaaccactcccatagcctatagaaagctagactcacccagcaacacgtgcacacatatgaccttagcagatcactggcctccagctggtaaaagagttagagaagctgacctaggctgcagatagaggaggtgatttattttaggagaaagttgttggtctgctctaagtctcaatttcccgactgggaagaagttaggagagttttaagcctagaaaaagggcctcctggagccctggatatttaggaaaactgttacccagggtctgacaaaggcctatgaaataaaggcaagaggccatggtaataacaagaaagtactgtgcagagaaagcacaagcagccctggaaccagctagaattccctcatcagcaggggcaacagcatgcaggtggttctcatcaaccagcgagtggttacctgaaaataaaaatttgcctaagaaattttaaatcatgccaaaggaccaagcaaccccaacaggaggctggaccatccattgtcaaggggcttagggagagattatcacctgcttcctgggaagtgtaatcacattttccaacagacaccttcaaaggattcaaaaaagtacctgcggcccggtgcagtggctcacacctgtaatcctagcactttgggaggctgaggcaggcagatcatctgaggtcaggagttcaagatgagcctggccaacatggcgaaacctgtctcaccgaaaaatacaaaattagcagggcgtggtggcgggcacctgtaatcctagctacttggaaggctgaggcaggagaatcgcttgaacccaggaggaggaggttgcagtgagctgagatagcaccactgcactccagcctgggcgacaagagtgagactccgtctgaaaaaaaaaaaaaaaaaaaaagcatttgcatcaaagaatgagtaaagtatacactgcctccagggccagaggaaataaatataaagaagaaaacttaaatcaatccctggggaaaaaattgtcttaacattaggtaagtgtgtcagcatccaattttttctatagatacctgtatgtgtggrgtttttttaattactattagagaaaacacatataatagattatatagaaagaatatagagagaacatgtaatatatataataaacttgagtttatattctttatgaagtacagaatgctgtayattttactcagaactctatcataggtgttttacttgttagtattttatctaaaacctgtataacatttaaattgactgaataagagttgtcaggttaaaagcagagagtgaccatttttttttcctcactactgctctttctaattttgaactgtccttatttatccccagatgaaatattaggccgatctgacatttttttctagttagttattaagaagaactctcatttttcaggggtataaaagttcctttctgcctaatatctgagtatcaacctctcatccaatttaaaacttttctcatcgtcttctccccagtctcaaacaactgggaacagacaggcaaattcttatttcctctcccacagattccttggcgaccttctgtcgctgggatctctctctcacctgtagttcctatcagagacacaatgccttctccaaagcattaacacacgcccgcccctttttactggcagtccacctgatattgtttggctctgtgtccccacccaaatatcatcttgaattgtactcccataattcccgcgtgttctgggagggacgtggtgggagatggttggattgtgggggtgggttctcccatgctgtcctcgtggtagtgaataagtctcgtgagatctgctggtttgataaggggaaatctgtttcacttggctctcattctttgtgtctttgcctgccgccatccacgttaagatgtgacttgctcctcctcaccttccgccatgattgtgaggcttccccagccgtgcggaaatgtaagtgcaattcaacctcttctttctcttgtaaatcgcctagtcttgggtatgtcttcatcagcagcatcaaaacaaactaacacaccaccccacgctgactcttctattagtacagtttcccaggtgggggctattagtacagtttcccaggtgggggcttttgacagtgtcctgttcaaaatcaagtccctcaagtccagctcctttctatttatgtgttataggtctggcctagggcatcttcgccccaacatcagtgggtgggttgcagtgtctcactcttgccatctctcctcttgctctgccagcgataataaaaccttgagacttttttatatctgagtcaggtgccaactgtgtgtctacagaagcacgaagcatacgcatcaagattccttagtgcttttccaaaagctctcctcacgtagcttcaaaagaaatactcaactttcctaaaactctttgtccacggaaattcccatttttaaaatgtcttctaatgaattcattcatttttatgtacatacatcatatataaaatgcatctaagaattcattaaaggtgtacgatggtctagtggtgcagagtttcaggacgtcccttttgcaagtaattcatggatgatctaaaactccatttgagaataaggtagcacttggcctccacaaaactttgcctctattttggtgcttcagcaaaaactataaaaacaaatacttgttaagctctttagatgtgatgtttaaaattgttcaatacataaattcattaaatgtatcactgtttattttctccatgcccttgtacaatggaggttgtctttatatgctttgtactcattcttttatataacaattgtatattgtttattatgcaacagtcactgtactacgaactagaatggtagtagaagataaagctgaaaggccctatgcttatgcaatttacattccagtaagggaggttgacttaaataaataaacaaataagtagttttctgttaggtaaatactctgacaaaactagatagactgataggagtaacgactgtataaagtatagttagaaaaggacaatgcattgacatttaagctgttgtttttaaaaagtgacagaggccaggcgcggcggctcacgcctgtaatcccagcactttgggaggtgaggctgaggcaggtggatcacgaggtcaggagattgagaccatcctggctaacccggtgaaaccccgtatctactaaaaaaaaaaaaactaaaaaaaattagccgggcatggtggcacctgcctgtagtcccagctactggggaggctgaggcaggagaatcgcttgaacccaggaggcagaggttgcagtgagccaagatcgcaccactgcactctacctgggcaacagagcgacactctatctcaaaaaaaaaaaaaaaaaaaagtgacagaatgaggcacgtatatactatggaaaaagcattctcgacaaaagaaaagctaatgcaagagctctgcaaagaggcatgttgtcttgttcaaggaacagaggactgtcaatgtacttttgaatataaacgacaaatctagaggtaaagcttctaagtcacaatctcctttttcttatgatcaattttcttaattgataaaagtcacatctcaatctgcacctggagggcaaaataacaaacactctttttagggcttttttgttgttgtctgccagcatttatttaatgaaattttgctagaaataggcaagactgccaccttctcaattgtccatctctagaaaaccttgaaacaattagaatgcatccaaacaaaaataattatgtaagttaccaggtttaaggattaaattttctagactcttgcccattgaggtaggaggtggtactcgactctggagcagggactcggaaactggaccagattgaggactagttaaaaggtccagggcatctggggcaaaagcaacattacgtaagatatgcccaccagtgtgctacatcagtttaccattgccatggcaacacccggaagttaccacccctttccatggcagtgacccaacgacctggaagttaccatccttttcctagaaatttctgcatcatcctgccttaatttgcatgtagttaaaagtgggtataaatatgactacagaagtggctctcagccactactctgagttcactgtctatggggtggccctgttccacaaggagaaatacctctgccgctgctgtacgctgctgcttcaataaaagttgctgtctaacaccactggctcccccttgaattctttcctgggtgaagccaataaccctcgtgggctaaaccccagtttccgggggtcgcctgccctgcatcactgtcgagttactcaaatgcaaatgactgtatttaagtaagagattaaaccatagactttagattgtctttgattattagcattgtaattttctctaggtgtgtgtgtgtgtaaacttcattcaatatttatagtgtctcattttaataaacagtttcttaggatataattttttaaggttataaataatttttgccccgcatgagctcatagtcacttggggagaagagaaaacaaactgcagatcatcgagctgcagagaggctgtgctaaaagtgtggagaagatgccatcggtgtaatgtggtagtcttaaagacggtaccaaattcttttaccttcctcccatgaagaggttccatttccgtcccctctttccgaatttgagcaggcttgtgactgttttgacctgtagataacagaagaagtgatgctatgtgacttccaaagcaagatcctgaggcataaggtttctatccggctttctggaatctctactatctggatgttccctctcagaacacaggccctgggagccagcagctgtactgtgagaatgccaagcctcctgggaagaggacaagtaagtgctctgatgacagtccccgctgagcctgccagtcaccccagcccaagaacccaactcgcagatggagaaacctgcagatgactcacaagtgtgagtcacctccagccagtcaaggctttccagggtaggccctgacattcagcagagaaaaccacgcctgcaatgtgcctttatttctgatccacagaaagtctaagcataataaaatgattgacattttgtcactaagtttgggctggtttgtcacgtcgcaataggtaaatggaataaaatagatagtgatcatatatttcagaattttcagatggcctttatttcaaatattcagtaactttaaatccttcaagrtcctttagatgatcagatattggcctaaagctttcttctgataagagcagtccttagaccactttttctggctgggcaagttgaggaaggcttcaaagaggaggtaatgtttgtcaatattattgaaaaattgccagatccatttcatgcattcatgaaataaacaccactattcggggccaatacctagaagcctttaatgctttgaaaagcacctaaaaatcatttctcaattgcatattatttgatcttcagttttgtcatctgcctgcacttggtacaaattctgtgtcattctagaggtaattttgcaaggcaagccagtcagtattgtgacagcagatgatggaaaaaggaatgctgccttcttttgtccctgcaaagaataagagggaaggggagcgggtgggggcacatgcaaggattctattgctttttcatctttctgttatcattgtctgtgtcagctcctcaatgtagggggaccatttagtctttgcatctacaaaaaacaagccatttttttctttttactaacctaatttttaaaaatcatttaattgggcccagaggckgcgcaatggaaggatayggagtttgggaaaaataaaaccaatgagtgaaccaggacattttgtgttctttaagcttttaggaggacaagtgctgaggacactgtaacattattattatgactgattaaccgccaacagcatgatttcagaaagaaaaggaaggaaaaaagccagttatcattayacacaagcagcctactgtcagtccttgaaaataaaaatttgagayagaagacaatgaatgctatattcakgcgtcagtctattctctttatgtagatttcatattaatctgtttattataaatatgtttcacatgtcacttttcttctatttccactttattttttctctactcccagatttctcggcaccaaactcttagctactatcttttctggcaaattcaagtcccagaaggtatctcctgccacagtatcataactaattttctcctttcaattaaaggtcatagtttgtttgaaagagcaaaaagaactgcaagaagcatattgacattgtgtaaatgagagctgaacatcaaggagtatacagttaatgaacaaaagatcattgcttagtgtctaactgcagcattaaggcttggtattgaattcactgaaaaggtgatgtgacagaggacaaacaggggacaaacaggtgaggggcttcatgttgttcagtgggggctccaacctyctctctctaatacttcctatgtattgttttgttctcagaacttaaatgtctatttgagggggaaaatgcattcttctgtcttgtgcagagacatataatatggtgcttataacatgtgtactggtttatattattcaatacaataacttgcatttttatccagtgggctaagaaaaacatatttaaggagaaaaggccattctgaagcacattttaagtgttagggctattgattcaaagactacatgttgtaagtgtgcaaatattaaatgtgaatataactatattttatgatttaattgctaataagaaagcagaatgataaacatctaagaggaaatgtgtaaaaactgaattgctggaatatatttttatcttaaagaaaaattactgaagatacttgttaaagatgataaggaagacttaattcaaaatgggctactacaatggaggattgtagcaggtgagagacactgggcttaattccagatacaataagaaaaaaggatttatagcaaaggagcagagtcaggggctgctggatggacaattcctaggaggtatggtaattatttgttcagctgacctaaggagttttgctgaaggcaggccaggtgataaaattcagagagtagtcagaccaagaactggggatggaggggtgcttttataaattggctcagcacgattcttgctaaagctggacaatgcagagataaacacagaagcccaaaagtcagggcctaattgagaagagttcagaggagcctgaaaagagcttggtcaaggagagaatcattgtcccataacgatgtttttagttagatayatactttgcagttagttatgctatgttgatagagttccatgtgagtgtgagtgtgtgtatgtgtgcatgtgtaggtatgtgtttgtgttttccataaagaggacataaaatgtattttacactgtaaatttcagtgtgtatcttttcaatggaatgtcaattcagtgtttgctaatagctcacagatttatgtttgtgaaaaaagaaatactggttgttagaaaaggaagttgttatattgttttctgagatgaaacagttataagrtacatagaaatcttacctttaatgcaaactttatgttttaatccttcataagatttgacggtcagctgccaggtatacatcattaccagcactgtagtaatcaattttaaaatattttagtgttaggagagattaatcatttgtttaggttttttttttttttttttttttgagacggagtctcgctctgtcgcccaggccggactgcggactgcagtggcgcaatctcggctcactgcaagctccgcttcccgggttcacgccattctcctgcctcagcctcccgagtagctgggactacaggcgcccgccaccgcgcccggctaattttttgtatttttagtagagacggggtttcaccttgttagccaggatggtctcgatctcctgacctcatgatccacccgcctcggcctcccaaagtgctgggattacaggcgtgagccaccgcgcccggccttgtttaggttttataatttaaagacccctagtgtatgctttaatagccactcatgtaaaatttaaaaaatactatttctactgatccagtactaaagatgctaaagatgaataatgtgtacaaaagtgcacattttagaaaaagtgaacatttcaaaaaggttaaaagaacaattttgtcatatcatctttcaatgttcatttaatttctatggatcattttccttacccataaaaattaaggtttaaattaatatgcctttatctttatggtgctattgctaaaagtcaattgctcacataaatattctttgtctaacaattagagacaatctgtttagtaactaacaagttcaatcttttgattaacaaattaacttttttgaaaatatagaaatagaggtaatatacaaatatgtgacataagctttatcgtaaaaaactttagcatttacctcaagaggcaaatctaacacacatgaaaggattccagacaacataaaattagaacaaatgtggattatatgagatacaaaagctgagaaagctcacaggcaaaagagatcaaggagtttttgtggataaagctctcccatctgacaattcaggatatttaatgctttctgttaatcatctcattgtaaatgtatacctaaactcttactgtaaatatgtaactacatttagaaatgaaagtaagggaagttcatctttttttcattttaagaagtgttcattgataaaaattaaacaatttcctttgaaaaatgtgatttcaccttttttaatgtgcaatttgcaaatatagagaattagtaataaatgaaacattcacaagttttggtggcacaaagatcaaagagaataaggcaaatcttattcgttagattttcacactcaaatttagaaagtaaataattctagaggtaggggttatccctgaaaggacaaaaaagatttccaagtctgagtaatgcacactggttgaagagtgataaaaggttcttgtttgtttgtttgttttgagacagagtctcgctctgtcactcaggctggagagcagtggcataattattgtagcctccaccatctgggttcaagtgattctcccacctcagcctcccaagtagtagagacggggtttcaccatgttagccagcctggtctcaaactcctggccttaagtgatcctcctgctttggcctcccaaagtgctgggattacaggtgtgagccaccacgyctggccagtaaaaggttctttagacagagttcacatttttaatatgggccagcagttccataatgtggcccttaaaattttaaggcaagaaaatttagataataattcattatgtgatcactgagagcaataactcaaaatagtgtttaacttacacaataataataatggaactgtaagcatctgagagcctagcaggatgagagtagatggaaaacgtatcagaaaggactttctaccaatcttcaaaattaatccagatgagatcttacaatggagaagataacttggggcaaacaaggaaaattatatggaaaagatataatggatctgtattagtggggactagatagataaaatgtgtaatagctggaaagaaaacaagaggacttttcatggatgatcaccaagtgactttccaatgttgaacatataggacacaattaataaataaatattccctagcaaattcctacattctaacatgaagatacctaataccctagaggaacagagtgcatggatatgaaacaggttctgaaaacaaagtggaaaaatgctagttatataccaaatgggaagaaagttcaattttaaaatagccagttaataaaatatgaatactacttaacatttacagatatatcttaaagaaaaaaaatgttaagagtaagatacattcataaaatcaacaggatactatcaaatgttcacattttttcaatgccttttaaaaaggaacataagaggccacatgcagtggctcacgcctgtaatcccagcactttgggaggtcaaggcaggcagatcacttgaggtcaggagttcaagaccagcctagccaacatggtgaaaccccatctgtactgcaaatacaaaaattagccaggggtggtggcacatgtctgtaatcccagctactcgggaggctgaggcagtaggatcacctgaacgtgggaggcggaggtttcagtgagtcaagatcacrccactgcactccagcctgggtgacagagtgagactctgtctcgaaaaatgccaaacaaaacaacaaaaacagaaggagcataagaaaatacagattgtacaaaattgtacatcaaattatactttctttgtcatttcccaacatcatctcagtaacaatagttggataacttcagcagtcatgggtaaataagaattagattaaaattggaaaagataaatccagtaaactatttatgacccttcataaaccgtgaggcgctaacaaatttagataaatgagggaggaaaatgatcacacaaattcaataarttatttaactgatagcataattgaaatgaatatgttgctgtgagaataaatgtttattacacaagaaaagcatgctaaagaaaaagatgaaactgagtaarcctccaaaacaaawaaaaaatacttctgtattaataaaatggggtttttgttttgcttttgcagacttaataaacgtgacagaggaaatgactagattttaggaattaattatgtttggccacttaatgcaatggaaccaacactgcaagtgaatagttaatatcactgttcttactaattcattcacaagaaaggacagaaaagcaaaatatcaaaggagcactgggaatgactctactaatagtgcagaccctttgggcaaaaagagactcagaagtgtactttactcaaaaagaccattagactgtaactttattaacttacaatataggacatggcaatgggtaccaggagggattctctctgaacccagagcaacaagagtacattctccgagcagaagacaggtggcttgctatccattacccaactgctttatctccaaagggaaaaaataatcacctctacggttttctgtgttcacattaaaataaagcatacatagacctcaaatttactacactttccaaagaaccatggatacgtatttctttcatattttaatttcaccagatgtaaataatgcaaaacacatttttaaaaataataattttttaatataaaacaagtcatattgtggaattcatattctattttgtatgaatacaccctttagtgaaaattttttaaaagatatcaatttgagtacattttctataaatttaatgtatcaggatatactataaatgatatagaactgtagtaaaagtcatttgtaatggctctagagaaaagaactagaaatcakattgcaaagttaatttaacttgctttattttaatagatattatttaagccagaagaaaattcactagaaacattagaaaaatcataggttacattcttcataaaatagtaatacattttcttttgtaaagaaaatgtttgaacctattaaatttagacaatggaacaaagcttgatctcaaggtaaatcaaagtatagtagtaaatatgcctaatatacaggtctgctaacaagaaaatgtatggtcattaaaatgtgtacttggctaaaagaagtcatttgttccaattattcaaaaaagttaaaatttttaccgtctgaaaaggataacattactgttagtgattactacatcttgaaattttctggaatagacatataaagtggatctgagtacatgaattggtaaggatgagggggtaatgttgccagaataggtttattatgctgttacttataccctaagatattgtgaataattatagttttttaaagaatgatatagaaaattactctttaatattttttcaaacaattcacttcactttgtaaggcaaggaatatcttcgrggaaattttcaagtaagaattaagcatggagacagatcgcctcagaacatttgcctgtacttgcaaatgaggcatcaatgcagagcctttgttaacattttcattttaattactagctaaattgcacttatttgtaattatgaaaatcagcactccgaaagttatttttaaagattgtactgttcagagaaatcattattgttgttgcataactaaaacctgcatctcatatgcaatacctaggatttgggaattgggttttgtgacttttctcctcatttggtacacacagacatttacacaattcaaaaattaaataatctactttatctgtatttcaattttaacagttacataccagacacaaggaactgagtcaattacctggatgtaactaaatattttctcatttaatatcgcacagagtaagttataaaaatttagtactcaattttaattgtttatttggatatttactgtcacatggataagatgatatgtgaatttgttgggattttactgggcttaatacctgggtgatgtaatgtacaacaaagccccaagacacgtgtttacctgtgcaacaaaccttcacatgtacccccaaacctaaaatttaaacaaattaaaaactacctgaatatcttacattatgagtgaaacatccaaaaagattatcttattgatatttgagttttcttggaattaaaatgtaagtggcattccaggcaatttttgagaggcagaattttatttttcatccacatcttaattttttgaacctcaccaattggtatcttactgtaacatttgttaagaggctgggattatgtaaaaatgttatgtatatttgtgttttatgcagcagttaaaaatatgcacatattttacacacatacgcctgatttgttttgagattttggctctaaaatgcagagatgactgctactctaagacattgaatatattttatttaaaatacagcactaaactttcaagtaaacaataaggtataacttacaatttgagagacaactacattttattttccttacgcagaatgctataagcaatgatttttgccaaatgctatttgaacatagcaacatttacaaaaaaataaaactacttagtattaagaaatttgtttcactctttttaaattatatcaatgaaattcaagcatctatacttgaagggaaaaaaatctgcaaattcaaatgtatacacattcagaacatgcattttgttatagtaaatggastttttaatgatccattcagtgaggaaaatttgtttcccagcaggaattccatagatttcaaaactctctgaatgcacaataataaaattactcaagctcaggtattgccttttttattattttttgcatctgccattcttccatgaaagcacattcatttattctgtcacctaattatcatcatggcaagttatgataaaccaaatagcttgggtagggaatcaaagataacatgtttgtacacagaaataatcttatctgtttgccttcttctccagacacatctcagccattttattaactcattctctgaaaatcagacgaaagtccagttgcattgatctgaatcattctgaataaaatctgcattttatggaaaactcaggaatgcgaatatcgagtatgccaatagaacagactctccaaattcggggatttttgaaactttattttatatatatatatagcaaaaacacccctaaatgttcattttaaattccctttgtattttgcttcagttatgtttaaattagaaaaatgcaacacaatagagcagattcacctgctttagcaaacatgaccaggattgtgtttcggttcattttaagctattaccatgacaactgtctttctcacacaaattaatgaataaccttatcaaataaatttatgaaacatcactgtgatttgagttgggaagtttagtaccagtgcactttataatttataacagagtctaaaaagggggtacaatttgttaaagactaccattaacatcctggctttgaaagcttaaatttagttattcagattaatcagaaactctcatatatcaatgaaaaatattcctgaaatataaaacaacattactttaatgtattgtttttataattatctaaatcatctttgaatagcaaaagttgatgtgtatatttttttatatataggactctcagactacttagattccggaaatttccagagcaaaatcaaatcaggagtttaatggaacctgcctcaagacagcacttcactctgcattacacactgccgtaagtcatttaaacatggttcagtctacaaacatttattgactgccatttgtgtgcctgtcattgtgctataatgctaagaacgtggaaaagatattccagacctcaaagatctgcagagctacaatccagtggcgaacscagccaagcaatcaatcccattttattaccgttgtaagggaatatgctggacacagtgggagtaacgaggaagaatacacaacccaatctgaagtggggcagggagggcttgtcacagaggctggcacctccactgtccttggtggctaagatgaagtaaggtagtctgagaagatgaaaagttttgttgttgttgttcatttgttctgaggtaatagcaaccgcatgaacagaaagatgacaggcctacaacacactccatacagctggcgcagaatttggtgatttccattaatcaaggcaacagatgcttatcttaataatttagtagtttctataagtctgtctatattcttcatttctatatgtataaatttataaagcaaaaaacactaccaacatcaattgatgttaatatttctgtgtatttctgttcattgttttttcaaagtasctacataaattttattaaattggagtcatcgaatatgtagtttgatacccggttttcaacttaatattgcaaacattttcacataccattaaatattttaagttatctttaaaaattgtttattagcaactgcaaaatatgccatcatcaaaatgtaccaaagtatatttaatcgtgacctttgttttggcgtttagtgatttatagttttttaagaactatgaaaaattaatatacacacatttataatatctgtgattatcttttagcatagattttgagaactaggattatgggggaaagaatacatttttagagattttcgtatgcattttcaaactgctttccaggaagaatacattcttaccaatagtatatgagaggtttcattgtctaagtatctcttatcatacctatatctttattagctggataactaactgttttatcttggtccaactttgcattttgaatatcaaaataaacatgaaggtttttgttcacattatatgtagtagtaattcttattaagccactatgacagcatgagctcatggttaacattaaaacttagaaagaaaaaatctgatacttaaaactgtgttttttaaaatgagagaacttcaaaaggatagcttttctcggtaacggatttttttaatcactccttatcaaatgactggcgatgtgctctattactattaataaagaaatatatagcagaagtaaaactgaagttatggaatatcaaattcacctttactccttgactttctcattcacacttttttcattatactacaaattgagattacataatattgagcttcctttagaattcagaatatttctgtacatcttgtcatgcttcagcataacctaaaatgggacaagttctcttagcagattttttttcaagtccaaaagaagaactctgaataaagtctcaaactccggggttaatctccttgaccaaccagtaaccaacagtatttccaactaagattacaactatgcagtagattcagaaatggcatcaacaatgtttaatgtcaaaatgcagtcaaagccaacatttgctataamtgagaaaaccattatataggtgcctttgtttgctgtagatatgaatgacgttaatttactttgaagagattcttagggaggttgcagaactctggagttctagagaatacaaatatctgaattaatgtttgaagattctataaaacatacatgtatataaaattgaatatgcatatatgtgaagattctataaaacaaatatacatatacgtgaagattccacaaaacatgtataccaccatttgaatcttatactcctgaggataattaaatttagcttctgcaagagacagacttcaaagtttccatggcttaaaacaacatagatgtatttctggtccacctgaaatctgatacaaatcctgtttcatgttgctactctgccatcaggaacataggcctcccaagtcacaggagaagacagtgatggtggagacacacctgctggcttctacttcttctggaattgatgtcatttctgctcatagttcattaatcagaacaagatggaaggctagagaatgcagagaaatagaaggaaacattggtttctgccacgtatctcaactaaagcctatgcaatttaaaaatctgtaatatgtagaagaattaaaagaggttagatctctgccacaaaatgcttactagatgagtcctcaatcttatattcgagattttgtgaaacataaaaagtttaagacataattcctacccacgaaaatcctaaaatgtataatatagttaaggagtcaatgcaaaatgtatcaagatttaagaatgattttttttgcagcacagaaacagaaacatttactattaaagaaggagatccatgaataattacagtgggcttcataaaaaagttgtgtgagttagtctctcaaggacagaatggtgagattgacataggagtggggaaaagagagtacattagaggcaagatgatgggctccagggaaagcaaaggcgagaagggctatgacagcttcagagaaacttaataggcctaattagacagagagyacattttgagaattcgtggwaaataaatacatggagcagagaatcttgtaaaccacatagcagaacttagaactgacacagtagaaaactgggaaacatttgaagttcttgagcaaaagcctgagatttcttgtttaagaattatactgcacttatctccacgaggacatgaagtggtatacacagtacaatatgatgcaaaattaggcatcagggaataaaaccaagcattgtctgcttgacgaatttaatggacttaatgaatttaattaaacaggaggaagagatggtgggctacacactacttgaaacagctggatgctgattacttggctatgccgaatttcactcttcattttcttacttaaaacaaaaaggaaaatagattaggttaaattattttcacggttgggccaaagaaaaaataatccacaaaaccctcactcacataggtcacgataggagcagtgtttgaggaagatttgtctggcatcagtctgaaaggtgagttggagcaacgggcaggagaggtggagggagcaaagacatagtgagggccccagcaccacagtggccaacaaacacccaaaacactacagtagtagggtggtggtggtgatgaacccactgtggtaggaactgtcttttgtgagtgtctcattgaagtccctaaatattctctgacaartaagtgttactaaaggaagtcaaaggtgttctagagtcttcacaaagaaagacatcagtgcaaccaaaacctgaagccatttactaagcatgccaaatgtagagtccctttacattctgtcagtgagcataacatgaatgttgctaaaggtcatgtgctaacaatgattatttagacaagataaggagatcatgtacatgaataacttaccatgactaatggttgcttggggaacacccaaacttcattcagaaagtctcacaatcttaatgccctaagaagtatttagagatcattcacagagccttctactcacacaatgtcacatctaaatcattataatgacttctattttagagtcttttggaacagaagatgacatactctttaattgataggtggctatagacattttaaaacatatctatttgcagattgctatttttatagagaaagataagtaaaactatactcccaataagacagaacaaagaaaccaatacaaaaagtttaaaaatataataacaactttctktattaacattttagaacaattaagtgaagcaaatgaaggtaaaatagtccattttttaacactcccttcaagcttactatgctcctttttcaaatgcctacaacattgttatgtgtgttcttgtgtggccaccaaaaaagttgttttacaaaagcatgctatcaacaaatacacaagattttattaattgggaataataacaataggctttatttcatttaatgccatctcccaggtaatatatggaaagtcaaatttcaaaatctcttcwactaagaaaatatgaacaactaattaattacaatgaaatatcatagcagcaaattatcactctctcagctattttcactacttttcattatgtctataaatcaatcaatgttgttcattcacatttattgattttttcatcataatatagattataccgttttcttccttggattaacatgtaacagtccttagagacactggatgctaaactatggatctcagaaagtattcaatatattattatgtatttaataatcatttgggactactttgaaagagatggtatactaaccaggtcattctaacatctataggatatgctacatcaatgcagaatggttttataaccttgccaaggtcatgaaataccactctacaatgaaaataaagtaagtccagtgaaatgtgaaaattatgactgaaagccatgttttctttcaatcaaataagatctcacattcttttgagaaccttcaaacaatggactgactgcgattctgtcagattaagttcaaaatagcatgttgcaaggtaagagcttttttttcctctctctctgctttttcgttgtttgcttgtttagtgtgttcatccattttgttcatttctttaagattttttaaattgtttttaaaaatatttttaaaacagtgaaaaatatactaacaaagaccacatagataaatgtatatamggccagtttttaaaacatttttaaaagaggcagtgcagtcagttcagcaacatgtcgcctgacatccttaagtacacattgtcaaattgacccatacggttccaaataacacatcattgacaatcagcttcataagcatttagacatttttgaaccatccattattcttttgataacttatgatgacttttttgtaagcatcacaatctataattttctaaatatatactcccattttccctacctaaagattttgaacataaaaggtctactaaaatattttaaataagcagatatttcattcaaaaagaaacacaagaagaaaagctcaaaacaaatgataagactttcagttctttatttattttattttatttttgagacggagtctcgctgttgttggtctgagctatagggcaatggcgcgatcttggctcactgcaacctccgcctcccaggttccagcaattctcccgcctcagcctcccgagtagctgggattacaggcacctgccaccacgcccggctaatttttgtatttttagtagcgatggagtttcaccatgttggccaggctggtctcgaactcctgacctcaggtgatccaccagcctcggcctcccaaagtgctgggattacagccatgagccactgcacccggcctcagttcctaattataaactgatgaagtcccaaatgctataacttcatatcattttaatttttagcaatccatctaaattgaaaagactatattgacatttccgtgatttactaatcgccaaaaatcatattgcttttgatcctgaaaaaaaatcaacaggccttgggatattgacacagaaaaaaaattgtaattaacttccaaattgtcaaaatttcttatgctcctctagtatctcagtgctctaagaatgccataataaatcattttgtttaatgtatccttatgagtttttctagtgaagaccggaaaacctgctacacaaattatagaagagttataacactaataaatcagttttgttgggactaaagttcagttctcaaaaggtaagttaaagaagtcccttccagtgagacacaatttgccaacacccataaaaacgcaaactttccttcgaggatttagatatgaatttaattacaaaacctatttttcacctaggtatttatttaacgtgagtaagtgaatgtgtatggacatgtatttacaaccaatatataacattaatttatgtgtaacatttatatgtgtatgcatatgaatatataattggtcatatttagattttaaatccttaataggtagagactacattatacatattataagtatttaatatgtgtgtgatagagaaacaagtaagtcacagagatggctgagaacagtaacctctgatactcaaatagatagagcataaatattttcacacctgtgtatttccaaaggmacctttatttctactaactgtcatttcgtgagttctacttcatcttcgtaaaatatatagttggcctataatatagatgtatatttttaaaacttgtaagtattacaaccccacagaaatcattataactgtctaatattttttctaaaaatagggcctactgtattttatattttaataaaacagatatttttcaacttttctctctgctagtccttatccccataatgcctaataaaaactggcatttagatacagattgtacattatgcagaagrtaacagatgagcttatcagctgttttacaattacaagggtaaatttattgataaaactgtgcaacatgaactaacctgactcttgtcagtaacatgtgacaatatcagttttctgactagctacctgtttgtagtgctccttaaactgcaatgaaacaaatgacttctgtaacattaaaacaatgggcattggttaaaaggctcagaaactatttcttttccacaaacttacaaaaggcttgttttaaatttagtgttttaacctcaaatatatttttcttacaacttctttagtaatatttgcaccaaaatgtacttaytgtgccatcttcagggcgtttttaggaaacagctccatgaagtaaattagaaattactttccttggtggggttttaaattattactttaaagctatagaaggttttgtttatgtatagttatttaaagttttaaaatattagctaaaatctataaagcaaaataatttaagctttaatgtagatgagaatgtagacatcaaaatgtatatatgtaaatatatacacctacagacatacattttttaaagttctttacaatttccaaagcactcacatattatcttatttagtatttacagtgttcctctgaggtgttacagcagaaacttgtatatccttttaaaaatgagaaagctcttatttaaagacatgaattactgttcaaagtttcaaagactgaattatatagccaagattcaagactacatctttttactacaagtaaaaaattatttctactattatagtgatatataatatccttaaaatcaatgatgaaaattatacataatttttaattacttttgttcaataattkttaaaacatctatactgaaagttggaataattcctggatatggtgactatatatcagaaaatcagacatttaaatatgtagctcaattcttttatcatttctgaactttatttaactaagaaatctatagtgaaacaaggacacatttgaccaatggaaaattatggtagaattacacaaatcaatccacagatgaatacgatacaaatgaattgctcatgtgataaaaccagactatacagcaaatacaaatctgctgttcttagaccactaagaagccctaaagaaaaccaacacgattctttagcgtcatttggggtaaccatctattctgatttgcctgagactatagtaattaccagtagagcaccttttcgcattctaatgtgtaccaatttgaacaacaaattaacagatcactttcagtgacatatttgatccaatggtactaataacgacctaaacacagaatgtaaaataagtatgaaagacataatgaaaggattcaccttcttagaaatccattcattttacatgcatctggaaaacacattagaagacacaggttccaattatagctttgtgtcttaccaagctggtgaatttatgtatctatctctaacagaaactctccaagcttctgtttccttgtacgaggatgataataccttttcctcaaggtttttgttaagtactaaaataaccttgtgaaatctactagaactatgcctagcagccaggactttataaacaaatgttcattattaatctgtaagtctcttaagttcagagatatggcctggacatgaaaaatatccaaccagtacttttattgagtaaattttaagtgacaaggaaggaattaccttaacatgaagagatttttataacctggtcaaattcatctattatttaagattaacaattctcaaaaaataaaccaacagaatatggcccgctctggtatggaagaatagccgaaaactccactggatgctaattgactttgggaattcctgattcatgaacttctctagtgagaatatcttttcctagaactgaagttcctaaacttagaggttacaagcccagtttgaaagcttgatagcagctacgattctgtccctaaaaacaatctccagtcatatgtcatctagtgacagggatatgatctgagaaatgcctcattagacacttcatggttgtgcagacatcatagagggcacttacatcaacctaggtggtataatagcctactacaccccaaggctatatggtagagcctattgtttctaggctatatgcccatacagcacattactgaatactgtaagcaattgaaacacaatggccatatgtgtacttaaacataactaaacatagaaaaggtagagtgtaaatacaagattctaatcttttgggactaccrtcatatatgtggttcattggtgctggaaacacagttatgcagcacgtgacttgactgtgtgtataaagaaataaaatatatgtatatgcatactatatatacatatataggtgcacacatatgtatatatacatatatagtctgtaaatccatatataaaacatacataagcacaaatatatgtacaatttcaagaggtttatgaaaactctaaagcccatatcataggtttttggttaagaatccctaacctagaataatggcactctctttgttgattctataatacatgtatattatagatattaaatgataagaaattactacttaatgaagtgatacttaaccttactgagtattctgatacatcttactctgttccatactagtctgttccattttattatattctatactatgctgttctggtttttaaaaaacaaacaaagytagtttaatcaactactgtatactgtcagatttcatgctccaagattggaaaacactgctgtagagtatgacagcagctgcttcaggacttgtactacagaaggcaagataatgctatagctgttagtaacctaagggagacagcccttagtggggaaagtgtagagaacaatagtgctacagaaacaggagaaatcaaagycctcagacctccccctgcttgcctagagacgtctggtgcactttcaaggagatatcatcccctacaaagctgttcctggtgtttattttaagtagactaatttgcatttgcataaaaatgaatggtagatgaggaaaacatgagatctgcacagtgctacagttctttgaaataaaagaatcttgatactgcttgtaaggaaaagtggttccttagcaaaaaacgtaaattaagtagaaaaagaaagtgtaattcaacagcaaatttatgcatttacttatattgaccctgtttccaaaatgatttgagatgacttcaaaaggaattaaggatttttttcaagttaatttggaattaagtgcattagygatcaaacacttagaatcatagaagagtagtttcagtggtaactctggtgtgcacaagaataatggactgctgggtccaaggtccttagactcaaacagcaggttctaactttggtggaggcaacccatagtcatcagagctattaaccatctgaatgtaagagacagttgggatgatctttgctgttgttgctgtgagcaaaaagaagacgaatcacacataaaggttaagcaagtaatacttgtagttagattcatatttcaatatagaaatagacatggagaaaacactgttcctggtggttggaatacatcagggaacaggacaggcaaaaatacctacccatggaatttgcaagttagaatgggaaattgacaataaacaacacacatgacaaataagcaatttgtattatctattaaaagatgatcagtgctatagaaaaaatagagcagggaaaggaagatcaggaaagcagggatggagacagcatgggtggcatttgagaaatgatgcaggaatagaaaagaacggtttaaaacagatgcaaagaaaaaaggcttttcagaagttctgtcacatagataattcagatctttttgatgtacctatgtcaccagtgcagctgtccaggctttttttgcatatgagtgtgtgcaaattatagcttgtggtgagttttaaataaatgagcttactttgtttaaaaaaataaacctgaatgtctcaatttcatccaaaaaaaaaaccctccaataaacattattttaatgcatcaaataaaaggtttgagttaaaaagcgatttgggaaagttttatgaatgttattttgggaaagaacattaataccattttctgataatctatggcatcaaaacattatgaaacagaatcacagtttattaaaggctatgtaacgcttactttattgttaagctccacgtgttccagcaacaatatctagtcactagaaaatggtttaaattcatgtctatagataaaacaaatgagtttgtatctaatgctttgggtcaggaaatgtaatggtaagtttcaactgccagctgtactaaaattataaaatacttctgaaaaatagtagatcactttttgaacattaaaaaatttggattaataacctatatcatctgattgtgtatattttcaccaatgttttcatttgatttatataagcaaacaggactatttgaagtagctcaccactgtaaccttaaaaaattaaaggacactctgtggcattgcttacatccataattctcaaaaatgttcctgatggcctttatattaaaaggtgccagtatatcatatatcatgaatactgcagtcaaggggaaaagaaaagatataagaaagaatttttcatgtgaaagttgagtttgaaagcatgagaaagaagtagagtatggggtatgcctgggcatccatatgtgtgtgtatggacctattaatcaaatacatatcctacagacctattaatcaaatacttatctattaatcatcgtgctcatttttaaaccattttcatttgatctattgtagcagactggttcctaccacttagagttctggcagttgacatgaatgtatgtctgtaaaatctctacaactaagcatgattttatctacaatacatccttcacttggttgttgtccttgagagtttgtgttatagtcaaattcacagttgtagtcttgagacctaagctcagccctattccccttgttggtgtttctctcagagttttagaatgatagtttccaccatttcattcagaggtttatgtacttttccctgtgcttctccttgagtatgagaagatgatgttgcaggtagcatacaccaagtaggaactgcatgcctgtataaacatcagcttcgtggaaaacctgttttggtggctagggctgaaacaatgatttttattctccaagccttgtttccttttcctctatgcgattagctagattatattgcccatgctcacttaccattacatggggccacgtaactgggtccccagataaacgtgggcagaagtagtgttggctacattcagatcttccagcttcactctctagtccctcgtctatagacaacttcagagcctaagagccactagctgaacagaggtgccgagtttgcttaatgcatgaagttctggcacctctgcctgaacttaactgtcacctgaatcatcagactggaatgtccgtgataaatatattcttaacttggcgagccacagaaattttgggttgtttttttcagcatcaaatataatttactgtgaggttgtttgtttcagcatcaaatataatttactgtgactcgtacagattctgaggattaacgagaggagattctgcttyacttttcaaacttatttttctgagcccactttcctctagaaaaagttgagatcgctgacattattttataaacaagtaactgaacatgagggaaaagggttcagaggacaaggaagactccagaaaaagagacttctttcagattttaaaagatagatatcatatgtaaatatgtaaatttaatcctgaataaggccttagaaaatctcttatttttcctggtttcttcacaaaaatgaaaatagatggggtcactaaaatatgtaaaagtaatgtaccgcagcatctcatctcattcctggcaagtgtttgtcaccttcattttggggggatatatttagaggaactcaagcctgcaaagaattgggccgcaaaaaaaagtgggggagaggaaaagaagaattgggaaggaagtgagaatactgtgataattctttgaatttaaagggcataatcaaaatcctcatccataagcagcctcagccatttgcccaagtatttaatataaatatgattcttttccaaacatgccatggcgggaaggaattggatgaagcactgatataaaaaactgattccttggcagagctgcagtaagtacaacatgatccctatctgattatgagaaagaaagaagtgcaatctatttccttaaaatagagttgagaaacaagcagcttgtgtcttcccaaaagttaatgaatctcagtctttgaagcaatgactcatcagcaaagacacagtcacatttgtggttaacataaatgcctatccactcaatgtatgttttaatccagggattgggaaactatatcctttaggccaaatccagtacccagcctgtttgtataaagaaagttttattagaacacatccttgggaggccgaggtgggtggatcacaatgtctggagatcaagaccatcctggctaatacagtgaaaccccgtctctactaaaaatacaaaaaattagcctggcrtggtggtgggtgcctgtaatcccagctactcaggaggctgagggctgaggcaggagaatcgcttgaacccgggaggcagagcttgcagtgagctgagatcgcgccattgcactccagcctgggtgacagagtgagactccatctcaaaaaaaaaaaaaaaagaacacatccatgtctattcatttatgcactgttggtggaagatttctcagtactacaaaaaagttaggtagctgggacagagatcatatggcctgcaaagcctaaaatatttactatctggtcctttacagaagaaatttgccaacccattttaatccatcaggatctaagtcctcaatttcatatttatatatctaggtcattccaatttaaatatttgtattttggtctttagtttcaacacaaagacttaaagatagtattttaaaaatttattttataaacaatcattatgtgttaatgaaaaataaaacaaaaaactatttgaacctcattagcaataaagaaatacaatttataacagtgtgataataagataattcttcacctattagctacaattttttagatttaattttttaaggaaaatttcatagtacaaagattaaacataggtcacttctgtggtttcaatgagtcccccaaagttcatgtgttgtaaacttaatccacaatgcaacagagttgagagatggaacctttaagaggtgattaggtcatgagggctctaccctcctaaaaggattaatgtcattattgagagactggcttatttataaaaggatgagttcagaccccttctctcactctctcaagtgcctgcgagtgcgtgctctctctctcttcctccttctygcacatgtcgtcccttctgccatgttatgacacagcaagaaggccccacaagatgcctgccccttgatctgggacttaccagcctccagaactgtaagctaaataaatgtctgttcattaaaaattacccagtctgtggtattctattgtagcagcacacaattaaggtccatcatcatatgctctgatatttcaaaacaaatcatttctactatactaaatactcaggagattgatgaagattagcaaactttggtttgcgattatgaaaaagtaatacacacattgaaaataaaatttgctgaccattagaaacaagtgtcagtttgagtcattgatctctagtgaaatgaacaccactttttatttaacccatttcaacagcttttatgcgaactaagaaacacgtggggtttcttaagactaaataatacacttcgtgaaaatattgcctcagtttaatcccacaaaacaggtgagaaaacacacctgtgtatttattggtgctaattcctcagtgaattttgtcttctgtccatttctgtttgctttagtttgggcttttacttggtttaagcctttctttttttaattaagaaacattttaattctgtaaagtcactgaaggctggatgaacatctcacctatctttactttataaagtaaagtaatactttacacacttatactttacacagtgcctggtacaaaaaagaaactcaacacatttttgttgagtaaacggtgcaattaacgaatgcttcaaataataaaaataatttattttacatctgaattcaaaatacttatgaatttgataaagtcccattttaaccttaaaatttttagtgctgaatattttggaaatatgatatacttgtggaaaaagtgctaataatagcttactattcaaaattgtcaagttagttatgcttagctgaattttttagtgaactgatttataaattttactgggttaatgtacatactactggcacaacttctcattcaaatattcatctacctgcttagatttaatattttcatgtatcacttttgattatgcaaaaaaaaatcaactgaatttggtagttcactaggctaaaaagaaaacaaagtaactagatcacttaatattttctattctcatttaaaaataagtatctaaatttttaaaagaaagaaaaataggccaggcatggtggctcacacttgtaatcccagcactttaggaggccgaggcgggtggatcacctgaggtcaggagttcaagaccagcctgaccaccatggagaaaccccatctctactaaaaatacaaaaaattagccaggcatggtggtgcatgcctgcaatcccagctactcaagaagctgaggtaggagaattgcttgaacccaggggcagaggttgcagtgagccgagatcacaccatggcactccagcctgggcaacaagagtgaaactccatctcaaaaaaattaattaattaattaatttaatttaattaagaaaaataaggctcctgaaaagcagcagagtagatttctatgaataaacttttttattttcccatatcaaaatcataatttataaaacagtggtagcatccaaattcctttttttttaagtcttcaggttatcaatgtatttcaattagrtattatgtgaatgagggtgaattgagagtagataacgatatcatggaggagggagaatcgagtgtacccagccacccatcggcattgcactatatttagtggattatatttatccttttccctcacactaaacaagaatatgtttgttttaacatttacaaatgggaaataaagaaatttttacaagtacatcttatactagagttcaaatattgaaagactgtactgaattctcagtcactgctgaataaatcaagctctgttgtattcaggtaaactttctgtccccaaagagcatgatctctctgcttctcattgcctctcaagaaaattctgttagtaaatgctaaagggaaccctttttagttttgctgatgtcacacctgaataatcacagagtcactttcttaattgtgatatttgataaatatgcttctttcctctaagagccgttaatatagtaaaaaatgtttgtacagaattgaaatagatattaaaagttgcttaagatcaaatgaaaaatatgttacttaaagacatataaaaatgctgatgcaatccaattggaacctaatttaattgagttcttgatttgaaaagcaatattctatcaggagctgccattattcaaaaactaattttaygtcattaaggaacttctaccattttctttcctaagatgttgatggctaggaaaagcagaaaggaactgtcactactactgagaacatatttgttcaaacaatgttttgttacatctgataaaaggctgtagctgaagagatttttattaacttcaaaaagtgtcactttttcctaacaaagacaccagaaccaccaattagttcttccaaatatagtcaatgtgctatgagggagttctggaagtatgtaagcaatgatgatggtaaccagtgggggaggtagttagaaaatctacctgggaatacttatcaggcaggtttctgacatcgctggtttagagtttgggtaacaagcctgacaggacaggagatcatggtctatagattatttattcagcatgtgatcactagctttagcaaaagagggggaaaaagccaaagagtttgaagtttagataaagtttagaagagaaagtgggccaaagagctattactgctgtcaaaaaagccaagcatgctgctaaaactgtagcaaaggctgagtatctgtggggctggatggaggatctgaaatcctttgaacagcaaatggctctgagcattattccacatatttgcttccccaaccgaaagtttgggaaagattcatgttaggcatttgtccaacaatgcaatgtttttgcaaagtcaaagctatttggcaagcatggttatctggggaaggaatttggaacaaccctatatgctgtataccttgtaaatgctgttatcaactgcaaaggagaaatgttcattttcctgagcatagcttaaaaataaataaataaataaagatgtgggggaagaagctcattcttccaaaggcctttgtcagagaagcaaaaamccaaaaaaagaaaaaaaaaaaaaaaaacctctgtcaaaacacagctagttcaaaagaattcaggttatttgtaaaacactgatcatgagtttataacaacctttacattcacacactgttgattaaacttgagaatttaaaaagcattttacattatagagtcatctcagatatgaaatcatcgctgtttcaactgttcttgttataatctacaggaycgaggtttaaataatcccggctctagcaaagtagaactaaacatctcacagaacagtaatgcagacatttgaaatgccatgtattcttcagcttttgtggttttgaacttttcaaccatggtcccagtgctatattttcataatacacaggcatggaaatattcactaagtcatggcagtggtgttattaaatgttcaaagcatatatttccccagattcctctgatgctgctgttctaaaggtcatggtagtcccccagatgtacaatgctagaatggtctgcattcacttcatatgctaaaataaaacaagacttaaaataaaagaataaaagaccaagagggtgaaacgtaaaaaataaataaataaacgtcaagtctaacctgatgtctgtttaagtgcttccagtaatgattaaactttcttaaaaccaattaactagaaaatgactactctatagtcactggccagaattgcaatgccattctcaagcacaaagtaaaacgcaccagatacaactagctggtgatttatacgtcacccacactttaaaaatatccctgaatacttcagaaatattaggatgtgtcttaaataccatttacaaaagatgaggaataggtaccaaagtataagaacacaggtatgaaacatatcgagtgcctatattcatagagatgttcctgaattaaatactgtaaatgaaattgtcagtataaaattcccgttatgctctagtgtgctaccattattattattattttttttttttgagacggagtytygctctgtcgyccaggctggagtgcagtggcgcgatcttggctcactgcaaactccgcctcccgggttcaagccattctcctgcctcagcctcccgagtagctgggactacaggcgcccgcaaccacgcccggctaattttttgtatttttactagaggcagggtttcaccatgttagccaggatggtctcgatctcctgacctcgtgatccgcccgcctcggcctctcagagtgctgggattacagccgtgagccaccatgcccggctgtgctaccagtatttttaaaccaacatttgctcgttgctataagaaggtgtattcacatttactgtcctaagtcaatgtcttggtacacagtgcatcctttcattctctggctttacagagcacacaatgcagtctcagcctaacttctcttttgtctgatttgcaagtccattaatttgtttggaaaatatttgaacagccaagcatacttcaggaatctcagagatcctttttaagccatttgattagaataccagaggaaataaattacttaaaactaatctaaatgaaaggtcataagaagaactgaaacaagtttggggcaattgttggttaacttaagattcctgagatggatcgttacgttagcagaaaaatactgaattttaactctttgagaacttgatttgcacctatctcctacaaaaattcaaagttatttccatcctccagccatctctcttctctgctcaaagtctgttgttacctgttgttacctcattgcattttccactcaattgaaccattattttctgaattttttaacctgtttctgcctttcatttggtcttttgttgattaccttatgttccttcattctttagactttatctgattcattcaaagaactttgctccaagtctgttaacatgttttcattcccaactctttctccacatcttccacaataataaaaattttagctgggcacagagaaacaaagaataagaccatattttcaagtctccttgcatttatgtataatcatgtgrctatgttttggccaataaaatgtaaataaaattattacttagcagttttctaaacccttctgaaaaaacaactgatgtgttgtttcaccatctcttcctccatactactgcctggaaccatcttaaaccataccatcacatacagctgagaaacagcgtagaaagagcttcagtcctgaacgttgtgaaggtctatactgagcatggaccattcatttgggtgagggagacataaacttctcctttgttttaagccattttctcttggtctttctgacacrtatagctgatgtaattctaatgcataagtatttaggcaaagtttctgaggctgggttcttgcttgtgtttcctcattcactctctgtagtttgtttctacatcctttgcgattttcccataactttcctgtgcttctacaggaggagtagatgatcctgtctgacgcattgactttggactttggccaatggaatgagaggacatatgccctttctgcatccaagcagaagcttaatgtggttgcaacgggcttagcagggcttgtattcctggttctctaccatgagcacagcattagccacatggaggctcctccagcacctgagtctcagaatgagaagatgtatagagacaagcgggcaaaaataagtgtttgaggtaagtcattgagattttgactttttttgttagcaaaagctaatacataaaataaaagctaatactagttaaataattaaaagagtcaaataaaaaacaaagcttcaatggcaacaaaagccgaaattgacaaattggatctaattaaactaaagagcttctgcacagcaaaagaaactaccattggagtgaacaggcaacctacagaatgggagataatttttgcaatctaatcatctgacaaagggctaatatccagaatctacaaagaactcaaacaaatttacaagaaaaaaacaaccccatcaaaaagtggacaaaggatatgaacagacacttctcaaaagaagacatttatgcagccaacagacacatgatcatcactcatcatcactggccatcagagaaatgcaaatcaaaaccacagtgagataccatctcacaccagttagaatggcaatcattaaaaagtcaggaaacaacaggtgctggagaggatgtggagaaataggaacacttttacactgttggtgggactgtaaactagttcaaccattgtggaagtcagtgtggcgattcctcagggatctagaactagaaataccatttgacccagcmatcccattactgggtatatacccaaaggattataaatcatgctgctatacagacayatgcacacgtatgtttattgcggcactattcacaatagcaaagacttggaaccaacccawatgtccaacaatgatagactggattaagaaaatgtggcacatatacaccatggaatactatgcagccataaaaaatgatgagttcatgtcctttggagggacatggatgaagctggaaaccatcattctcagcmaactattgcaagaacaaaaaaccaaacactgcatgttctcactcataggtgggaaatgaacaatgagaacacttggacacaggaaggggaacatcacacatgggggcctatcgtggggtgaggggagagggaagggaaagcattaggagatatacctaatgtaaatgacgagttaatgggtgcagcacaccaacatggcacatgtatacatatgtaacaaacctgcatgttgtgcacatgtaccctgtaacttaaagtataataataaaacaaaacaaaacaaaacaaaacaaaacaaaaaacaaagcttcacagaccagcttaaatatggttggaaaaatgaggcatgaatatttacctttggtaaagcagtaacaccatattgcagtaatcaaaactgcacatggtgtaacatgagctagaaaatgaaattttttatagaaagacccaaaataatcacaaggtcaaggaaatggactttatgattgcttatgagcttaaacacttcatccatccttaaacttcacaagtcaggataattttccttccttgctttgataaaaaacttgtacaaacctctatcattttcctttgtatgtcagatgaccactatttttaataggtctgcctggttaaaaaatttaaagtcactatttaaaaccaaattagacaaatagtgactccacccataaaatgaggctggtatggagaggagaggggattatgggtagcatatcattattaacccattgaaacatgcagtccacaaatataagatagtattaatatagcctttctgtgactaacatgcagccaaaacacataggtaaacagggatcgaaaaagtaaatgatgtgtgtgtgtgtgtgtgcgtgtgtgtgtatttccttgctgtgtcagctaagagtcctagaaacaatgacacccagcagcaatgagcgtataaagctcctaggtgtctgtttctgataccatcctgaaacaaaaggaacaaggaccccttggagaaatggtggattctaggcttggggtaggaaatatagaagagaagcctacagtatcctttagtgccatgaagtaaggaagaactaaaaaaaattaaaacatgtgcatacacacacacacacacacccccatacggtgatgtggtgtgtcaaagggatagatcagctaaagcagaaaccattcaagcaataacataaagtagtatagaattatgtccccaagtattacatacatgtccatgaattcatactgttaaaatgatgaaacaaataaatcaataggagagaagggataaatcttttattcagaaaatgccaagcaacttatgtagacactccaccttcaaggaggtggaacattactccctattccctaagtgagaactgcactaatgactttttttctaaaggatgtagtatagaaagggggagtaggcagagaaacttcccattggagaaaattgccacacactattcttagtcaggtaatcaatggcaacatcaacagtgattgcttctgctgatagtatgtttccctgatgtaatgtgatgaaaatggcacattacctttggttttcctccccaaaacattaggaacatttgtcacaactgagggacagtctatgaagtacctggccataaccttcaaaactatgaaaggccattaaaaacaagaaaagtgtaagaaattgttacatccaagaggaatttaaggagacatgagagctaatataatcctgcatcctggatggaatctttatacagaaaaaaggatactaggtaaacccaaggaaatatgagtaaaatatagacttttaaaataatgtatcaatatcggtccattaattgtaacaaatgtaccatagcaatttaagataaatagggaaaactggggatgggctatatgtgaactctctgtactatctttatgatttttctataaatataaaactctcctaaaatgagaagtttattttaaaaagtaaatgaagcttttgaatttattttaatggcaatataatcttcatatctcacattttcttgattaaaatgggaattaaaaaaatcttttcaggatacatttattttatggcccatcctacagtatcaaagttaccaaagcactaactacattaaacttagaatgcaatttcataattccaaaggctttaccacttaaaaatatctagaggtaatttaaaagtcattataaattatatagattaaaagctatttaaaaggaattagattcttattcatacgttaagccttgttctataaatatatgaagtcttctagaaaagcyggcattgtcttttaaatatgtgaataaaatgtgataaaatttatactgtgactaaacacagaagaaaaatccaaatgtaacatttgatcagaatggttctatatacagtgatgaatcacttaatgttctgaaaagtgcaacattaggcaatttagttgttatgtgaacatcaagacaacaaaagtgtacttacacaaatctaggtggtatagcctagtacacacctaggctaaatgatacagccttttgctcctatgctacaagcctgcacagcatgttactctactgaatgctgtaggcaattagaacataatagtaagtatttgtatctctaaacatacctaaacacagaaaaggtacagtaaaaatgcggtataaaagattaaaaatggtacacctgtaaagggctctcaggatgaatggagcttgcaggactggaaattgacctgagtgactcagtgaatgagtatgagtgaatgtgaaggcctagaatgttaccatacaccactgtagccttcagaaacactgtgtacttaggctacactacattcatgggatccaatttttctttmtttaataataaattaacgttagcttactgtaacattattactttatacattttatttcttaactctttgactagtttctctatatccttattctacattttttttctatttttttctttactttttaaacttytttgttaaaaactaagacacaaatacatatactggcctcggcctacacggggtcaggatcatcaatatcaccatcttccagctccacatcttatcccactgcatggagctgccatctgctatgatagcaatgccttcttctggaatacctcctgaagcacctgcctgaggctaacagtatatatatatacactcataataataattagtatcaattagtactaattaactgttcattagtattgttattaattatactaattaacggtatatatatatacacwtatatgtaggagtacactctaaaataatgataaaagcatagtatagtaaacatgtcagtaaaatagtgattatcaaatattatgtgctgtacagaattctatgtgttatactttcatatgactgggagcacagtaggtgtgtttacaccaacgtcaccacaaacacatgagtaatgcattgattatgatgtcattaggcaataggaagttttcagatccattataatctggggtctgtcacatatgcagtccatcattgactgaaacaccgttatgcggtgcatgagtgtatattagaaagactgatgaaaatgaaatttctaggtttttaccatcttatatccagttttgtttcaaaattcaatccaggtaaaatataaaataaggattattcagtataaatacaacttaaattacaataatggatccactaactaaatatatcataaggcattcatgttaattctatccctctttgcttcaaatgcaaaccaagaaaagcatcatagcatgaactctctgaggaactaacttttctataatagtgtgcattaagtgattctgttcattgcacgaacacacacattctctaacacatattaatttcatttacaaatgttactatagaacttactttgctgggtgttttattgattttctatttcctctctgaagcacctagcttactttacttgttgatgttttcattgattttctatttccttttggaaatgagatgagagcttttaaagaggtcatgctacttggcaagaataagatgttaagttgtgtggttttcctagggaatttcaccattaaacttactacttttctttccatagaaagtagcaatttatttttaactccttattgtatgccgttgtactgtttatcttactcttaaatgtgttattatacaaattaacttcataagaaaaatgcgattcttgactgatttaaatgtgtcacccagttaattcctactatagtgaattctcaaaggtaataacctaaactttggaaggttatttcaagtctcgtaggatatacatgatcttaaaagttgtgacaacctaaacaatatcagcagtaatgaattgcccaacttgcacctctgaaagtaaataattgctaagataattgaagtaactatcatctttatcacccaaagtgggagtaaaaaaactttacaacttaccagtatgtagatttctgtgttaatgattacctatctgagtgagaagacaaactgggctttcaacttttgtaaaaaaagttgaaattttgctacctacatttgaattcaaccatctcaatgtcatatagcactagtcaaacatactggaaatatctgattttttgtatgtttttctttttgtttttttagacagtctcactccatcacccagcctggagtgcagtggcacaatctcggctcactacaacctctgcctttttgggctcaagctattctcctgcttcagccaccccagtagctgggattacaagcatgcaccaccacgcctggctaatttttgtattttcagtagagatggggtttcaccatgttggccaggctggtctcaaacttctgacctcaagtgatctacccaccttggcctcccaaagtgctgggattacaggtgtgagtcactgtgccgggccctgagtttttaaaaggggctatacaaaaaacataatagccagttattccactagaattgtcctgtccaattcagtagccaccagatccgtgtagctattgagcagttaaaatattattagtatcaactgagatgttctgtaaatgtaaaatacacactagattatccaagaaaagaattaacatattgcatttataattttttattatatgttgaaataatatgttggatgtattgggtacatgaaatatatataatttttttttttgagacggagtctcactctgtcaccaggctggagtgcagtggcacgatcttggctcactgcaacctctgcctcccaggttcaagcaattctcctgcctcagcctcccgaatagctttgactgcaggtgcacgccacctacacccggcccgaaatatattgtacctgtttctttgtactctttttagtgtgatcactagaaaactcagaagtacctaagtgttttacactaaatataatgagtctctagtattctattcctaaaacagatctttggaatacaatgtgtctaggctatcttatcttagatctctatagaaatggctttatcaaatcaaaatttagtgctatgtccttgaattttatgatatgagaaaatgctacattttaaaatagacaatcgtaggccatactatcaaacatcattattaaaagctgttccccaggaacctgaagcccacagatactctgtccaaagaagaaagaactcttatgaatgaaccatgttaactcacccaagaattagcatatctcaggagatctgcccagcaatgttctttaattactcttaaaaatttcccggccgggtgcggtggctcacacctgtaatcccagcactttgggaggccgaggtgggcggatcacgaggtcaggagattaagaccatcctggccaacacgatgaaaccccatctgtactaaaaaatagaaaaaattagccgggtgtggtrgcgggcgcctgtagtcccagctactcgggaggctgaggcaggagaatggcgtgaacgcgggaggcagagcttgcagtgagccgagatcgcgctgctgcactccagcctgggcgacagagctagactccgtcccccccgccacccgccccaaaaaaattcccatgctttgtctcttctctagctgcatttgtgacttcatgttcttaatgttacasaaaaacactaagcccaaatgtcctatcaatgactgaaaacataaaatttaaaaatcaaatataagcattcacatttattagcaaaaaaattaatatctatagtgtgagacttaatgtggtatatattggtaattctcacttacttgagagtctggattctatcagagaagggaccattgctttaggaaagaactctgtatgatacttgtctagaaaataagagatgagatgtatatgtcttaaaggaatattcaagaccaatgattccaaatagagacttgtgttggcagcttttcaggagatgataaaagcaacatataacaatattcaggcatttaaaatgggacagaggaaccagagcataattttgaagaggcagctgtgacctagcagcagatggtcaccctgcctgcagtcggcttagggatagaacagcaggaaccaagctgcaggaagcccacagagggatggaaccagcaggagggttgtagggtttcttttgtttgtttgcttttgttctatagcaggaggggggatttgtttgttccttctttaattctgatggaggatttcaagctatgtccaacaaaaatcactgtgacggtggtggaaggagcgttgcaataagaaaactaaataaaacatacagaatcactccaataaagggatgattgtttctttctcagggttatatacctgttaccagttgtattttctgagatctaaattccatcttaaatctcttgccactaaaaggaaaagggggttaatatatactctcaatcttgcatatcagcatccacatttgctatggatctcaagattaagaaccaagacacactcttcaacaggtcgcatacttaaacacgatgtgttccataatgtcatttcttaccaacaacatattttgagcttagctgttaaggaaccaatgcctctacaatgaatcttgctggactgaggctctgaatgattttaaaaggactaaaagtagygtacgtttgaagtctcttaacagtgaagaaagagaaatgtgctctcattccttctgatgctctgtcagttgcaaatccagtcaagtttctaacattactccaatgccttttgtactttatgtttgattaacatggtattttgggattttttttaatgcagtgatttttatctttgttacaaccataagttcattccccaaaaagagctgtgtggtgctgctagagtgaaacggcaacggttcccttgtccccctcgcagggcatgtgatggtggtgtggctcgcttcttgagtgcccggctgctcaaacctctgtgggagcatacagatgcgtgrgctgtggggctccaaccccacggcagtgtctaggggtgaatgtttacagctgaaggctcagaaagtgtgttatagggtgctcttttagtttgccgtctataggcggcttgtgttagtcaactcaattagacccaggacttattgcaaggacagagggctttctgtatccctggttcttgccttgttctatgggaagaatcggattacacgtgggcttggagactgaatgcaaaggtttttttgtttgtttgtttgtttttttgagagggagtttcactcttttcgcccaggctggagtgcaatggtgcgatctcggctcaccacaacctccgcctcctgggttcaagagattctcttgccttagcctcccgagtagctgtagctgggtttacaggcatatgccacctgcctggctaatttttgtatttttagtagagacggggtttcgccatgttggccaggctggtctcaaactcctgacctcaagtgatccgcccgccacggcctcccaaagtgctgggattacaggcgtgagccaccgtgcccggccgaatacaaagttttatcaagtggaagtagctctctgcagatgggggagccagaagggagatggttttcccccggagttgggccgctccgtggtccaggactctcctccaactgccccggccaaactccgccttgtctcgcgggtcaatggcctcctggcctgccggtgcctgtcgcgtgctcttccgctggcgtgctctcaacaaccagccacttgtgtcttcctccacagatgtgttcctcacgacctccagccgcttgtgtgtctgcccgctagggtctcgagtttttataggtgcaggatggaggcgtggtgggccagggtggtcttggcaaatgcaacatttgggcaggaaggcaggagtgcccgtcctcacctaggtccctgggggtggagccctaaccagggaccatgccctcctctacccagcacttccctgctctccttccgtatcaatagcagcgttacaatatgcttctctgctggcactgatctggttcactggccagcctgcggaaaactaaagtaattgtgtccatggagatcttattgtaaattcgacagtgttttagagtataatcatgaagaaaaaaatgtttacactttagaaaatggatgtgaaggtcgggcgcggtggctcacgcctgtaatcccagcactttgggaggcagaggcaggcggatcatgaggtcaggagatagagaccaccctggataacacagtgaaaccccgtctctactaaaatataaaaaaaaaaattaaaaaaaagttagctgggcgtggtggcgggcgcctgtagttccagcaactcgggaggctgaggtgggagaatggtgtgaacccggggggcggagcttggagtgagcgagatcatgccactgcagtccagcatgggcgacagagtaagacgccgtctcaaaaaaaaaaaaaaaaaaaagaaaaagaaaaaagaaactggatgtgaaaaagttaagaattatatttttgcaaatgatacgggcttccaagaagatcaataacaagaaaagaaatagaagtttttgccttttggctgacagttgaatatactgctttacttcatcaaaaaatgtcttaccgtaatggaatccagcattccctaatggaaagagaaaactttttgctrtttggtcctctaactttgtatatattctttattttgaaaataatcctttaaaatgttacaaaatgtgagttaagctagaaagatagaatatcaacttgagtaaagtcagtaaatatcaggtctttaaattttttgtccaaatcctaaatattcctgcaccccaattatccttgaagaaaataataataataatagtgtgaataaagctccatgcaaataaataataaatagaggattggtttgaagcatacatgacttcattttatgtaagtacaaagaagccatctgatggcttgaataaattggtcttaaaacactgacaataaagaaaaaayacaatagcagtttgcttactccaaaactagtgcacattcaaaggtctttagcacaccaaagacctttggtttaattctcatgtcttttttatatataaaaaaagaaaattcccttaggttgctataaatgatatttagccaatttgctttacaaatgattcctttaagatctttagagatcacacaagtagaagaaactcacttttcttttatttcatacactcagcaattcattttgatatatactcacacctaaccaaagcaatgaaaatatatatctgaaaccagttgtcaatcacagcaactacaaatctccaaaaggcagcctgacagtttcctaaatatcagaaataatcttccatcaaagtgcctcagagtctacacatatgaagtgcattctagagatgttaaaacccactgtgaggtacaaacaccgagtttgtattctggttggatcattccaggcttaagaaacagtgccatatttttgaactgatgtattttgactcagccattactcttctgatacgagttagactacagggaaacctggagatttcctgtcagtcttgcggctgaaggaattctcacatttttttcttgccaattcttttttagaagcatagtatattacctcataaagatatcataaaaggaaaagttaccttcacacatctctcccattttgcatattagaatgttgaggccaagagggttagattgaggccaagatcccaagatctcacagttcatggagaagccaggacttstcatgcctaattcatatgtcctctaaaccataatgccacctgaaaggagattctcccctacccccaggaattagttgaatgacctagataaatggagatacatagaaacagaacatatgctttttggaccaggagatcatggatgtggtcattgagattccatcatttgctacttgaagatgtggtctcttgcaccactaagtcayagtttaaacctacatggcaaaagatagtgagatgatgtaataagaagttatatcgaccaattcaatactatacttgcctgtacactattcagttttccagattgaaaaaacaaatgataatgaaaacagattggattgcttggttgtgctgcctcctggtggcaacataaaataccgatttgttaaattttgtcacattgggagtgattgtcagctaaattgtgttttgggtttttaatgttgtttcttaatttcatattatttttcactgacaaatcatagttgtatacatttatggagtacaaggtgattttttgataaaggtatacaatgtggaatgattaaatcaaactacttaacatattcatcacaaaaaggaaactcttatacattgctaatgggaatataaattagtgcagccattatggaaaacgatatcgaggttccttgcaaaataaaaataggactaccatattatctgtcagttccatttctgggtatatatccaaagcaattgaaattagtacgtagaatagacagttgcattctcgtgttcattgcggctttattcacaatagtcaagatatggaatgacctaagtgtccattgatggatgaatggataaagatagcatggtacatatacacaatggagtactattcagcctctaaaaaagaaataaattctgtcatttgcaacaacacggatgaacctgtaggacattacgctaagttgtattttgtcttaagctccatttggattaaagttagtgatcaactatcttgtggaagtcaattcatgaagaagtacaaaaatagtgagtagtgatttgcatgcataatgctaacaaatatatgcagcaactagaaaggtcttcttatggaatgaataccaaaaataactagtcacattgtgtattctccctatttttctcaaaaaaatatgttttcaatgtcaaaggcaattaaaatctaacaattatcctgcttccttcaaatctttattacagatggtgtagtataaaatgttccaaaattagtttgtgaccagtctggccaacatggtgaaaccccgtctctactaaaaatacaaaaattagctggacatggtggtgtgtgcttgtaatcccagctcaggaggctgaggcacgagaattgcttgaactgggaggcagagattgcagtgaggcgagattgggycattgaactccagcatgagcaacagggcaagactcagtctcaaaaaaaaaaaattaaaattaaaaataaaataaaaagctccaaaattaaaattggatttggaatcaatgaattgggttctagatctgatttgtccatgatccaaagtcacttaacctctatgacctccrttttcttaactgcaaagtagtggtgctatgctattgagctcaaagactacttttgcgactacatataattgtaacacaatgatgaatacatctatttatttatttgacaatcatgggtagaaaaccctatcaygtccttggtactgtcatggtgtattaataaatgaggattttcaagggaacttctcccttgctgtgaggagagcaartatcacattctgaaattaaaatgcaggctatttattgtctctctgggttttgatctccaaatcaaatagcaaaaagatccttgtccattaagaattaaccacctacagtacttgctcctatggcccttattaatgtatcactacaggggatatattaagatctgaattattttgacatttacaataaggtttgtgcttataaacacaagatcacaccatattaaaacttattagcatattgtaactgattagatgctcacaatgtgcaaaagcagtccgttctgcaacccccttgggaaacaaaatctaaaggcagtaacagaagtaatctcaaatcacagaaacaccagtgaaagtgtgtccttggttttatagcactaatttagaagaaaaacatgataataaaaagaaaaatattcaattgaagtcacctcttagaccattcatcaacactgaactacatagtcaatttgcctcattagttcaacaggatcaagacccagtgactgaggtacccaaacaaaggaggcctgggagccagggaaacttgacaacagaaatgtgtgtttttcctgtgacgagagaggtgctaacagatcacttcttcttgggttaataaagatgaatatgtacatatgtctgtacatgtacacacacaacagagaaataaataatttagctctttgttttaaacctgtttaagaatacaagtggwtacaggaatatgtgttagaaggaatgggtctctcaatttcagtgctaaaccatttaattaggctgttaagaattcaattcatcaaaaataaataacttcatataataaaggtaaaaatctttacataatagctagaatttactaattactatgtactaagaactgttctaagcactagtatgtttaaactaatttgattctcacatccttataagaaatatgtgattatgggcctcatttctcaggtgaagaaaccaaggaaaaaagaaatttaaggcagggcgtggtggctcacagctgtaatcccagcactttgggaggcagaggcaggcagatcatctgaggtcaggagttcgagaccagcctggccaacatggcaaaaccctgtatctactaaaaatacaaaaattagccaggcgtggtgtctcgtgactgtaataccagctacttgggaggctgaggcagtagaatcacttgaacccgggaggcagaggttgcagtaagccaagatcgcgccatcacactccagcctgggtgacaagagtgaaactccgaatcaaaaaaaaaaagcaaaacaaaaacaagaaatctattaatttgcccaagaatatacaactaacaggtgattaaactgatgttcaaagtcaaaaaagtctgactgcagagcaatccattcatacccaccatggtctcctgcctctctgtgctctctcaaaaagaccactaaggccgggcatggtggctcatgcctgtaatctcagcactttgggaggccaaggtggatggatcacgaggtcaggagatcaagaccatcctggctaacacggtgaaaccccgtctctactaaaaatacaaaaaaattggccgggtgtggtggcaggcgcctgtagtcccagctactcgggaggctgaggcaggagaatggcgtgaacctgggaggtggagcttgtggtgagccaagatcacaccactgtactccagcctgggtgacagagcgagactctgtctcaaaaaaacaaaacaaaacaaaacaaactactaagcagttgaactcattggctcctcccagaacctaaatgaaagggccagatccaaagggaagcaggctgtacaatgaaaagatgcagacaaacttgctcttctaagatgatgtattagtttgccagactgaaaacacacacacacacacacacacacacacacacacacacacacacacacgcagactgagtgacttaaacagcaaatttattttgtcacaattctagaggatcgaagttcaagatcaaggtgtctgtagggttggtttcttttttttttttttttttttttttgagacggagtcccgctgtttagcccaggccggattgcagtggcacaatctcggctcactgcaagctccgcctcccaggttcacgccattctcctgcctcagcctcccgagtagctgggactacaggcgcccgccaccacgcccggctaattttttgtatttttagtagagacggggtttcaccgtgttagccaagatggtctcgatctcctgaccttgtgatccgcccgcctcggcctcccaaagtgctgggattacaggcgtgagccaccgcgcccagcctgtagggttggtttctatggcctccctccttggcttgtacataggtgtcttttccctgtatctttatatggtcctttctctgtatgtgcctgtcttctaacctcctcttcttataaggacaccagtcccacactaatgacttcacttaacctttattacctcctcaaataccctatctcaaaatacagtcacattctgagatactgggggttaggatttcaacctatcaacttgggaaggacatagttcagaccataacaaactttttgttaattttcttgggaatttatgcaggtcaagaaactgagcaaaagtgctgcagaggttggatcctcggaacatactacaattaacacagaagtaataagtaattactgcaatacttattaaacattcaccctgtgcacagttctgtatgcaatgctcatggaaggattatgaatgttagtacatattaatgttgctgctgtttgagactgttcaggtgtgttgcactctrtgagaaatgtgaagaaacataacarccccaacctctaggtaattaaaatcttgttggaaagaaaagggaaagatatgtgtaaccgcacaaagcaaygctacaagagatgctaatgatggtttataattacaaataggtaaaggaaaggaagaccaagtctaaactcagaagagaatagaagagatctaaagcagatatcatggactgggaaggatttgggagggtactaaacttgacttgggccttcgggttggagactgaagggacaaagagaaaaggaggcatttcaggaaagttaatcccaaaggactgatmaaagcgtagtgaggagaaaagttttactaacattaaggattccacaggaaagtgatagaagttgggtacaaaagtagattggagagactatgtacattatctatagccagacagccttgtaaggtgagtattcatacagtagtgaaactatagatgagaaaagtggggccaaaaagctgagctagttatcaacaggtgcaatgtaataagtaggtaacaaatagcagagctgagatttaggagacttgtgcctttgaacgtcaatgaatctaaagcaaaatttattaggacaaatacaaccttgatacagcttcacgtttttttcctccctaaccaaaaacaaaatgtaatagaaaaacaagtctatttttactcttttattatacaaagactccattattaacttacagctgaagtggtatgaaaggtctttaagagaacaggtactaaacactgtttccaggctcagccttaactggaataggaatgcagtaggatttcttggacgtcaagaggcctatatttgcttccccaaaaagcctttttcaaatgcttgtgattaggaaacaatgccttccacacacccgctctctctgttcaggtgtctgcctctttcattcctaccttaaggcattaaatgtgcttctcattgtcagatggggacccagttatttcttttttttcatttatttatttttttgagacggmgtcttgctctgtcgcccaggctggagtgcagtggcgcgatctcggctcactgcaagctctgcctcccgggttcacgccattctcctgactcagcctctctagtaggtgggactacaggtgcccgccaccatgcccggctattttttttgtatttttagtagcgacggggtttcaccatgttagccaggatggtctcaatctcctgacctcataatcagcctgccttggcctcccaaagtgctgggattayaggcrtgagccaccgcacccggccatatctcttgagtacttatgtaatcaataaatgaacaaagcaactatgtaaaacagttactaaagcatttcaaaattagccactctaaacaaacccagaagcctaaattactgacacattcaccagctggaaagactgtggactttgaagtcacatataagaaattcaacttcagttcttttttttattttgagaaggactctcgctctgttgcccaggctggagtgcagtggcacctcccgagtagctgggattacaggcacgtgccaccctacccagctaaattttgtatttttaatagagatgggatttcaccatgttggccaggatggtcttggtctgctgacctcctgatctgcccacctcggcctctcaaagtgctgggattacaggtgtgagccactgtgcccgccctcaacttcagttcttatatgtttgaccacagaaatgtaacttaacctttctaagtcwcagttttctagcctgaaaatgggagtaataattaactcactgagttatcatgaatatcaaataatatgmwaagcacagtaattgatatacagcagatgcttaggaaatattaattcccttccccttctccattcttgtgagctctctttgataggaaaaaaagatacaaataacaggatgcaaattacaaatataccaggcatctgaaagaatgagaatagaacctacaaagatctcacaaaggaggagggcagtggtgtactggcagctagactgaaaaaaaaaaaaaaagccctcatttgtacttgtgatagtggaaaaactcaaactgtttttcctctgttctatcaccacaagcaacacagaagacttctgtgaccaaatgtgtggggtttctccccacacacyaagcaagcaatcagctctgcagcagacaccarctgggtgccctccaattcaattcaattcagccactatctggagacagcctcagatcccacaagttgggggctcagtcacacaaaaccaccccctccttcccatcagcataccccagcctctagaatttctaatgcactggcttcaaattgggactctcagagccccctctttgggttcaattaattttctagagcggctcatagaactcaagaaaacatttatgatgtttaccagtttatgccaaaggatattttaraggatacacataaaccrccagatgaagagatacacaaggcaaggtctggaagggtctcaagcacaggagcttctgtccctttggagttggggtgcaccacttcccagcacatagatgaattcttgttcrccttcctctcagcttccacatattcagctatccagaagttctcttgcaccctgtcctcttgggcctttaatggagacttcactgcatagacagaattgaccaccagggagaagtatgattggacaaaaagggtattctctaacactaataggctgaacagaaacccagcaaggcttgtccagattctttttggcttctctgtgctgtattcctttttccaggctaagggscaggaccccttctgaaatgaggatcttataacccacaatcagaatggtgaaagaagattagagtcctgtctcgggctgctgacaggagaataggagaaggtcagagagagagtttctgttttttgagacctaaagagccacagcattataaaaactgttacaaaggctacgggagttatgagccaggaacaatggatgaaaacctatatgtgtgtgtgcccctgtgtgtatacagatgacatatttacaatatgtatacatattcagtatttatggaatcaataaatgaacaaagcaactgttactaaagcacttcaaaattatacgtacacatattacacatatttatataaaactggcccaattttcccatagaactgatatttatggggttttttcaataaacatagagattgatcctcctgatcttgaaacttsaaacttaacatttgtctcctctgggttccttcctcaggaaaccaaacctcaggcaagggactcaccagatcctggcacccagacaaggagaagccagagcccccatcaatcgtgattgcttcctcacccttccctaattcctctaattcctgtttcccacatgtagttatatttccccccmactatgtcaacacaccaattttaatcaatttggagagatggatttgaggtttggctctcatccctctggttgacttcacccaaataaaaagtcttcttccctggcagttctgtgcagcgagccactgaaaatagaacagatacacacacacacacacacacacacacacacacacacatacacacacacatatataatatacacatttaatagcacatatatacacacacwtatataatatacacatttaatagcatatatatacaaatttaatagcatatatatcacattttacatatatacacatttaatagcatatatatatatatatatatatcaatcatactgtcagtaatgtttgccaatttctgtgatgtagatgcaccctgtgatggctaatttcaagctatataacaatctataaactataacatataaactataaactataacaatcagccatcaaacttctgaaatatttaacaatctgcttttactttcactaggtggctccacaccagaggaaacttacaactgtgattttcatcactggtattgtgcttgttggtacctgtttcctgtcttgtcttcaaagcataagggtagggaatggttaggctgaaattcagaataaaccaaagtaaatgttgacagaagaaaattcctcaaggatctagaaccagaaataccatttgatccagcaatcccattactgggtatatacccaaaggattataaatcattctactataaagacacatgcacatgtatgtttattgcagcactattcacaatagcaaagacatagaaccaacccaaatgctcatcaatgatagactggataaagaaaatgtggcacatatacaccatggaatactatgcagccataaaaaagcatgagttcatgtcctttggagggacgtggatgaagctggaaaccatcattctcagcaaactaacagaggaacagaaaaccaaacaccacatgttcccaatcataagtgggagttgaacaatgagaacacatggactcagggaggggaacatcacacactggggcctgtcagggggtggggggctaggggaggaatagcattaggacaaatacctaatgcatgcgaggcttaaaacctagatgacaggttgataggtgcagcaaaccaccacggcacatgtatacctatgtaacaaacccgcacattctgcacatgtatcccagaacttaaagtataataaataatgaaaaaaagaaaatattagtagctgagcatataaaatgcatatagataaatgaagaaataagtataacaaaatatttagttaattacaaagtccccaagttatatctttagtaccaccaacggtgtttggcacacagtattgctgtctctatatactgattaaattattgattaaatattttccttttattgcaattgaactcagagtaaatgctgtattgtgctttcaggtaagtagaaatttccattttaactgccatagtagtaatttgtggacactcagtatatcaactcgaaaattaggataataatacctctttcatagggttgtgtaactttttaggccgagagcctcctcgcgatgttggatggtaaagtatctcagtatagaaatttggaagctaaattgcctgactttaaatcttgattcttccatatactacctgtgtataatcgcctagtgacttattctctgtgtgtctcagttttctcatctttaaaataacaatcattataccaacttacaaggttgatatgaggattatgtaatttatgtgaaattcttagcacaatattcggctaataattaagctaataatgaatgttaccgattataatttgtacaatacaaccaagaaatgttttgtttccctgcccatctctacctgttcttacttctgtttgttttcttttttttttttttttgagacagagtctcgctctgtcacccaggctagaatgcaatggcaggatgtcagctcactgcaacctccgcctcctaggttcaagtgtttctcctgcctcagcctcctgagtagctgggattacagatkcccgccaccacgcccagctaatttttgtatttttagtagagatggggtttcaccatgttggtcaggcaggtcttgaactcctgacctcaggtgatctgcctgcctcggcctcccaaagtgctgggattacaggcatgagccaccacgcccagcctacttctgtttgttttcatggccttcaggtctctttataacttagccctattctccacattagcccctatcctgcttcacttcaacatacactgacagctgtactcacagagtggcctcacctcagagcctcacacattcaatcccagcttttaggtttgccaaaaatatctttcctactttcttccagtcatttaaatctgatctaaccttgctagttcaaattttcattcccgctttcatagctctcttcttaacttctatagcaaatacacttatgccatataatcaatcatttaattagaaattcccttgtatttttctttctgctttcgaaagggaattatgttatcttccgcaactctggaattgtgcagaaaacacagaattacccccaataaatgtgcattgatcgatttatttactatttagaattaactttgactttagttattatatcaatagagcttttatcaaaagaacttttctctttaactgacactacttgcattaaaatgccaatcatgtaggagaatatggttaagtgataatgtttaattgcttaaaattattacatcatttactataatagtatgccatttgaactagatatttttaaggtttgatttcttaagtctatatcatggtatcaaatttatataatgaaaaaagtttattttagtatttggttggtgcaaaagtaattgtggtttttgccactaaaagcaatggcaaaaaccacaattacatttgcagcaaccatagtactgaaaattttacatacctaaaacgcagctaaaatacaccacattggctctgatttaaattgcaacacaaaaaggaacaaagaaatatccttaaccgtatgtaatgtgtagatttctttcacactgatgatgaatggagcgtagttgcccaggcctctaaagtagtcagaatatcatgcgggatatcctgagatagcagaaaaaacacttaagaagtagtaatgtgctcccaaagagctcagccctgctcttaaaagtaaactagtgctgatgccggggtaccrggggaaatctactactgcactgtgggcgcatgtgccattgctatgtgagacacatagtaatgtctgtccatttattcacactctaaaatttatttgtaaatagtttttaactctacttaatcccacaagattagtcttctgtctgcatttgccataccaaagaaattttggcggctgtaaaattaaggctatctagaccagcaaatgtcacatgtgagaaaagctgaacattttaacatttaaaaggctaaactaagatccatcaggtctcctcaaccaatgattcctgaattagttatctgggatacagggttttggttgtttttcttttttaatttctttctgaaacataaatactgtatgtcttatttatccaatcttacttatccaggaaagccactgacataaagtaggcacttaagaaacatttgtttctctatgacctggaccttttttttttttttgacagtctcactctgttgcccaggctggagtgcagtggtgagatctcagctcactgcaaccttcacctcctgcttcaagcgattctcctgcctcagcctcccgagtagctgggattacaggcatgtgccaccacactggctaatttttgtatttttagtagagacggggcttcaccatgttggtcaggctggcctcgaactcctgaccttaggtgagccactctcctcggcctcccaaagtgctgggattacaggtgtgagccaccacacctggcctggcctttataacatagaacaagagactgaatgaaaacaattgcaagccctgaaccaaatataatgatataataatataaaatagtataactgcaaactaaagccaaactcgatctatatctatctagctatgtatgtttagatatgtgcagaattaaactttcaaacacatgcagaattgtaaaatatggggtttaactgtagaaccttataatttgagtaagtaatactgcctgatacaactgaatcatcctgagagtaatccatcaaggaataggatcccaatcacaccttctcagtaagggtgaccgtagccacagaaagacatagcacaagagaatgcatccaaggggcaggaccttgtgctgtatttccccgctatcctcagagccaaccagagtatgtggccctcaacaaatgttcattacaagaattacagtaataaggaaaaaagaaaagaaggatttcctgagtgagggaaggtggggaagttgtctacaggaccaggccaacaagtttcagacgaagtgggtaggaaagagaggctatggcagaattaggatggggtggggaggggaaggatgaggaacagtgatcactgtttaaatctttgtctgtccttttttttttttttttttcactctattgcccaggatggagtgcagtggtgaaatctcggctcactgcaacctccgcctcctgggttcaagtgattctcctgactcagcttcccgagtagctgggattacagatgcgcaccaccatgcccagctaatgtgtgtgtgtgtgtgtgtgtgtgtgtgtctttagtgtgtgtgtgtgtctttagtagagacggggtttcaccatgttggccaggctggtctcgaactcctaacttcgtgatccacccacctcagcctcccaaagtgctgggattacaggcttgagccactgcgaccagcccattttgtctctcttttttatctttctgtccctttgtttctcatttctcagttctttttcctctctactttttttctatttcaatggcccttgtctgcttcttctattgtagtatctcattccttctctttgttgatctttccacctctagtcaccagtacctactaactccattctctctaactcactattaattatagtttggtccagtgtcttgaagcaaagtggcagtaaattgtttttaatgggaacattctgtcactttcagaagatttcaatagagatataggaaagcatcacgcaaggtctaccatcaatagaacaaataaatataagagtctttagtcagttagaaaaataagtatttactactctttctagaatgaagaagtagtgagagggagagtgaagagatctcaccactcaatcataamcaacttccaaaagccccagcttccacatggcatcaccacattcgaagagccctgtggaagggacaaagcttccctttttataggtgcaatattttagttattgcaaaattgtagtaattccattgtgcttctctgaaatataatcacagtaaggacagcattgtgaatgaagtaacacttctcccggatggaagtctgaacataggctttgcctttataacagcttaccgaattcattcaacagtttagagaatgtgattatagttcccattatggaaacatctttgaaaagtttctattgaaatataagatacgtagagaaacaagtacccattgtaagtacacagacagagaggtgacgccaactggacttmctgggtcgactggggagttggagaacttttctgtctagctrgagaattgtaaatgcaccaaacagcactctgtaaaaacacaccaatcagcactctgtgtctagctaaaggattgtaaatgcaccaatcagcactctgtaaaaacgcaccaatcagygctctgtgtctagctaaaggattgtaaatgtaccaatcagcactctgtaaaaactcaccaatcagcgctgtgtctagctaaagatttgtaaatgcaccaattagcactctgtaaaaacgcaccaatcagtgctctgtgtctagctaaaggtttgtaaacrcaccaatcagcactctgtaaaaacgcaccaatgagtgctctgtgtctagctaaaggtttgtaaacgcaccaatcagcactctgtaaaaacgcaccaatgagtgctctgtgtctagctaaaggtttgtaaatgcaccaatcagcactctgtaaaaatgcaccaatcagcaccctgtgtctagctaaaggtttgtaaacacaccaatcagtactctgtaaaaacacaccaatcagcactctgtgtctagctaaaggtttgtaaacgcaccaatcagcactctgtaaaaatgcaccaatcagcgctctgtaaaatggaccagtcagtgggacgtgggcggggccaaataagggaataaaagctgggcacccaagccagcagtggcaacctgctccggtacccttctatgctgtggaagctttgttcctttttttttttttttttttttttgagacagagtctcactctttcgcccaggctggagtgcagtggcgcgatctctgctcactgcaagctccgcctcccgggttcacgccattctcctgcctcagcctcccaagtagctgggattacaggtgcccgccaccacgcccggctaattttttatattttcagtagagatggggtttcaccgtgttagccaggatggtctcgatctcctgacctygtgatccgcctgcctcggcctcccaaagtgctgggattacaggcgtgagccaccgcgcccggccttgttcttttgttcttcatagtaaatcttgctgctgctcactcttagggtttacactacatttatgagctgtaacactcaccatgagggtctgcggcttcattcctgaagtcagcgagaccacgaacccactgggaggaacaaacaactccagacgtgccacctttaagagctgtaacactcactgcgaaggtctgcagcttcactcctgaagtcagcaagaccatgaactcaccagaaggaactccagacacatctgaacatctgaaggtacaaactctgcacacaccatctttaagagctgtaacactcatcgtgcgggtccgtggcttcgttcttgaagtcagcgagaccaagaacccaccagaaggaataaattctggacacaagatgacttttcatcaatcatatatctaatttccagaccaagaaacaaatgatccacatcctataaccagtccccatccccacttctattacaatccactgaagcccaaggataaccactatcctaatgtcaaacatcatggcttatttttgcctggttgtgtacctcatacggtctttagtataatttttatttattattcattttactattgatgtttaaattttttaaatggtcgttatgcgagcagattatcttagaagtaacatgaatggaatggaaaaagcctataaattaataattcacataaaaatttaccaatgatatatttaattttttttttttcttgagacagggtctcactctgtcacccaggctggagtgcagtggtgtgatcatgggctcactgcagcctcgactgcccagactcaagtgatcttcccaccttagcctcccatgtagctgggactaaaggcacacatcaccacacctggctaatttttttattttttgtagagacagggtttcaccatgttgcccaggctggtcttgctcaaactcttgggctcaaatgatctgtctatatctgcctcccaaagtgctgggattaaaggcatgagccatccatgcccagccaatatttttaacattgatatacttgaaacaagtgtatcaaagattatactgcacagttagaaaattatagcaataggtaatcccaaagaatctaataaactaaggggaaaatatttcacttatcaattatgtttataaacacacacaaacttaaatgtttaagttgtaactctatggaattaaaattaagtaatatttactttaacaatgtatatggtattacaaataaagctcttctgttgtttcccagaaacctatcacaaaagaaaaggacagaggaaggagaaaaacatcctagggagtttagaggatccagttgcttgattcaatctctaaaaaaactaatgcagycccaggctgtggtaacagaagtataacacccaggaagaataatcctcatatactcagaaaccgttgtaccccatctggcatgccaaacgtccttcttgttgtacctttwaaaaggcatttatacattaaggtatctagaggagagcaatcaatttcttcaaatggtgtcataaaggtttcctataatgaatggttgagaaaccatatttagggctagatagtagactcaggggacatgacagctgtcttcaaatatttcaagaattgtcaygtgaacagtggaatacatttaatctaaccttttcttgagtgtaggccttgcaaaaattaaataaaaaaagactttgataaatatatatgtaatatatattatatatatatawaaatcctacctaattattatagctgtccagcagtagaactggctgacacagaaaacaatttcctattaggacagagcttaaccgtcaagaaaataatttcctctaaatttaagaaagttctacctaacaatyataattttcaacaatagaatttgctgactcaraaagaccatgagttatatagctaccaaatatccacaaagacttatggatgtttctatgtacatgggacagtaaaatagattacagaactctaagatctccttaatttatttttttaaataatttattaatttttttattttttattctactttaataaaatatcctgggatacatgtacagaatgtgcaggtttgttacataggtatacaagtgccatagtggtttgctgcacccatcaacctgtcatctacattaggtatttctcctaatgctatccctcctctaacaccccactccctgacaggccctggtgtgtgatgttcccctccctctgtccatgtgttctcatttttcaactcccacttatgagtgagaacatgaggtgtttggttttctgttcctgtgttagtttgctgagaatgatggtttccagcttcattcatgtccctgcaaagggcatgaactcataggtttttatggctgcatagtattcmatggtgtatatgtgccacattttctttatccagcctatccttgatgggtgtttgggttggttccaagtctttgctattgtgaatagtgctgcaataaacatacatgtgcatgtgtctttatagtagaatgatttttaatcctttgggtatatacccagtaataggattgctgggtcaaatggtatttctggttctagatccctgaggaatcaccacactgtcttccacaatggttraactaatttacactcctaccaacagtgtaaaagcatttttgtttctccacatcctctctagtatctgttgtttcctgactttttaatgattgcttttttttttttttttgagatggagtctccgtcgcccaggctggaatgcaatggtgtgacctcggctcactgcaagctctgcctcccgggttcacgccattctcctgcttcagcctgagtagctgggactacaggcgtctgccaccatgcccggctacttttttgtatttttatagagacagggtttcactgtgttagccaggatggtctcaatctcctgacctcgtaatcctcctgcctcagcctcccaaagtgctgagattacaggtgtgagccactgcacccagcctaatgatcgacattctaactggctggcgtgagatggtatctcattgtggttttgatttgccaaataggaacagctcyggtctgcagctcccagcgagatcaacgcagaaggtgggtgatttctgcatttccaactgaggtacctggctcctctcattgggactggttagacagtgggtgcagcccacagagrgtgagccaaagcaggatgtggcactgcctcacccgggaagctcaaggggttggtgaattccctcccctagccaagggaagccatggctaggtrtcatgggcattccggcccagatactacactttttccacagtcttcgcaacccgcagaccaggagatttcctcaggtgcctacaccaccacagccctgggtttcaagcacagaactgggcagccatttgggcagaccctgagctagctgcaggaggttttttttttttcttttttgtaccccagtggtgcctggaatgccagggagacggaaccgttcactcccctgaaaagggggctaaagccagggagccaagtggtctagctcagtggatcccacccccatggagcccagcaaactaagatctactggcttgaaattcccactggcagcacagcagcctgaagttgacctgggacactccatcttggtgggggagaggcrtccacaattactgacgcttgagtaggcgtttttcccctcacagtgtaaacaaagcctctggaaagttcggactgggcagagcccaccacagcttggcaaagccactgtggccagactgcctctctagattcctcctctctgggcasggcatgtctgaaagaaaggcagcagccccagtcagggacttacagataaaactctcatctccctgggacagagtacccaggggaaggggtggctgtggtcgcagcttcagcagacttaaatgttcctgcctgctggctctgaagagagcagcagatctcccagcacagcgcttgagctctgctaagggacagacagcctcccaaagtgggtgtctgatgcccgtgcctcctgactagggagacacctcccagaagggatcgacagacacctcagaaagtaatagcatcatcaacaaaaggacgtccacacaaaaaccccatccaaaggtcaccaacatcaaagaccaaaggtaaatcaatccacgaagatgaggaaaaaaccagtgcaaaaaggctgaaaattccaaaaaacagaacacctcttctccctcaaaggatcacaactcctcaccagcaagggaacaaaactggatggagaataagtttgatgaactgacagaaataggctttttttaaatttaaagagatattatttttaattgacatataattgtgtacatttatgggtccttgaatttaattttcaataattctatattttgtagttattaaatatgttttaatattacctttcttttttaaatgttgatattatgtaaatttttccataaatattaaaccttgggtaaaatctatatccatgaataactataaacccattgaaacattctgcattatcaactagtgaattgcccaattattatatacctcttgtattcatcagaatgatctaagaagtgaggcagcaaccaayaggccccaagtctcagcaggtttaaagaatcgtttattactttctcttacttcacatttattacaggttggctggatcaaaattccacatcttcctcattcctggatcccagttggcagagtagccactctctacaacattgctgatcattccagcagagggagaaaaaatagcaaaccacacacattcttttttttttttttttttttgagacagagtctcacactgtcgaccaggctggagggcwatggcacaatctcgactcactgcaacctctgtctcccaggttcaagcaattctcctgcctcagcctcccgagtagctgggattataggcgcacaccaccacacccagctaatttttttgtacttttagtagagacagggtttcactattgtggccagacttgtctcaaactcctgacctcatgatctgcccaccttggcctcccaaagtgctgggattacaggcgtgggccaccacgcctggccgcaagccacacacattcttaaagctcctaccagtagcatatatatcacatctgctcacatttcactggttacaagtttaataataaggaagtttaacaatgggtgggagaacctcttgattacacctcccctgtgatatagtttgtctgtgtccccacccaaatctcatattgaattatagcgcccataatcttcacgtgttgtgggtgggacccagtgagaggtaactgaatcactggggcaggtttttcccatgttctcatgatagtgaataagtctcatgagacctgatggttttataaagggcagttcccctgcacacactctcttgcctgccatcatgtaggacgtgcctttgctcctccttcaccttccaccatgattgtgaggcctccccaggcatgtggactatgcgtctgttaaacctctttttcttgatgaattacccaatctcgggtatttcttcatagcagtatgaaaatggactaatacaccctgttttgcaattttactatctggcccacttctgggtaagataataactgtttataaagatgcagctaggaagcacagctttcttgcagtgatttctctgtagctttaagaaaccctgtgcagcacacatatgacaccagagtgcaaactgtagctaaggttggaatgaaagatactaaaactctgaaattgggatagattaactcattttcagtcagtgttctaatgagagttcttagttattcatttgttgttattcagtgattagaaataaatgtttcctgataaatcagagtctatgcactaatttcatgctaaaatatacaaatcttgaaaagattgcctttgatctgcctaggaagaacatgaagttgaagaaataaacacacacacatacacaaatcttcatttatcgctgtagaaactaggaaaataaattttcttatgttacaatgtggttttttttttctgcaatgtatcttctattactttgtttctctctcaggaaacagaaaataaaattaaaaattcttctgaaggatgtctgtttttatttcaaaattccatttttgtgggcaacagactaaacgatatgaccaggagtaacactatcctgttgtaacagtgaaacattcagtacactgagatattttctataaatgaccttaaaagaaaggtggctgttatacgtcaacttttgatgctttcaaaatcattttctgcatgcttccaacatttgcctgtttttctacccatttcctcgctcatgttttctccctactccctcctgcttctccagagaggtgtttctttcttttaatgatatattatttttcaaagaactgccttcaaacatgtcctgatagacactcatgaagccatgcccattgataatgggtcagacagtctctatatttagcaaacatggatggcgcactcccatgtgtcaggaaggagtcaaggtctagggaattcatgggtgaacaagctgaagtaagttccagccctcgaagaagtcctagacaccagactgaaaaccaaatagatgatcaaaatagagctcctcataaatatatgtagctttgtcatctgtattatttcatttaccccaagtatttaaacacaattagtcccgaatgtgttaactaaacaccaggggttcggtctgggtcctgctgctcrccacacagaaagccaattactgagacagcagttactgccgaggaagaaggcttccatctggtgccacagccaaggagatgggaggtcagtctcaaatccaactctctgactaaaattaggggttttatagcagggaagaaatgtaactatgtgtgggaaaacaggaacaagggaggagtaaggaggcaatcatgatgaataaggggcctgatgtctcattgtctggatgtgataatctggtgagtttcagttcttcaataccttttgaggggcctggtatctcattgtctggacctggtgagtttcaagctttaagaccagaagggtcaatttctatgtttattaaaacaaaaagaaaaactcacaacctgtctgtgggacttgggtcaatttcaaatggagaaatatttagtattggtttccaaatgcctatcagaagactgacttgccaaagattctcagtggaggcttattcaaatataggttcttgggacctttatcaggaaattcaaatctgcaagttcgaagtaaatcctagggaatctgtatttttcaaagctcctcatgtgattctgatacataaccaagttttggaactcctgtgttagaacaaatagtgagatagcctttccttatatataaacaaatataaacacacacaaagaaaaacatagacaatgaggaacatkttaatgaagtgagtaaatgtatcagtgtattcctatgaaccaaaatatcagagataatatgtctagtggtaaaaataaaaattagtgagtaatttgtgggtgtggggaaaatattgtttcttaacatgaaatggtaaaaatggaacagcatccaacttattcagtagtaacgtgaatgacagattagaaatatacagcggaccagctgaaatactgactacaatcaattatcactaaggtaacatttaatgggtaaacagtttaaagaaaacaaacgttggaagctgactcaaagtatatgaaattaaatatatgtaatcaataactatacaaaatcccaaaaatggcaattattaaagggcaactaatcttgcccaagaatcggaaggctcaactagtaaggaaaataccctgaataaaatggaccaaaatagataaataagaaaaacaagaagtaatcaaatttgagaaagaggcatttgggagagctaaaaagattataaaatgaagttaaggaagtgataaataaatcaatatacatcagctcaggcaaggaaagggagattgtgcaagagtttaaagtacatgctaaggcaatttgcaggtaccagagcaactgatgtgaaaatttattgagcaaaaaaacggaatgtatatctcatacataaccacatagctaagtgccctggcttattcccagagctgaatatgggaattcaactaccaaagtggggtttggaagaggatcatttaaattctattgtatgtccagatcccaagccctgggaatagagcatccagccacaaagaaaggaattgcaaatattatatacaaaccagctgatggtgcagaactagactgtatcagacaaagaagggatacaataaaatccagcaacacataaactactaagctagaagagtccatacagttataataaatctgtaaaaatgtgcaattagtacttaggttgaatcagtagaggtatttgatatcagataaggctattacatttaaaaatgtgaaaaatgggagtgggggcaaaaatgtgaatattaattcatcagcaattagaaacacagagtaaaaaaaaatacaatgcacaatttagcaaattcaaagtagacaagtaatttagggtttagtgaaaaatccagttggaatttttggcatagttcttgaagtagaacataatattctagaacatattaaatgttctttaagtataagaacacagatgaacattgcaagcaagtgtgagaattaagtctatctctggaaaattatggacagtttgggtcatctcattaggggattggtcacattccattgcgtgacatctgacactaactgtttttaaacacagggctgcttcttcaattattaatttctacctaagggcaaatgccaagagaacttactttagtttctacctcctgctgccatttcaactgtcaagaacagcaggrgtcaaaaatgaaaggcaccaccttagagaaaggctgtggcacagtgtcattttaaaaactgacagctttgtgcagtcccaaatcttaaggaaaagggattgtcacttgtgcctcctattgccattttgacaaaggaagacattctcccacatccaaaggcaacagtaatttaaaaatggcaagtagaaacatatttgcaagaagcaagtgggaacttctttactgtaagctcatgtgggaaagggaacagctgaaagtctattcattcattgaaaaaacaaccacattttaatgtctgccyattaatataataaaaagaggctaacttccaatgagagagggtacacaataagccaagatgataaagcaatgccaaaattttagttaatttttctaaaaaattaagagaaaccatattagctttgcattaaaaaaaaaagaaaagataacactgaaggatttgaatgctgaaatgaagacagtggacagatatttcaagatttatcattaaaatccagaatatacattttaaaaatttattttcaaacaytgaggttcagtgttaagaaagggccaaaaggatcctgaaatcatttctttcctcagagttcagttgctattaaagaggcagaaaagtagaataatgataatgaggcataaatgttggtgccataaatgttgtggaataagtctaacaattgcaagaaaaaccaggatgtatatgcatcctttttcccttcagataactgttgccacaagatataagcattccaaagaaatacgaattaccacaattgctaatgtaatttataataaaagatatattgagttttgttctgtcctcttcatatgagaatgactaggactttctatatgcaaatatcttcaacaaaatcttttggtactatgaatggttgcattgctttgtcattctactgtgcagatggaatgtgggatagagagggacagggcagaaggagagatgttaatttaagcaaacatctccttgtgctattttttccactagccaatgtagacaaacccatttcagaataacacaacaggagtgcagacacaggcaaaaaaaaaaaaaaaaaaaaaaatatatatatatatatatatatatatatatatatatatatatgatattctatctagtaaaatgtaagataggtccagtttgactgaaccaaggaagcctggtcacccctcccaaatgttctatggcttgagattatcagaggaagatcacaattggcaactgttaacaacaaataaggatacctaaaggaacaagagtcattgtctctcacaacaagtactgtatattctattgtgagtctgagctgtaattgcaacaatatcatggagagacctgcaacaatttatctccagatcatctttaagcaggcaaatgatttcttttactgagccagtgtgagggtccgctttgaaaggatgagttgggcggttgctcagtaattcaagtagctgtttgtgatggtcagagtggtgtatggtgttacctgtgacaatttacggggtacatttcttcatcccttccccaaccagaggaacctctaatcaccttcatttacagcagccagtaattcatgatttaagggttatttttctgtcactgaattaggatacagagatcagttctcatctcatggcccttggatgctccacaattacatccttccaagttatgccagtggaaagagaatgttttttccctataggtccaattaaaggttaggaattaaagttcatacaggatacaggttatgttctgctcctttcccatttccatgtctatgcataatctaatttctgactatttcatatatgaaacaatagccactcttttgatagcagctgccttaaaagtgttgatcaagccacaattaagtggtaaattaactttcctttgtcaagatcatttgaacacaggcttggaaatttgaagtttgaaatatacaaactggccaggcgccgtggctcatgcctgtaatcccagcactttgggaagccggggaggaggttggattacaaggtcaggagatcgagaccatcctggctaacatggtgaaaccccgtctatactaaatatacaaaaaattagctgggcgtagtggcgggcgcctgtagtccaagctactcgggaggctgaggcaggagaatggcgtgaacctgggaggcggagcttgcagtgagctgagatcacgccactgcactccagcctgggcgacagagcgagactccgtctcaaaaaaagaaagaaaaaaaaaagaaatatacaaactacatagagagtattcatataaatacatacttcatatatacattctttaggagagagaactcaaaaccacaggtcttccaagaatctaccattactagtgatataactttgaaaaaaacaagtgaatagctctcatcctaatgtgaggataagaagccaaactcagagaatggaaaaagtaagcaatataaagtacttgacatttaagcacatgacgaattaaattagttactttaactaatatgccttcactttaaatataagaagaaattttcctatttctaggaatactaagaaaagtaagttatacctaaggagagtagatattttcatatgagatattgctacaaaacctcaatagaaatgaaggttaattaatttttgttcaattcatttttgtatcaaatgcctggctgactgggtcaggtattatattcctgttcacattcatctgagactgaagtagatcagactgccgaagacctgacgccctcgtgcctgccctgaggccctaaggcttgggctgccctcatgcctgcccagatatcaaattttggctcttgcaagagtgaggagtgaatgaggaactctgcctgcgtcacgcctgtctctgcttcattgtcccctcctcccttatgacttgcctgttttgcagactgccccagcttggcctacaactgcatgtagtctttggcttttgagaaattacatagccttgaccttctactgctttacacctctgacttcttggtccaccttggtttcatatactcttttcagtccagccctcagtttaattctcaacttcaagcgcggctctctgtgtcctgctttctaggtcagctggcgcccacggatcagtctgacagctagagtatgctcagtgtaagttgacaatttaacaattgggggtgggcatatttgtgtcatgattcccaaaagatttaaatatagattacatgaggagtgtgatcaggttttacaatgagggagacttgtgcagtcgctactacatcatgcattatatgcctccaatttgacaagccacaatcaattttgtgttccctgttggcaattggctacacccattctctactttggagcttctaaaagaaggttttcattacatacctttttgctcccactacaaatgcagcaaattaccctttacttcttgcagytcttctgtatagaaaaatacgatattgctttttatgttctaattttcatatttagattatctagaatgtgtgacaaatcaaaagtttctcagtgcttctaacccctccaatttctggaaattgcattgttaatgttcttcagggaaaatttaattattcgttttactccccattctctgtatttcatgccaggccataagcgttgaacaaacacaaggatcaaataggtaatcagtgctccagaatacatggcaaaattttaaggagccccagaggctagatgatgtcagtctcagacaatacatcccgaggataaaacaaacctatccatcaaaaattttaggcaagcatagtgttcatatgccagatgggcaccaaaaccaaagacccgattagaatcaggaaagatagaataagttcaaaaaatgtcaggcggcagactgcatatacagctaaatgttgtttcccagggtgttaaaagccagcatctgaggattcgctgctagcaaaacccagtgatccacagctggggcaaagggtgcttttcagtgttttttgccaagagcaggaactcatctctgaggctactggtagaggcaaaagtgaacacatgactggagtagggaatcagagatggaaaataatagcagatcctgatatgaccactgaagatgctgaagactttaacaacaaattctatactaaaatctttctttccttactttgtaagacgtccttctgtctctcttattcttcaatctctattttctttgagagttcttttttcccccaactctaaatttaaatcagagcttggatcactctctttccctttctctctttatatctatctttctatctcgctatctctctatccacatacatgcatgtgtttaaatatgtgtataaatatatatagtatataatgtgtatataacatatttgtatatatacatgtaaatagtctattcacatatatacacacatataagtatatatgtgtatatttgtatatataatatgtatatagtatacatttctatagacacatattttggatatacatacactgtaatatgtgtacattgtgtgtggttctgggtctgtgggtgtatattctcatctttaaatatattatctcctcattgctaaaactaaggcacattaatgtagataaattgagagagagtaattttgccacaatcttaccagtgatacaggcacagtcctgtatcacagcaaccaaatagacagatctaaggtatgagagcctacattgcctcaaatttgacatatcagctactaactcatctacaaaattaacttacttaggtttaaaaaagagagtggggacagggacatttattggatcccatgagagagaatttacaactgcrtcaagatagataaatgatgtcatctgcatcacctctttccttccacgggctctgtttctgtctatgctgactccctcctttcttaatcagttctcatctcatggcccttggatgctccacaattacatccttccagcttatgccagtgggaagagaatttttttccctatagacccaattaaagattaggaatcaaatttcattttcatatttgggttaaaagttcatccttaaatcaaagacattattgtagcctgagggaatatcgactatctaggcctaagccacagaagccagaaacatggacatgggctatgagtgggagagggtttgttccccaaagagactgaaatgccattcctacaagtgggaaatgaatattgggcaaataaatcagatagctaaaataattatttctcttattgtctatggaatcatacagccattttttgactacctttttaaaaataggccctctgttaattacttatttaatgcatcattatttccttcatatactttataatatttctaattatttttcatttgttcattttctgtctaacacactacaggtaagttctatgagggtcagaatcttgcgagacttttttctctttaaaatctcaaatgagtagcaccatccctggcaaattttttttaaaagctcaataaatatatgttttcttaaaaaaaaaaaaaccaggcctggcgtggtggctcacgcctgtaatcctagtactttgagaggccaaggtgggaggatcatgaggtcaggagatcaagaccaatacaaaaaattagccaggcgtggtggtgggcgcctgtagtcccagctactcgggaggctgaggcaggagaatggcgtgaagccaggaggcggagcttgcagtgagctgagatcgtacctgggcgagacacaacaaaaaaagaaaatttcaggcaaaaaataataataataataataaaataaaatcaatcaaagaattcttcctactcatgagcatggaatgttttcccatttgtttgtgtcctctttttttttttttttttttttttgagacggagtctcgctctgtcgcccaggctgaagtgctgtgtcatgatctcggctcactgcaagctccacctcccgggttcacgccattctcctgcctcagcctcccaagcagcttggactacaggtgcccgccaccactcccggstaattttttgtatttttagtagagacggggtttcactgtgctagccaggatggtcttcatctccttacctccttgatccgcctgcctcggcctcccaaactgctgggattacaggcttgagccatcgcgcccagccttgtttgtgtcctcttttatttccttgagcagtggtttgtagctctccttgcagaggtccttcacatcccttgtaaattgcattcctaggtattttattctctttgtagcaattgtgaatgggagttcactcatgatttggctctgtttgtctattattggtgtataggaatgcttgtaatttttgcaaactgattttgtatcctgagattttgctgaagttgcttatcagcttaaggacattttgggctgagatgatggggttttctaaatatacaatcatgtcatctgcaaacagagacaatttgacttcctctcttgcaggggtctgtcctgcagaccctgacccaatgacagatgaatgaaatacactgaaacacagatattctgctttgccagtttggctgagcatccaggccgcttacagactccvgagtgctgtaaacagttgcgaccatggccccaatcagctagtgagacatacgtttaatcagtaaagattaattgacaaaggcttgagtcaacaccactaaagggtaattgacattgtggacttcccaagtagaaagcaattaagaaacccggtaaattaaaggttagtcctaggaccacatgagtaaacaagctaattagataaattactctaccttcctttgtacccactttaagctatttacttaaggtaaggattaggttgcctttagctgtagccttatcctgagacttttgcaaaaaccttcaggccttccaaaaaggtgtgtggctattgtaactatctttaatatttttctcagcagcctgattgaactcccacactctcttcctatttgaataacctttatttctttctcttgcctgattgccctggccagaacttccaatactatgttgaataggagtggtgagagagggcatccttgtgccagttttcaaaggggatgcttccatcttttgcccattcagtatgatattggctgtgggtttgtcacagagttcttattattttgagatatgttccatcaatacctagtttactgagagtttttagcatgaaggggtgttgaattttattgaaggccttttgttttttgctgtcgttgttttggagatggagtctcactctgttgccaggctggagtgcagtagtgtgatctcggctcactgcaacctccgcttcctggttcragcgattctccttcctcagcctcctgaatagctgggattacaggcaccygccaccacacccagctaatttttgtatttttagtagaggtgtggtttcaccatgttggccaggatgatctcaatctcctgacgtcgtgatctgcctgcctcggcctctcaaagtgctgagattacaggcgtgagccactgcgcccagccagaccttttccgcatctattgagataatcatttgattttgtcattggttctgattacgtgatagattatgtttattgatttgcatatgttgaaccagccttgcatcscagggatgaagctgacttgaccgtggtggataagctttttgatgtgctgctggattcggtttgccagtattttattgaggattttgcatcaatgttcatcagggatattggcctgaaattttctttttttgttgtgtctctgccaggttttggtatcaggatgatgctggcctcataaaatgagttaggaaggagtccctctttttctactgtttggaatagtttcagaaagaatggtaccagctcctctttgtacctctggtagaattcggctgtgaatccatctggtcctgggctttttttggttggtaggctattaattaattactgcctcaatttcagaacttgttattggtgtattcagggattagacttcttcctggtttagtcttgagaggttgtaagtgtccagaaatctatccatttcttctagattttctagtttattcacatagaggtgtttatagtattctctgatggtagtttgtatttttgtgggatcagtggtgatatcccctttatcattttttattgtatctatttgattcttctctcttttctcctttattagtctggctagcagtctattttgataatcttcaaaaaaccagcttctggattcactgctttttttgaagggtttttcgtgtttctatctcctttagttctgctctgatcttagttatttcttgtcttctgctagctttggaatttgtttgctcttgcttctccagttcttttaattgtgatgttagggtgtcagttttagatctttcccgatttctcctgtgggcatttagtgctatacatttctttctaaacactgctttagctgtgtcccagagattctgatacattgtgtttttgttctgattggtttcaaagaacttatttatttctgccttaatttcgttaagtacccagttgtcattcaggagcaggttgttcagcttccrtgtagttgtgtggttttgagtgactttcttaatcctaaattctaatttgattgcactgtggtctgagagactgtttgttattatttccattcttttgcatttgctgaggcgtgttttacttccaattatgtggtcaatttttagaatgagtgtgatgtggtgctgagaagaatgtatattctgttgatttggggtggagagttctgtagatgccgattaggtctgcttggaatattgtgaaaatggtcatactccccaaagtaatttatagattcaatgctatccccatcaagctaccgactttcttcacagaattagaaaaaactacagcctgtatagccaagacaatcctaagcaaaaaagaacaaagccggaggcatcatgctacctgacttcaaactatactacaaggctacagtaaccaaaacagcatggtattggtaccaaaacagatatatagaccaacggaacagaacagaggcctcagaaataacaccacacatctacaaccatctgatctttgacaaacctgacaaaaacaagcaatggggaaagaatttcctatttaagaaatggtgttggaaaaattggctagccatatgcagaaaactgaaactggaccccttccttacacaccttatacaaaaattaactcaagatggattaaaaacttaaacataggacctaaaaccataaaaacctagaagaaaacctaggcaataacattcaaaacataggcatgggcaaagacttcatggctaaaacaccaaaagcaatgacaaatgggatgtaattaaactaaagagcttctgaacagcaaaagaaactaccatcagagtgaacaggcaacctacagaatgggagaaaatttttgcaatctatccatctgacaaagggctaatatccagaatctacaaggaactgaaagaaatttacagacaaaaaaaaaccatcaaaaagtgggcaaaggatatgaacagacacttctcaaaagaagacatttatgtggccaaaaaacatatttaaaaaagcttatcatcaccacaatgagataccatcccatgccagttagaatggcgatcattaagaagtcaggaaacaacagatgctggagaggatttggagaaataagaatgcttttatactgttggtgggtgtgtaaattagttcaaccactgtggaagacagtgtagtgattcctcaaggatgtagaactagaaatgccatttgaacaagcaatcccattactgggtatatacccaaaggattataaatcattctactatatagacacatgcacatgtatgtttattgcagcactattctcaatagcaaacacttggaaccaacccaaatgcccatcaatgatagactggatagataaaatgtggcacatatacaccatggaatactatgcagctataaaaaatgatgagttcatgtcctttgcagggacatgaatgaagctggaaactatcattctcagcaaactaacacaggaacagaaaaccaaacgccgcatgttcccactcataagtgggagttgaacaacaagaacatatatatgtgtgtatgtatatatatacacacacatatatacgtatatatatgtgtgtatatataygtatatatgtgtatatatactatatatgtatatgtgtataatatacgtatatatgtgtgtatatatgtatatatgtgtatatatatacacgtatacatatgtatatatatgtgtgtgtgtatatatatgtgtgtgtgtgtgtgtatatatatatatatatatatatatattttttttttttttttttttttttttgagatgaagtctcacactgtcgcccaggctggagtgcagtggttcgatctcagctcactgcaacctccgcttcccgggttcaagcaattctgcctcagtctcccaagtagctgggactaccaagtagcagtctcccaagtagcaggcacgtgcctccacgcacagctaattttttgtatttttagtagagatggagtttcaccgtgttagccaggatggtctccatctcctgtcctcgtgatctgcccaccttggcctcccaaagtgctgggattacaggtgtgagtcacctcacccggcctcacacttatattaattttttcccttattctgtttgaatcgcctcaatacatccatttcttatgcctgctcatataatggctgccttagatgtaaatccttaccaagacttccacattgtgagatagttctcagagacttaacctggaacaacaatgagttatttgggaagaacaccatagcctgaaatgacctgtcgcaatgttagtatcaggtgcttaaagactgacaaatgaagtccattttaaaaaaaaaaaaaaaaaagcaaataagtgtaatataaatgttatctattatttatcttttttttttttttttttttttgagatggagtcttgctctgtcgcccaggctggagtgcagtggtgcgatctcggctcactgcaagctctacctcccgggttcacatcattctcctggctcagcctcccaagtagctgggactacaggcgcccgtcaccatgcccggctaattttttgtatttttagtagagacggggtttcgccgtgttagccaggatggtctccatctcctgacctcgtgatccacccgccctggcctcccaaagtgctgggattacaggcgtgagccactgtaaatttcattattgttctcgaagtttgacctcagaactgccagtgttggaatttaaagaaaataattttaaaattgatactaatgggctaggggaggtgcccaaacaccagtgggacctggaccccggccagtgtccaacctcttgacactgttgcagttaggaattcaaggacaagtgagaaaagagtgaaagtaccgagatgtattgcgaagtcaaagtacacactcaggaaaggggagtgcaggcgtactcaagcgagtgagtcgctcccaagggggtttggggttttatccttatgagtttctttaaccagggggtggaatattcccagaaaaaggtggagatttcttggaagtgtgatgccatccatttttacacaaaatatgggtgttcctggaactgtcatggtgctggagggtgtgtgatttctaggctaatgggcatataatgaggccctaggagaaagctgagtcaaatccagcactgtgatgggtccagtcggtgttggggagcttcacacacatgctggttttcagggtcttatcagcccctagcttatgatgctatttcaactgtatcctttttgctaatcatatgaaactgctgcctggaattttctattctgcaaccactctgtatcattcctatcattcctgtctcagaattacttttaaaagcatatagtaagtggttacattgtagagattaaaaaaaaaaatacaaccacagaacaaatgggaaaaaaagtgtgttcatttgtataaattttccagtgacagtatcatacacatactgagaaagtgctttgttttcagataacttagatagatgtaaagacaatctgctctaaaaactgtgtctctgatgatgataaagatccttatggtaaaaacaatcttctcagaatttgaataaatcatttcatgaaaattgagaaacaaagcaatgtcattaaattatcattttatacaatatgtttgtaaaaatgtacactgtaacaaacttcaatatattaaatattttaaagagacatttgaccatttctgcgacatctcacagataggcaatagagaacaggagctagagacttgagttcttaacccagacaccctcctctgcattcacactgcatcacttattacttctatgaccttgggcaacttttaaaacttttctatgtcttaattttatccttgctaaaacagggataaacatagtatctacctcataggggtattctgagaactaaatgaactatattctctgtggtagctattaccactgtatacagactttataaagcatttcttgcccattcgacttttttagcacatatagatccatgtaacagttagttgcctatttgttattttgtcattgtccaacccaactggaaacataaaagagaacagaagccaggtcatacattttcagattgccactccacccccaaggacccatgcacgatgaaggcactcaatgatgctttttgattaatgacatttaactaatcaactagtcaatttaatcaaacgactaagcacctcggcattttaagcatcacgagccagaacagagtttataaatgcatcagatcaattattttactaaacatgttaaataacatgttgctaacaaaatagcaagccactcagcgagaatcctaggccctgctaattttttgctgtagctatctttatctaaatcaaattgtttctttccagttggatcagtgttgataggtggatattcttagtctatctcctttgacaagatttgcctcttcccagaaaggccacataagtctaaggaaatagagtggtctttggtatttcgtacatagtatctctaataagaaacaatatcatctgatgttcccccaatgaccgagccatagggtgggctaactcgtgaggatgcaaaggctgagcaaaatctgcacagtgtggttttaggtaaccaggaattgtccagtgcccccatatgtcttccccattctgcctgtcaatctccccatctcccctttgcttggttccattgcctgaaataccagagatttatttgtattaacaatcacctggagcgataaactgcctgttatattcaaatatcctaaagagatatgctgatagaagaatagggggagaaaagtaataaattattcatgagcaagtaattcactggaaaactttctcctcccaaaggaagtaactttctcataagtaagagaagggatgtcctgcagtgcctgagagcagttgaatttcgtaaggatatatcatctgcttcaggaacatctgtgagaatagagcaaggcagaataatagacttcaccagatgttatgagacaaatattatatagtaaaaaaagagattgatatttgcattagaggattttactcaatcctactacattttattttcactaaatttactagctacacragatgatgataatttaactcctctgagcctcaatttccgcaacaaatgacaattatgatggcaatatgaggttatgaatataatatgagattacctttcttaagatgttagtattgtgccccgtagaagctaaataaaggttaattcctcttcctattaaagggattaacagaactcttgtcatgggggtaacagggagaattaaatgagataatatgtatgcaaaaagacctttgaagaatgtaaaccaacatatttacattcattattactactactagtacaagaattatgtccagtcagttgacaaggatctgtgtctccaaccgagcattgaatggctatagttagtttcatgttatagttgaytgcttctgtgaagaagaaaagcctctgtcctggaaatcaagaacccaggtctgattttagctctgatacttagtatatctgggagtatgtcccatcataactgagccttggtttcccttttataaaatggaaattataatactcaacagtatttatgatatttaaacaaagttataggaatgaaaatccttttagaattgtagggaagcagcaggtcagagggggagctatcactgaattagattcttagatctgaagcccaacaaattgcttaatttctcagagtctctcttttcaaccatgaaaaatcaatatctcaggggccattgtaaagattaagttgtatatcattgcttctcaaacacttcaagtccctctaaaagtaggggagattgacttgtacatttgcaggaatcaaggggagaaatggaaaggagagctataagcttcaagcttctttgagacttcttgttatattttatgcaaatagcacattctactacagaatgagtgtttaatttttaaaaatcttccaataatgttgattttccaggaagaaaagctaagtttacctacttgcttacaataatccaatgcatcaactacctggtatatatgcccagtttaagaaacagaatgtttttattttatttccttgattttattttattttttgagacagggtcttactctattacccaggctggagtgcagtggcggaatcatggcttactgcagccttgacctcccaggctcaagtgattctcctacctcagcctctggagtagcagggaccacatacatgtgccaccatgcccaactaatttttttttctttttttcttttttttttttttttgagatgggagtctcactctgtcgccaggctgcagtgcagtggcgcaatctcggctcactacaacctctgcctcccaagttcaagtgattctcctgcctcagcctcccaagtagctgggactacaggcgcccgccaccacgcccagctaatttttgtatttttagtagagacaggatttcaccatgttggtcaggatggtctcgatctcttgaccttgtgatccacccacctcggcctcccagagtgctgggattacaagtgtgagccaccgtacccagccccaactaattttttagaagttattttttgtagagatggggtctccctatgttgcccagggtggtcttgaactcctgggctcaagtgatcctcctgccttggcctcccaaagtactgggattacaggtgtgagtcatgcaccaggcccagaataattttaaaaggtttaacaggtcttggattatcattatcataacatcatattcattccctccaaagggcaattgaattatccctatcagagatttcttggctcagttaccaactacatctccttccctctccactatcaggaaggatgcaacccacaagagttctttgcaacataaataattcatctcactaccaactgacagcaggttcttttgtaacataacttctttccaaaaaagtatattatagtttcaagttcattctgaacattttaaggttatttagaatgcatcaaaattgttttaaacttgaattatacaatggttaactcacagataattttctttttgtttttcttttttcttctttttttttttttttgagacactgtttcactaagaactagtgtcacctaggctggagtgcaatggcactatcttggctcactgcaacctccgccttccaggttcaactgattctcctgcctcagcctcccgagtagctgggattacaggcactcaccaccatgcccagctaatttttttttgtatttttagtagagatggcatttcaccatgttagccaggctagtctcaaactcctggcctcaagtgatccacccgcctcggcctcccaaagtgctgggattacaggtgtgagacaccatgccaagcctgattttcaatagtggtgaattcagtcgtatgtggctatatgtaaagttatataatttaagaatgtaaaaactggccaggtgcagtggctcacacctgtaatcccaacactttgggaggccgaggcaggcagatcacgaggtaaagagatagagacaatcctggacaatatggcgaaaccccatctctgctaaaaatacaaaaattagctgggcgtggtggcacacgcctgtagtcccagctacttgggaggctgaggcaggagaatcgcttgaacctgggaggtggaggttgcagtgagccaagatcgtgccactgcactccagcctggagacagagtaagactccatctcaaaaaaaaaagaatgtaaaaactgatttgcggtcttaaataaaagtacaaattgctgtcatcctgtatgtttatagatatttctatctggacataagttccacatgtagtgtataaatttaggctattttcagcttgcaaattcaatctataaaaattcttggttagtatttcagtatcctagctatagcattaaaacagtatattcctcatgtgtagccaccacatctttggaaggcagccttttctaatataagagcttagaaaaggtttgttcaatacaggaattatggatctttccatacaaatatgctttgasatttaatgactgactttctctcacaaaatgctctatggacattgtaatttaacccacaattgtgaccttcattacaaaaatatctgtaatccaaccaaatttgtttctctgaagtttgagaattctttctgtctgcatccttcaagtaaaaagcctatatattatcattagtaaaaatcttctctaataatgaaaagcaattctcacaggcactataagaattttctaatttgctataaaaaatcagtaaatggttttaataaaacatttttaaaaatcaattatcttatgtaactaaactctagcatgtccccagaagattcaagttggttcatattctactgtgtggcttttcattattcttttttttttttttttgagatggagtttcgctctgttgcccaggctagagtgcagtggcatgatctcagctctctgcatcctccgcctcccgggtttaagcaattgtctgcctcagcctcccgagtagctaggattacaggcacccaccaccatgcccagctaaagtttttttttttgtatttttagtagagacagggttttgccatcttggccaggctgatcttgaactcctaacctcgtgatccacccacctgggcctcccaaagtgctgggattgcaggcatgagccactgggcccggcctaattattcttctttttttttttaatgtaacagtgtgactctttaatagcaatgtacagtaaagtatctttgttctcactggccttgacttatgaaatctgagttccttatttaaaatcataagatgtttacgttacagtgtcttcatggcacaattttttttctattccctccattctttaaaactcaagtaatctcttcatcgttttccttttttgctaactgatcctaatttgccagttatttttcgagaagtgtttgatttcaattatggaaaataattattagaaggatgctatctaactgaataaaaaaataacaccttgtatctatgtcaccagaatactgtatcttctaaatagaaaatatttttgttataaaaatatcctattaaaatattccttgtggccaggcgcagtggctcacacctgtaatcccagcactttgggaggcagaggcgggcggatcacgaggtcaggagatcaagaccaacctggcgaacacggtgaaaccgcgtctctactaaaaatacaaaaaaattagccgggcgtggtggcaggcgcctggagtcccagctactcgggaagctgaggcaggagaatggcgtgaacccaggaggtggagcttgcagtgagcagagatcgcgccactgcactccagcctaagcgacagagtgagactccgtctcaaaataaataaatacataaaataaaaataaaacaaaatattccttgtatcagggactaaatgtgtctccccaaaattcatatgttacaatcctaattcccagtgtggtggtggtaggagatgtggcttttgggttttagctcatgaggtggagtgctcatgagcaggctagtccccttataaaagagtccgcggagaaccctcagcctgttctaccacatgaggatacatggagaagttggcagtttcccacccagagtaggaccctcctcagaacccaaccatcccgcaccctaatctcagactttctggcctctagaactatgagaaataaatgtttatttaagcatacctagtccatggtatttttgttatagcagatcaaatgcactaagacaccattttattatgtaactcctagttttaaaaatgaagatgttatttggtaggcatactagattacatataccatacttcaagttagcacttttctgttttccaaagaccaaaggctaatttttttcttagatctggaaaaaaaaagactaaaaatgcagtaactaccaaatttttagagctgtccaccagaaacaacaatcaaaccagtctaaacatgtaccagctcctgagtctgaacagaaaattcccaccctttctgcttactatgtacttatgtaattatgtatttgtcacctctcattcctactaatactaaaatgcattatcattttatccatttataagggagtattacctcattccttttatctatatgaccaagaggtttacaaactactaccaccataggtaccagtgcagaattatgagtattttctggttataatcaaaaagcaaaggtgtctttccaagtcttcatacaagagcggctcttcagccactgacctcagcggaagtcactgatatttacttaatgaaacagttttcagtctctgcacacagattctatgaatgcaagtttcaattagaaatatattcacagtcagggccgggcacggtggctcacgcctgtaatcccagcactttgggaggccaaggcgggtggatcacctaaggtcaggagtttgagaccagcctgaccaacatggtgaaatcccatctccactaaaaatacaaaaatcagctgcctatggtggcgcgcgcctgtaattccagctccttgggaggcagaggcaggagaatcgcttgaacctgagaggcgaaaattgcagtgagccaagatagaaccactgcactccagcctggggtgacagagtgagactccatctcaaaaaaaaaaaaaaagaaaaagaaaaagaaaaaagaaatatattcagagtctaaagtacaccatgcttgaaaaaggacaaagacacaagaaaaaaaaagtgatccgaaggcagtcaaattagataacatgcaatcataatgtaagatgtgatgaaacaacacttcccacatttgcttcttttcttatagaattagttatcttatgccttatgtaaatacacatcttgaagatgttattcaatatattgaataaagaatattgagcaaagggtatgagctagaattgagctgacagtagataagaacatatagaaggtggagaccttctggggcaagaaaattacatgcccaggtctcagtaagaactttgcctggtcgaacaggaagaacaggttgaacaggaagaatgcatgctccacatatgcctccagcaggtttgaacatcagccacagtraataaatagggtgatgagggctgggagggtgaagatgggtaaaaggagtccagaaacctgcagggcaaaaccaaaaagactgaaaatagtctaagataaagagggagtcgagaagagaacgcatagacaagttttagaaattgaaggtctttgtgagaagggaatgggaagttagaaactcagggagcattgtgggaggactggtagatactgagtagagaatcagaaaaggacaaagctgttagagatctctccagagcctgagcaatgccacatgatgtttatgttcaaggggtagtcattctggtctgacaatgtgaatttatttatttatttatttatttttatttatttattttttttttttttgaggcagagtctcgccctgtcacccacgctttgagtgcaatggcgtgatctgggctcactgcaagctctgcctcctgggttcacgtcattctcctgcctcagcctcccgagtagctgggactacagacgcccgtcaccatgcccggctaattttttgtatttttttagtagagacggggtttcaccatgttagccagggtcgtctctatctcctgacctcgtgatccacccgcctcggcctcccaaagtgctgggattataggcgtaagccgccgcacccagccaacaatgtgaatttaaaacaaaaatctataaagtctgggaaactgaacaacagggaaaagactgaaaatcatgaaaattgctgctgaaataactaaagatacagaagaagtgtagattgtactccaagtgatgtaattatgaggtaaagtggaaactggtgaattcattccgctgaagactgaatttggagcttgttgaaaaagaacattatctaaatcaaaaccaaaatgaggtaccatttcgctccactagaatggctattttttaaaagtcaaaaaataacagatgctggcgaggttacagagaaaagggaatgcttatccactgctggtgggagtgtaaattagttcaaccatgtggaaagcagagtggtggttcctcaaataactaaaaacagaactatcggctgggcacagtggctcacgccttgcaatcccagcactttgggaggccgaggcgggtggatcacaaggtcaagagatcaagaccatcctggccaacatggtgaaaccctgtctctactaaaaatacaaaaattagctgggcatggtggtgcgtgcctgtagtcccagctactcaggaggctgaggcaggagaaccgctygaacccgggagagagattgcagtgagccgagattgcaccactgcactccagcctgacaacagagtgagactctgtcaaaaaaaaaaaaaaaaaaaaaaaccgtcatccaacccagcaatcccattactasgtatctacccaaggaaatacaattctttccaccataagacacatgcatgtgttatgttcactgtggcactattcacaacagcagagacatgaaatcaaactaaatgcccatcaatggtattggataaagaaaatgtggtacatatacaccagggaatactatgcagccattaaaaaagaatgagatcatgtcctttgcaggaacatggatggagctggaggccagtatccttagcaaactaagtacagaaaaccaaatattttgcatgttctctcacttgtaagtgggagctaaatgatgaggacagatggacacatagataggaacaacagacactggggcctacctaggcgtggagcatggaaggagggagacgatcaggaaaagtaactaatgggtactaggcttaacacatgcgtgacaaaataatctgtacaataagcctctgtgacacaagtttatctatataacaaacctgcacatggacccctgaacataaaataaaatttttaaaaggagcattctcacacataagttttatgtaagttgcattttaaagcaatcaactccaaggttagagatttttgcaaaggcagtcaaatgacatcaagccagggatgttcagtaagcagtgcagccctttcactcatgagagatactctcagatttagtggtggttttcagttcactcaggaggaagacatgctggaaatgaaagccagggctggagctctctgcatgttttattccccagacttgtcataattacctcttacggttgtgaaacaacattgataaaccaaattacccaaatcataacttccagggcataagtacagtttcctgtatgcttccaatgctatattactgcattacccaaaggttatgtaataatgagtaggcatcctgcatgcacagccacattgtaattacattttgatgaccatcatgtaagaatggaccatcatgtatcttctgctccacatggcctgagggaactaagctcagcgggcctaggtgaggtctatcaccacaggcttaaggaaacaaataggtgtggagggagatcctggggtcatatgagctgtgatgaaatttgatcccagcaataaagaattctaatagacctctggtcaaagaatttaagggagtcattagctcctgagctctgttagattacaaactatttttatagtgccataagtaagtagagagctatcataagtaatgtagacaagatttgtaaaatgagtcttacatgtccatgtatttattattcactactgttacatttgaagcatggtgccctatctccaactccaccctggttcatcattttttatcggtatttttaaaaggagagaaattctgtgatcttatgaaatcggaccagtttaaaaaattacctgaacaaaagtcaaaatgcaaaaagcaaaacaaaaagctagaggctaagataatgaatgtaacagaacacagtatttggttgggatagaaacgactcgtcagcactaaatgcatcatttagggtttctaacaggcgacagccccttctaaagtttcccttccacagtcctggctgcaggtgcgctgtatatggtacaatgtaccagcttgccccagaggatttgaaagtgggcatctgatctgaagaccccatttacagattgttcagtgagttayagagggtacaagaaaaataacaaattgtagccccttcttgggtatttgagctggaatgtacaaaaatcgtataattttcaagagctataattgaaggaatgctagaggagcggcaaaaggagaaattgtgtttttttaaaagatgaaactgtaaaatagaaaaaagattaacagtgtgaargaaaagcacactgagaactaaaggcagtggcgtaagggtartatcaccrgaaaattgagctctcttcctactttgtatgggtcacaaagcaagaacacccaactggaccaaagggcaaacatttctggccagagatggaggagtaagcgcatgctctaaagaccccttctccccaggtaataraaaacgtgaggtttttmaggactgagtctgggggttggagaggaatgttagcatgtgtaaggtgggactccacatgttcaggcttcattcataaacatrcatcttcacacagcccatatacataagatggtggagattcyctccttggggtgggaattttagcactataatgatatagtcatgaactgaaggcaactagggatcctgttccagtttgggctggttttggggtctgatccccctctaatacctggtcaggggtcacaaagctctggtgccatcccagtccacctgattttttttagctgtgcctataagtcaggcactaaagaaagagtaagaaaaagaattttctcagctatttcatcaggtgaaagtgccctggtaaaagtaaatgagtaatgggctgaagtagagaagagatctttgatttgcagcattgacaactgataatttctgtggagtaaatgcttccagcctgaccaaattaaagcatccaatgtgaagtcactgaatgctcagttcagaagaaatgctacagctgcctccaccacgccactgaaaaggggatgtccaagaattcctgctgctgagctccctggacttgcttggatctgtttccagtctccatgaggcttgattttaccatagttactattttcagattgcagtaaacttgccattaattattaaggataaccgaaacttaacctaagtgcatttatattcacagtactttttaaaactcaatttaggccaggcatggtggctcacgcctgtaatcccagcactttgggaggccgaggcgggtggatcacaaggtcaggagatcaagaccatcctggctaacacggtgaaaccctgtctctactaaaaatacaaaaaaattacccaggcgtggtggtgggtgcctgtagtcccagctactcaggaggctgaggcaggagaacggcgtgaacccaggaagcggaggttgcagtgagccgacatcgcaccactgcactccagcctgggcaacagagcgagactctgcctcaaaaaaaaaaactcaatttaaaaaaatgcaagtgcgaaatgcaaaagagatttttcagtagcacaggctaaaaatgctatagataggagaaagctgtggtgagttctccatctttgtttaagcataacctgtgagaactccatttccaacttcctttgcttatcttttcacagcattaatggatacaatgatggcaacaaaagttgtctttggccctactcctgctctaaaggcattgcagtaaggaaactcttgctgtttactcccttccatgaagaattgggacttggatcctttgattctatttagggccctgctccattctctgcgcagcttcttgtgttcatttccactgtaatccagtggttttcaaagtgtcatccccagaccacgaacagcagcagtgtcacctggtaactttctgaactagagattccctactgcggacctactgagtcaaagctctgggggtggagtccaatcattttgtttgtttgtttcagacagaatttcactcttgttgcccaagctggagtgcaatggcgcgatcttggctcaccacaacctctgcctctcgggttcaagcaattctcctgcctcagcctcccaagtagctgggatgacaggcatgcaccgccatgccgggctaattttgtacgtttagtagaggcggggtttctccatgttagtcaggctagtctcaaactcccgacctcaggtgatctgcccgcctcggcctcccaaagtgctgggattacaggcatgagccaccgctcctaggcacactttttgtttcaatgagtcctccaggagattcaaatgtgtgctcaagtctgaggaccactgctctaatactctgtggccttaaacatccaactctagcattattcttccctagggtggtgcacacagaatcaaagataaatttcttcccatttcagatgacctgacagttaactcagaatgtcagtggcaggtgtcacttcaattttctacataataacagagatggaggggatcatggcagacakgaggcaggactagattgcagctccagacagagcagcatcgggaggcttgcattgtgaattttagctccagatcaactgcaagaacaaaccagcaatcccgagaggacccacagaccctatgaaggaagcggactgctcctgcaggaccccagagacaccccaaatactgtgagtgccccaactgtggaagtgggaaagggagacccttctctcccgaacacacaccctcactggagaagctgaaggtctgtttgcgggagaagtttccgacttgacttggagctgagtcaagttagagagccaagtgaactacaggggtagaggaagcagcagaaaggccctggaagcttgctgggtccccaagcagcccatgcctgcctggcaccacagggaaccatcgtgagtgtggccagaggtgcagggggtaaagctccacagggagaaagaattctctagcccaactttgtaacaatttgaatgaggcgagaagcctcctggccagaagtccacagaggttgtgaatccagcaggccgacttcacggtgcaggggcagagggggaacaactaaagcccttttctttggcagcggggaggcggatagcctcrggtaaattttcaggcccctcttgccctcctcttggaaagactctgagctgttgggggagcacagtgggagtgagaccggcctttcagtttgcgtgggagctgggtgcggcatatgactgccggcttttccccacttccctgataacctgcatgactcagcagaggcaaccctaatcctcctaggtacacaactccagtgacctgggactctcacctccatcccccacagcagctgaagcaagacctgcccaaagagagtctgagctcaggcatgcctagccccgccccgatctgatggtccttctctacccaccatggtagctgaagacaaagggtatataatcttgggagttctagggccctgccagtcctccacactactacagctgatgttttccggaaagcgccacctcctggcaggagcattaaaccaccaaagctaagacccctcacggagtctattaggcccctctgccaccaccactggaacaagcgcctatatccacagctgagagaccccatagacggttcccatcataggactcctctgtgcagacaacccccagtaccagctcagagcctggtagactcgctaggtggctagacccagaagaaagacaacaatcactgcagttcagctcacaggaagccacatccataggaaaagggggagagcactacatcaaaggaacaccccgtggaacaaaagaacctgaacaacagccttcagccctagaccttccctctgacagagcctacccaaatgagaaggaaccagaaaaccaaccctgaaggctcttcaacaccccccaaaaatcatactagttcaccagcaatagacccaaaccaagaagaaatccctgatttayctgaaaaagaattcaagaggttagttattaagctaatcagggagggaccagagaaaggcaaagcccaggcccggcatggtagctcatgcctgtaatctcagcactttggaaggctgaggcaggcagatcacctgaggtcaggagtttgagaccagcctggccaacatggtgaaactctgtctctactagaaatacaaaaattagctgggtgtggtagtgggcacctgtagccccaactactcaggaggctgcagcaggagaatcacttgaacccaggaggtrgagattgcagcgagctgagatctcgccactgccctccagcctgggtgacagagcaagactctgtctcaaaaaaaaacaataaaaaataaataaataaaagcaaagctcaatgcaaraaaatccaaaataaagatacaagaagtgaaaggagaaataatcactgaaatagagaattaaagaaaaaacaataaaaaaagtcaggaaactttgggcacacttttacaaatgtgaaatgctctggaaattcccagccatagaacagaacaagtagaagaaagaaattcagagctcaaagacatgctctttgaattaacccaatccaacaaagacaaagaaaaaagaataagaaaataagaacaaagcctccaagaagtctgggattatgttaaatgatcaaacctaagcataatcagtgttcctgaggaagaagagaattataaaagcttggaaaacatatttgrgggaataatcaaagaaaactcccccagcctagctagagacctagacatctaaatacaagaagcacaaaggatacctgggaaattcatcacaaaaagatcttcacctaggcacattttcatcaggttattcaaagttaagatgaaggaaagattcttaagagctgtgagacagcagcaccaggtaacctataaaagaaaacctatcagattaacagcagatttctcagcagaaaccctacatgctagaagggattggggccctatcttaagcctcctcaaacaaaacaattatcagccaagaatttcgtatccagcagaactaagcatcatatatgaaggaaagatgcagtcattttcagacaaacaaatgctgagagaatttgccattaccaagtcaccactacaagaactgctaaaaggagctctaaatcttgaaacaaatcctggaaacacatcaaaacagaatctctttaaagcataaatcacacaggacctatgaaacaaaaataaaagctgaaaagcaaaagcaaaaaacaaaaaaacccaaagtacacaagcaacaaagagcacaatgaatgcaacgttacctcacatttcaatactaacattgaatgtaaatggccaaaaggctccacttaaaagatacagaactgcagaatggataagaactcaccaaccatctgctgccttaagaagactcacctaacacataaggactcacataaacttaaagtaaaggagtggagaaatacattttatgcaaatgaacaccaaaagagagcagggttagctattcttatatcagacaaaacaaactttaaagcaacatcggttaaaagacagaaagagggacattatataatggtaamaggtcttgtccaacaggaaaatatcacaatcctaaacatatatgcacctaatactggagctcccaaatttataaaacaattactaatagacgtaagaaatgagatagagagcaacacaataatattgggggacttcaatactccagtgacagcactagacaggtcatcaagacagaaagtcaacaaagaaaccatggatttaaaccttggaacaaatggacttaatagatatatacagaacattttatccaacaaccacagaatatgcattctattcaacagcacatggaactctctccaagacagaccatataatgagcctcaataaattaaagaaaattgaaattatatcaagcactctctcataccacagtggaataaaactggaaatcaactctaaaaggaaccttgaaaaccatgcaaatacatggaaattaaataacttgctcatgaatgagcattgggtaaaaaatgaaatcaagatggaaagttaaaaattctttgaactgaatgacaataatgacacacaacctatcaaaacctctgggatacagcaaaggcagttctaagatgccaacaggaggttcatagccctaaacgcctacttcaaaaagtctgaaagagcacaaacagacaatctaaggtcatagctcaaggaactagagaaacaagaacaaaccaaacccaaacccagcagaagaaaggaaataaccaagatcagagcagaaccaaatgaaattgaaacaaaaaatacaaaagataaatgaaacaaaaagctagttctttgcaaagataaataaaattgaaagaccattagcaagattaaccaaaaaagaagagagaaaatccaaataacctcactaagaaacaaaacaggagatattacaactgacaccactgaaatacaatagatcattcaaggctactatgaacacctttacacacataaactagaaaacctagaagagattgataaattcctggaaaaatacaacccttcgagcttaaatcaggaaaaattagatacagaacagaacaataacaagcagcaagattgaaatggtaatttaaaaattaccaacaacaacaaagaaactccagaacaagatggattcacagcagaattcaaccagacattcaaagaagaattggtaccaatccttttgacactattccacaaaatagagaaacaaggaatcctccctaactcattccatgaagccagcatcagcctaatatcgaaatcaggaaaggacacaaacaaaaaagaaaactatagaccaatatccttgatgaacacaaatgctaaaatttttaagaaaatactagttacccgaatccaacagcatatcaaaaagataatccaccatgatgattaagttggtttcataccagggagcagggatggtttaacatgctcaagtcagtgaatgtgatacaccacataaacagaattaaagacaaaaatcacatgataatctcaattgatgcagaaaaagcatttgaaaaatccagcatccctttatgattaaaactctcagcaaaatcggcatactaggcacataccttaatgtaataaaagccatctataacaaacccacagccaacgtaatactaaatggggaaaagttgagaacattccctctgagaactgggacaagacaaggatgcccactctcaccactcctcttcaacatagtactggaagtcctagccagagcaatcagacaagagaaagaaataaagggcatccaaatcagtaaagagaaaatcagactgtcactgtttgatgatgatgtgattgcttaccttgaaaaccctaaggactcctccagaaagctcctagaactgataaaagaattcagcaaagtttccaggtacaagattaatgtacacaaatcggtagttcttctatacaccaacagcgaccaagcagtgaatcaaatcaagaactcaacccctttcrcaatagctgcaaaataaataaataaataaaatacttaggaatacacctaaccaaggagttgaaagacctctacaaggaaaactacaaaacactactgaaagaaataatagatgacacaaacaaatggaaacacatcccatgcttatggatgggtagaatcaatattgtgaaaatgatcatactgccataaggaatctacaaattcaatgcaaaccccatcaaaataccaccatcattcctcacagaattagaaaaaacaattctaaaattcatagggaaccaaaaaagagcctgcatagccaaagcaagattaagcaaaagaacaaatctggaggcatcacactacctgattttaaactatactataaggccacagtcaccaaaacagcacggtactggcataaaaataggcacatagaccaatgtaacagaatagagaacacagaaataaacccaaatacttatgtgtccggaattggtgggttcttggtctcgctgacttcaagaatgaagccatggaccatcgcggtgagtgttacagttcttaaagatgatgtgttgttccttcagatgttcagatgtgtccagagtttcttccttctggtgggtccgtggtcgcactgacttcaggagtgaagctgcagaccttcacggtgagtgttacagctcttaaaggcggcacgtctggattgttcattccttccagtgggttcatggtctcgctggcctcaggactgaagctgcagactttcacagtgagtgttacagttcataaaggtggcatgtccggagtggtttgctccacctgtccggagttgttcgtccctcccagtgggttcatggtctcgctggcttcaggagtgaagctgcagacctttgttgtgagtgtaacagctcataaaggtgacgcagacccaaacagtgagcagcaacaaaatttattgcgaagagtgaaasaacaaacgttccacgggcgtggaaggtgacccgagcaggttgccgctgctggctcaggtggcctgcttttattcccatatctggccccacccacatcctgctgattggtccattttacagagagctgattggtgtgtttacaaacctttagctagacaccgagtgctgattggtgcatttacaatcctttagctagacacaaaagttctccaagtcccctacctgattagctagacacagagcactgattggtgcatttacaaacctttagctagacatagagtgcttattggtgcatttacaaacctttagttagaaaagttctccaggtccccacccgacccagaagcccagccagcttcacctctcaatggcattcgcggcaggactttgtggcacctagcctgggcactctccaacagcccagagggagcttgtcccccatcaagcccagcaggcggccagcctgccatgcccagtgcgggcccctgggagcccgcgcccacccagaacccatgctggcccgtgagcactgcgcgcagccctggctcctgcccacgcctctccctccacacctccctgcaagcagagagagccagctctggcctccgctggccccagaaaggggcccccacagcccagcagcaagctgaagggctcctgaagcgtggccagagcagatgctgagaccgaggaggcaccgagagtgagcaagggctgctagcacgttgtcacctctcacagccaactgatcttcaagaaagcaaacaaaaacataaagtagggaaaggacaccctttctaacaaatggtgctggggtatttggctagccacatgtaggagaatgaaattggatcctcatctctcaccttatacaaaaatcaactcaagatggagtaaagacttaaacctaagacttgaaactataaaaattctagaagataacattggaaaatcccttctagacattggcatgggcaaggatttcatgaccaagaacccaaaagcaaatgcaatataaacaaaagataaatagctgggacctaactaaactaaagagcttttgcatggcaaaaggaacagtcagcagaataaacagacaacccacagagtgggagaaaatcttcacaatctacacatctgagaaaggactaatatccagaatctgcaattaactcaaacaaatcagtaagaaaaaaamcaatcacatcaaaaagagggctaagtacatgaatagacaattctcaaacgaagatatacaaatgactaataaacatatgagaaaatgctcaacatcactaatgaykagggaaatgtaaatcaaaaccacagtgcaataccaccttactcctgcaagaatggccataatcaaaaaacagtagatgttagcgtggatgcagggaacagggaacacttctacactgctggtgggaatggaaagtagtgcagccactatggaaaatggtgtggagattcttaaagaactattaatagaactaccctttgatccagcaatcccactactgggtatctacccagaggaaaagaagtcattatttgaaaaagatacttgcatacgcatgtttatagcagcacaattcacaattgcaaaaccatggaaccagcccaaatgcccattaatcaatgagtgaataaagaaactggggcatatatatatatatatatatatatatatatatatatatatatatctcccaataaattatggaaaaataaaataaaataaattttaaaaattctacataataattactattattagcagtcgtaattaaaattccactggcgtatgccctgtttatatctgcttaacacacaaccctaccttcccttcaagtctctttcctatctggtagtctcagaggacatctggtagcttctgaaaggaaccctaacatcttctggttctgagtccccttgtttatgtcccaaaggctacctgggagcttcgccagagccacagaacttccacatagcagggcctaggagcagcaggcttgctggggaagggactagaggatttttttaagttacagtttagaagcaagtgtactgcttttatgttgtttatatgtcacagatttaaaaaaaaaaaaaagacaaaatgtccagagatgctttcctgcacttttacattagattcaaaaaaatgtcaattttcttcatcgttttgcaggtgactggagaactaatagggttatgagagaaaggaccttagagctcatttctctgtccctagtcaacccttagtagacagaaaatctaagagattagcaagaggtcacatgaatttgggtgaactatgtaaggagagtttatgaaacctaatcagtgaagaaatgccggaagcaataattgtaattgacaagtctagtgacatcgttgagggaggaaaagctgagagacatgaccaacagccactaggagacaaaatgttgttgacagtaaagctaatgtccttggccaccacaggaacaataaaatgcagcartatgtaattttcacagaagacaaaagaattgatgggcccatccaactcctcattgaatattttctctctgtttagaagaattgtgtccgtttcttcaaatatgaaccatcctcaggaagagcagaggacaagacactgcagtaaaaaagtgtaagttcttcaatacgataccagggacaaaattccatctccatcctcttagggtcctggctgggcccaagaatttaactgacataaaagagattaataggagaaaagcagacaaagttactcaatacaagttttatgtggcacgagagccttcataaggaaatgaaaacccaatgaagcagttggagtcagttacttcaataccgagttggataaacaacagtgagttgtgaagaagcaactaaattatgtggggaggcttaaaagagaggagttattttaacaaagtctgtacagaattatttgggtctcaatttttcatccatgaaaataagaatgttattccttttggtacagggaaagtgtctttcacataggaatttcatcttccgcttttaagaagtagaaaagaggtcacaatgatcttcttgcacctgctgtttttttaagtacctttaattcaaaattgtcaataatgccagagtggtacaggtttaactccttcaatacctcggccacatgcaataattgttctcatttttcacactgtttttaaactgcagcttcagcattacttcaaccacagtagaatatacttgccttggtcgtatttacccatrttagaggaactaccgcaaaaaagcacaataatttattttaaatttaattccaatcaaaacsatttacacagaaaactgatgtgataacaattcctaaacttcaaaaacttttttaaaactgaaatgtaacagatgttcaatattgtgtccggaattggtgggttcttcgtctcactgacttcaagaacgaagccgcggaccctcgtggtgagtgttacagctcttaaggtggcgcgtctggcgtttgtcccttctgatggtcggatgtgttcagaattttttccttctggtgggttcgtggtctcgctggttcgggagtgaagctgcagaccttcgcagtgagtgttacagctcttaaggcagcatgtctggagttgttcgttcctcccggcgggctcgtggtctcactggcttcaggagtgaagctgcagaccttcacggtgagtgttacagctcataaaagcagcatggacccaaagagtgagcggtagcaagatttattgcacagagcgaaagaacaaagcttccacagtgtggaaggagacccgggcgtgttgccactgctggctggggcagcctgcttttattctcttatcgggccccacccacatcctgctgattggtagagcccagtggtctgttttgacagggcactgattggtgcgtttacaatccctgagctagacacaaaggttctccacctccccaccagattagttagatagagtatccacacaaaggttttccaaagcaccaccagagtagctagatacagagtgtggattggtgcattcacaaaccctgagctagtcacaggctgctgattggtatgtttacaaaccttgagctagatacagagtgcccattggtgtatttacaatcccggagctagacataaagattctccacgtccccaccaaactcaggagcccagctggcttcccccagtggatcccgcacaggggctgcaggtggagctgcctgccagtcctgtgccatgggcccgcactcctcagcccttgggtggtcgatgggactgggcaccgtggagcagggggtggcgctcatccgggaggcccgggctgcacaggagcccacggagggggtgggaggctcaggcatggcgggctgcaggtcccgagccctgccctgcgggaaggcaactaaggcccggtgagaaatcgagcgcagcgccggttggctggcactgctgggggacccagtacaccctccgcagccgctggcccgggtgctaagcccctcattgcccggggccggcagggccggccggctgctccaagtgtggggccgccaagcccatgcccacccggaactccagctggcccgcaagcgctgcgtgcagccccagttcctgctcgcgcctctccctccacacctccctgcaagctgagggagtgggctccagccttggccagcccagaaaggggctcccacagtgcagtggtgggctgaagggctcctcaaatgccgccaaagtgggagcccgggcagaggaggtgcccagagcgagcgaggggctgtgaggactgccagcacgctgtcacctctgaatatggcatttatatgaataaagaaaagtatgttattcaaaagaatttaaggagacaaaatatcattaacccagttgaaatttagccagattaatatagtttgtcctactgaaccttatagcagtgtctcctttgtgctgacatcaaggactttttaaaatatcttaaaaaggcaattcaacagcgaaacttctactcagtgaatatccaagagaactaatttcagcttttattagcttgcagtgtaacataaagcaagtctagtccagcattctgtgtctatttggtgaagcagctacagtatggattttaataaagcttctcaactcaaaactgtactttgcattttaaggatagtatcaaactgtgctcccttcatacctttgctcccaagaggaaacctatcatacacacaagggaatggacaaaagccttcttttactgacttatgataatttccggagcagtggtcagcgtgagatcatggactggcaacatctcagaaataagaaaatacagccctcttcatatttgccaatacttatgtttaaatatgctatagtctttgccatgatatgtacatattttaaaatgtcaaattctaggcataatgaaaaggtattagtaaaaaaattttttaactcacaagttaatatttacttttaaaattgcaatgaactccatttttgtgctatggaagattttgcccttgagtaaatacatcacatattcataccagaaaccataaaatacaaacacttttagaataaagttgtattttctagctgattacaaaaactatcttttcttaaattgtggtataatggcatgtacctcagggtaagagattttttttttttcaacaccagaaggggaagaaagtaagttgatacacagttcggtggctgtctttcctgtctaaaagctcagagaaacaaaggtaacattgtcattgttttatgattttaactctgctgggaagcttctctagtaagtttcaactgcaggggatgcatttgatgaaaatcttaaaagcagttgagtggtataaactgttgacttttatccttccctatcatgagttgcttattctttgaaggatctttacctgggaagctttcaactgccattgtcatgtgaagcctcctgtatccggagataaaacaaaattaacttttcaaggacatggtggtctggcaaaagaaaagttatttaggaactaaacataagttcaaaaatctaatcagtaccccactgaatttaagttttgtgagcaacctatttcctcccttgtatctatagagattgtacatgaagctgtacaaaaaaaaaaaacaaatcctgaaaaatagatcatctgtatcatttcttccttgggttagtcttacatacattttcatatgaattattatacaattcaatgagttttgaagccagttttggctaacacaaagtttctaaaaatttcttaattttaagtattttatgctctgcaaataatagtataactactgttttcatcccaatgagcttaaatttcctctagcaagaaaggattttctcttttcaaaaaatttcaagactagcattattactcagcactcacatatagagtaaaataaactgaaaattaacctcttcaatctatagtttgaggttgttagtgacaggtaataattgaacactggctacttcgtacaatggtggtaataacagagactgaggaaatgtgggtttttgtactgctaaaggcagatgtagctactcatctctgaaaaagaacactgatcataatgaaaaatttcagtttaaaatgtagaggaaaaagtaagccaagccttttgtgctatttttttagatgtatttaacctgtatttctaaaacgtctactctgtaaaatacgttctaattacattcatcttgtactccatttccatttcatttcattctgtccttaaaagttgactagtacatttttaaaaattgtattaaccctttaacttactaatactatgccttaatggactgtttgtggaattgtagccattgtcattgtagccattgtcattgtagcagtgtcaatattagcctagaggaaattaaaattattcattccagagccttaatttggtaccattatattatattatatttgattgatataagcacttcatgggcaaccatgtctgagaccagttgccatatgcttcttctcttttcacaagcatttctgaatgagaaggtgaatatttcagagccgcagtaaatttgattgtgaatgtcaggagattatgaatgtcagtaactgaaaaagaatcaaggaagtctagtcctcactataaagccaatgtgttgaacagatacagactttagagaacttaaacaacgcatttatttttatgaagagattaaagagctctagttatttgttttgttgagggtatgataggatagtgctagaaaccaggctttgtggtccccgttcagtacatctttcattctgccatcaatgtttccaaacagaaatagatcttcagtatggaataatttacataaatgctttacaaaaaagaatgatggtagagattagtcaattttttcattgaaagcagtttttcattatcctattagctaactgcttttcacattatgacagtcaccaattccaattgttaaaaaaaaattgtwttcaagtaaactcaacttccatatgaattaaaacattcaattcattggcgtgaacccaggaggtggagcttgcaatgagccgagatcccgccactgcactccggcctgggcgacagagcaaaacgccatctcaaaaaaaaaaaaaaaattcaattcattatttttatttgatttttctccttttttcccttcttcctttttctccatttctccctttttaattaagattatgaatattttctaccttagcagctttctctatcaatatcaaataagatgatatgaacaaccaaataaagagatatgtagtcctcctttatccgcagttttactttctgctgtttcagttacccacggtcaacctcggtctgaaaatattaagtggaaaatttcagaaataaacaattcataaatgttaaattagatgccattctgagtagtgtgatgaaatctcacaccatcctgtggcatccttcctgggatgtgaatcctccttttgtccagctacccacccattagtcacttagcagctgtatcagatggaaaaaaatggtatgacacagagagagtttggtgcgctccatggtttcaggcaatcactgggggtcttggaatgtacctcccacagataaggggatactgctgtagagactttggtggacatgactccataaacgtatattctcctttgtcattgtactcacattttcacctcagatgtttatatctgtgtttaatatgggaacttaaaagccactgcatgatcaggaatgtgcacattataaacattataatcctgctcttttgtctcctacactacatatagtttcaaattcaggaaatattctgtaacaacctccctgttactgtccttaaaatgttaaagatatatttagcgccatccttttcctcatctcccagaattaattgatcataaagccattctgatttttctcatgaataattttcatatttattccctcttttccatctgtccctactattcctaccctttctatctctcacctgaatgatggcaatatacttctaattggcctttctgcctcaaagcaccacctcaatactactgtcaagatgaactgtctatatcaaaaactgctgaaaagccttcaatgacacttatgaatgtgtgcaagttctttactctcttatacagagttccttgggattctacctttccagtacctacctcttcagtatcccttcccttaatccaccatcatgagttcactacagaaattctgaactgcatatcgatcgctgaacattgcttgtgttattctgtcctgctgaacattgcctggttaatttcaaaacattttcacaacttggttctgacatcactttctccaagaagccttactgacttcccattttggagctaggtaccctatcttctgaacttttagaaaactctgagcattactctaataacatcaaaccactgtatttgaatcatctatttatacaactatttctcttagaaatttgcaagctcctctcacagaaagggtctccttaaatatggtacaggtggttacctattcaaaatgggtttaattcttccatcaattaattaattaatgagatattccccaaaaaactataatgaagatttttgagaagagagatcatattcagacaggaaaatagcaagaaagaattcacaatggcagtagcacttgatatgaacatcggaaaatgtgtgaaatccaataagcagtgttccatgaaaggacatgtcagaaaaagatgtcaaaacacagaagtgagagacttgtcagaaaacatgatgtaatccagctaagcaaaaatgaaacgtggttggtgtaaaataacagtgaagggtaagatgataataagaggatgaagggcttttattggcaaactaaagatattgatctacattcaataaaaataatagctatcacttattgaacacttattttgtgcttgatactattctaaccactttaattgttctcacaattaatccacagaattaatccatgagacaggtactataatctgttttacagataaggaaactaaggcatttaaatcttatgacacttatctaagatcttacaactagtgagtataaaaccaccagaatttttggtggtaactaattaawaataaattctctaatgacccaaattattacatatccaaaaatatttaggtatagcaaatataagttgaataacttgacccttgtagaatgtcacattgagtgttgagccatgtcatggttcttcaatcaattataagacctgaataaattaatgtactcatggttcctgaaagaatggaaaatcagatatgtttgagaaagaaccccaagaaaccatcaaagactattctgtaattctttctcctggcctttgccaggagcttgtgactatctactaatttctttgrgtattgagagagaaatacgtggacttactgtcagactctggttctgctaatccctggagacctagaatgctactgtggaaaccccactcagagtgagggcctgggtctgtctcatggtaaacacattctcctgttgctcagtatcagagtgtaaactgaaatgggtatactcaacaactagcaaaatccctacattgactctgaatcacggagtgaggactagatggaaccacaggccaatttggtgtctgtggaattccccttccctaagatgagtaagaccaaagcagcatgatatctccagtgggaatctgtatattagtgccactattaattacttaaaagatgcagtgattttggtcccttatgtgtcctctttcaatytgcctttcagtctgtacagaaaatcaataagacttacagaagaatagtagattagggagagtttaagcaatagttactcaaattcaagctgctgaaccaaatattgtctcataacagagcaaattaagcccttcagcttagtatgcagctggactatttttcctctccatcatactatatagagaataccagaaacagtttgctttcactgggcatggacagcagtatattttcactttcctgtcttgtgatatgtcagtttttgtgtagtatgtgagctatgtgtggtaattctatctctgtgtcataatttagtctataggaatgataatgatttcaccattccacagtaagtcaagttttactcttatactgattattttttaaagatagaattttatgaacactaactaaaagcaattaacctagtggtcttgctaagacacaagtaaataaaaaggtccaagataaacccattaaaatatagtgctcagtggactaaataacattataatatctttgccacagtgaaaggcaacttgctgtaccttgcattgcccacaactaagaaagataaagtgcacaccacggtcctatttcaatttggtaggcaacatacaacttttggcatatttttctaaactagcaagccatctataaggttgccagttttgaatggaatccagagaaagacaaagttttacagctgataaagctgtagcaaaagcatccctgcctcttagctcttatgactttgtggacccattagtacttgaaatgactgtagcagatcagggtacttagtggagccaatggcaggctcctggaagaaaatcatagtaaacactcattgaatgccccctgaggaaaaaccctcgctggaaacaatttttctcttcttttgtactaactgcaaccgtattactaggatctggtagactaaacactcaatcatgagataccaaatggccatgcaacctgacctgtccagcatgaattaggtgttactgaacccagaaaatcatcacgttgtcagcaacactccatcatgaagtcaatgtaaagacataggcaagttgcatgcagagacaactcaaattctcaccatctctactcttattgtcctgcctcctctccctcataaagtctcatgagaatgacttttgttactactcgactgaggaagaaaacatttggacttggtttacataaacatggtatgttataaccatgcagaggtagaccaatatagcatttcaggacagtcagggtgtccctgatggacagtaggaaagattaatcctcccagtgagcaccaatcccaccgtggttggggcactgtctttcaggatgtggtatatgcttcaaaccatcatctcgtatatgatgccaagtctctcaaaaccaaaaatacatgagcctgggaccaaggaatgaaagtggcaccttgctctcaaacctgctgtcttgttcataattttgttttccatcctggaactttggtctccagttgtttagaggtttcaatactaataatgtccccaagactaatgatccctttctacatcttaattatagagcaccctaagtatttagcacatggctgcccggttagagactacatgttacaattttccattgcacctattaggtagtcatgtggttaagttatgactaatggggtgtgagcagagtgatgcatgcaactttcaggtcaaatctttaataatggaaaatgcctgaactctactttctttccacattcatatgtagaaatacatacaaattctacagatgtaatgcagatgatccagttctgaccatgcctgcaaaaccctacagcactacagagcaacaagacagaacaagactgaagaagcccctatgtaatcttataaagcagagatagttttatgccctaaaccatctgccagtactggactcatgggaggggaaaagagtatcttgtttgagctaccgtattttgtggtttcttcatggtagcaggttatcttgttctgtaactgaaacagtatccaagggagtaatgttctcaaccaaaaaaataaaaatgatcccactgcactagcagatggcattgtcgcctggtcatttgggagtccacatgttactgaaccgacaaaggaacaaggggtgttactgttttagtgggtgattaatacatcttacggggaaatagtcattgctatattgtgaagactgaaagaatattctggaagatgcaatgctctgggcaaggttacttcccaattctgctacaacaaggaagatttgagttacccacaaggaataaaccctgatttgctatgtgtcatttgagggaaaagggaatttagaatgggtggtggtgtgtggttaattttatatgtcaacttgactgggccatggggtgcccagctacttggttaaacattattctgagtgtgtctgtgagggtgtttttggataagattaatatttgaattattaaactgagtaaagcagattactttccataatgtggatggccctcaactaatcagctgaaaacttgaacaagacaaaatttgaccctcccttgagtaagagggaattacttctgtcggactgcttgcactggaaagttggtttttccagcctttgggctcagactgaaatggttcattttgggtctcaagcctgctacctttggactggaacttagaccactgttctgtttctcaggccttttgacttggactggtactacaccatcagctcttttggttttctagcttgccagttgaagatcttcagacttctccacctctataatagtgtaaaccaattatttatattaattaagtatgtctcaccattctctctctctctctgtctttctatttcttcctttagtgggagataggagaactataaaatgctatatcaagaaagccagggtgattgatttctgcaaaaagggttgggggaatcagtgttagtcattgacaacttatcaaggtagatgaaaattgaaaagagaccattgtttgtgttatgatacaatcacakgtgacggctgctgctcacttgctaaggagttaagktggaaggtagattatttagggttgaagaatgcaaagataaaaagcatagaggacagaaacagtttctgtcaaagagtttttgttttgttttgtttggtttggtttggttaaaaatgtgcatgataagtcagttcctcaagggaatggcatggctaaaggaaaatttctattttattttctgtttataaataagaggtctgggcctgtgaataggcagagaaaaagaggtccatggggaggaagacatggaagatggaatagaaagggaggataattaatacggaagggttcagaaataatagagaagaattaggatgagaagatgaggttatgcaggtggtctaatcagaaaatagaaacaattattttttccacaaaattcacttactgtataaatttttaaattaatgtaaccaatatatctcttaatagtaagtttctctactttctctcctcatcgaaaggcatactgaaacatcattttgttgttgttgtttttgtcgttacgatgctgctaggaaattgtgtcttactattcatgtttctagagaacaagagttcattgccagtctaattaaaattcagaacaactctgtatgtttttgaaacataactgaagaatatttcatccggaatacaccttgcaagagaatgttgaattctttactcttcatttaaattaaggttttaaaagaggtcaggcacaatataagcagaggaatactaattgaaaaagcaatcataaattttttttctcttctaaatatacttcagaaatagttcatataaattgtgtagttcaaggatactttttcaaagtacacacaaattaattagtaacaaaatattaattatgtgtgtttgattgaactgatgaggcaaaatagaatacatctcagtgcttcaagaccaaataaaatcatagcaactcttatcttagaacactatttttctctttttatcttacattatacaggttgattattcatactaaattcaacagacacttttctttacatcattttgtgattcatcctcataatttagttttaagtcaatgacttaaagacatgacgtggtttctcatgagccatgaagggcaaaatattctgtgaatcacactttgggggctgtatggacaaagaagctattatatttcagtccttctgagatttcttccaagaagccatagtcttgactaaattatataagtaaatccacaaatcagagtggaacaagagcttcagaggaaagaagcagtattagttccaaccctgggggagttctacttggcgactttcaagttaccatggtctttctatcttttaaagacagacaatggactaacagaaactttaatgaacaacctggcatctgagacaaactttaagttgagcaaataaagttcattcaaagattgccaaatttctggagattttaagtgactttcatttctctcttactggaagaactataaatacagtttctaaacactgtgtacttaaatacattctatttagcatttataggctaagaaaaatactaatcatctctgtggttggtatctcataagatggtcaccaaagaaatccaccttctggtattcagacccttgtgtaaatcctttcccttgagtgtggcccagacccagtgacttgcttataacaaacaaaatgcagtaaaagtgatagaatatcatttcatcataaaacagtggcttcctctgtggtgccctttcttacttcctccattccgcagtctgagggaagccagttgccatgttataaaatgtcccatgaggtccatgtgacatggaactgatgtctccatctgacaacctacaaacacctgagacctgccaatcatcacaacaatgaccttcgaagctgatccttccctattcaagacctaagatgattgcagccccagctcacagcttagttgctgccttaagtgaccctgaatcagagacaaatagctaactaggtattcacatgcctgacaataggtttgttgttttaagytgctaggtttgggggtaatttgttacacaatagatgactaataccatctgtgcattcctaatgttagatctatccttggtataagcaaagcattttaactatttttaaacaattatttgactccaggcactgttctaagtgccttacaactattaactcatttaagccctgcaacaagcctatgaggtaaattctgttactaactatttttggtaaatgaagaaacaggcatcagatgatcaaaccacttttccaatggtcaacactagaaagtggtgaaatcagagtccaagcttttaactactatgctatcctgtctttacaagtcaataagttttaagtatcttcattgttattagttaggctcttcccccaaaataaattctttacaacttctaagcagttagcttatgagttcctcaagccaagggagaccataagtgattaagactatattttattcatatgtgtgcgttcagcttactacctagcatgttcaggaaatgtctgttgaaaataattgatttagaggatagaacaagacttagggcatgtaaagaagaattcattctttgtgaaatgaaatattctaaaggcctaatctataattattgcaacctagcctacaggagaaagtccagctgtacatttacatgtatgcattttccagcttctgttttttcacttgcattttgtgcaataaaaaggaaagttttaagagctagtggatggcaaagtaatttatggtgactggaagtaatctgggaacatcagaagctcacctcggtgttgtgagaccttaccatcgctgttagcattcgtactatgtcacatctgcattcttctttgaagctgtgtaaactggttctggatgaagccttctgagtttgttttacagacaaaatgcagaatcactttcaagtagagcatgaattgcaccggacatgcataaaactgggacaattcttcccatctataaatgctcctttttaaaaaaaataatacacatgagtttggcaatgatgtaaaacaaaagaaagaggaaaaaattcagtagtaaaaagttcaggcagaaaacacaaagaagaaagaatccaagtagcctgtgagctttcaacagttcaaggaaaaagatgtcctacagctggatcagtagcaagagattaaccactttaactggtctgcaaaaggacttggtccacagaattaaaggagctcatttgtgattccctaagaaaggctgctttttttgttttctcagaagaaaggggcaattactcaaaacagagcaataacaggaagaaaccaagagggaaataagattgagtcaccccaccctttccacatggtaccacatctgtatgctcaggcatttgaacttcacctttccttactaggaaaagctcaaagatatggtcagaaatagctctcaagtcacctgaaacgaagaatcccctgcttaatatcatattaataacattaaagaaaccctatagaaaatatggaaatgagatgtgtattcatcccagcataattaccactatattttgtgacagtttggaaaaatggtggttatttctgctactgtgaacttacagaatgaaatgtctcaaaacgatctcaataatgtatattttcactttccatatttactaccatatttttgcacatactcaaagattttattatctggattgttactaagataccataaagaggtcatcatgtgcaytgttttatactgatatttgtataaaacatactaatagacatacaagtggaataataaatcaaaaaagtgcaagagaatatgtagcaaaaaaaaagagtggggagaaggatcagctgttagaacaaactctgcctcaaaataaaatataatcatgtgtcgcttaatgaggatatattctgagaaatgtatcataagrcaatgttgtcattgcacaaacaccatagagtgtactgacacacctactgcacacctagactatatggggtaatctgttgcccctaagttacaaacctgtacagtgtgtgtgtaactgtactacatactataaacaactgtaacacagtggttaagtttttgtgtttctaaacttagaaaagataaagtaaaaattaaaggagtataaaaggtaaaatacagtaaaaacacaggtacacctgtataggtgcctaacttgaatgaagcttgcagaactggaagtggagctgggtgaatcagtgagtggtgagtgaatgtgaaggcctagggcatcactgtacactactacagagtttatgaacattgtatacttaggctacagtacatttattttaaaagtattttttctttcttcaataataaattacttagattactgtaacttttactttataaactttttaatattttaaactttttgacttttgtaatagcacagcttaaaacacaaatacagtgtacagttgaacaaaaaaattttcttcctttatatccttattctataagcttttcctatttgaaaatatttttttcactttttgagcttttttgttaaaaataaagacacgaacacacataagcacacacattagcttaggcctacacagggtcaggagcatcaatatcactgtcctccacctccacatcttgtcctactggaaggtcttcagaagcaatagtccatttggagtgtgataatatggataaaattttatcctatgattataggataaaattatcctatgataataaagccttcttctggaatacctcccaaagaacctccccgaggctgtttcacagttaatttatatatatakgtgtgtgtgtgtgtgtgtatatatatatgtatatatatatatatatataaatacatatgtatgtgtatatatacaaaaaatatgtgtatatatacaaaaatatatatgtgtatatatatgcatatatatgtatgagtactctaaaataacagtaaatagtatggtatagtaaatactaatagataggaatttttagagccattataatcttatgggatcaccatcatacatgtgatcctttgttaagtgaaaggtccttatgcagtgcatgactgtactaaagtaagctgctacatactttgtttcttatcaataaaatctttgcttccactagaccagtgctataaataactaatattatcaaatagtcttttttatttttttgagactgagtcttgctctatcacccaagctgtggtgcagtggggcaatctcggctcactgcaaactctggcctcttaggctcaagtgatcctcccgcctcagcctcccaagtagctgggactacaggcaagcaccaccacacccggctaatttttgtattttttgcaaagaccagtttttctatgttgcataggctgatctggaactcctgggctcaagcaatccacctgcctcagcctcccaaagcactgggattacaggcctgagccaccagcctcaaagactcttatagcttacaaagtgcttttatatttattttaattctcaacataagtcatgaactactactatctatctgacaaataacaaaagaagctcaaaacaacaacgcggatgagcctggagaacactacgttaagtgaaataaggcaggcacagaaagacaaataccagatgatcttactcatatgtggaagctaaaaagtttgatctcatagaagtagagattagaagggtggttatcagggcctgaggttgttgggggtaggggggaatgtggagaggttagtcaagatacaaaatttcagtaagatagggagaataagttcaagagctctactgtagagtatgctgactaaagttaataatatattcttggaaaatgccaagagagtgaatgtcaagtgttctcaccacagaaataaaactatgtgaggtaatccatatgttaattagctagtcattccacagtgtatacatactttaaaaccatatgttgggctgagcgtggtggctcatgcctataaacccagaatgtggggggccaaggtgggagggttgcctaaggccaggagtttaaggccagccgaggcaacacagcaagaccccatcgctacaaaaagctaaaaacaaaacccagaaacccatgtgttgtacacagcaaatacaatcttatgtcagttataaagaataataaataattttttgaaaagcaaagtgacttgtccataaccacaatatttttcattttcaaatctcatttttatttcttatgccacattgcctataattatacagctaacaattatcccatgctcagaagaaataaaactgacgtagttagtaatcagtaatatatctttcccttaaaacaagtattgctgacttaatatgcataaaactgctgtcacataccaaatatgaccaacaggtaaagggtgagaacaatttcactgactacaatatttatagcaaataagtgtctatatagtggaagaaatatgcttaaaagaaataggaaaatgccagtagagaaataaactaaattatgcaactgcacttagaaataaaggcctttattgttatttcaactaccagatttttttaaacagtgcaaatgcatttcaatgatttaatttcaagtatgattgacaccaatataataatatgagaatttataatgaaaataacacctgtgaaaaatgatctcaaaatatttctataaaatatcctatacaatataattaacattataagcaaaatacaaaatgtttctttcaccaacaagaaacccatgagagtgatggctatgatgttaccatgcatagcagagtatgcatataaattaatatgcttttaatccagattctatcaactgtgtccattttaaatggtattcttaaatattacaatgctaagattttaaaggatttcttaaagtacctaggaaagctacacagaaagaatcagtactattgaaagaaaacaaattaaacaagtcactttagtcttgacctaaattcaatgacacttctgatattctgaatctgtctgrgaaaaatatattccacaagtgcttgaaaaaactatagggcattgtgatttataatagtagttctgaacaaataaaaacccaacgtttttacagttgaacaaaattcggcttggacaatagggaacctaaaactcatttggattcatgcagtgtttcaaaaacacatcactaggacctcttacaatcaatctagtagctcactggcagctagaaccaaaatctctaagtctaggtgtatgttgaccagattctgcgtgcttaaaatctcaggggttgcatacttgtacaagctatcttttctttttccagtgggacacctgaaggagacagagaattacagtaatctaagttggctatcataaaagtatgaattaaagtttcactgcttatttgtgacattacattctaattcactctatttctaaactcattacacataggttttccccagtagactgaatgtaactcaggaagaacagccatcaattaacttgtttataccttgtgcacagataagagaatggctatcattttagtttcgtaacaggaagagatgaaaatctgcaggaacagagctttagaggcttcagygtgcatccttttcatattatctgaattatatttcaggatgtctgaagcctccaaagtcagggttccgatatcatacgctattgaagcagatcttcttccaagctaatagtgaaaaatattctctaatagctaggtcaacttcacaattttattcttattcttttcttgatccataatatctatttattcctgaaatcttcaggcacagacagagccacatcaatgcaaaaatgatggcaagaaaagaatatctaacttctattcctttaccagaaggggttgcagcagaagttaataggagcaaaactggataaggggcaacccagattgataaaagacagtatgatcctccataggcagcttaatattgtgcagaggcttctaagtcctcacagggcacagaaggatatcaaagttcctaggctggattcagtaaatccagttaacattaccttttagcctgaacacgtggtttgaatacaatagatgcttttcattctgtattatagagtcacacggtattttgggatttgacccaactattcagaaaatttgtacttttcccataaaaaggtaaacagataggtattttttgttagcaatacagctttacttttctaaatttgattaagcatttcattccctaaactatgctacataagtaatgttttctttcatctttttccttcattatcactaaacctttatagtctcgtcatatcagagcacaaggaattacatttcatggagttataaactgtcatggacattgcagcctgggccttggagagttctgtgtacaaaaagattattttataataaagatgaaactgataatgatggataatgagtataatgttaatatccacacatctttgctccagagtttttgctttgggggcttccttctcagaaatcctcaaaataaaaatgtggaaatgcattagttacatgtttttgtaaccagaaacctatggctttaccaacctaggcagagcaaacaggacttgtaagcaatgaccaaattgcacaagtgataaacctatacaggcctataacaaatgctatgctatttctagaaaggatttttttcttctaaatggcccagatgaagtcctgaactccctgcttctctccttttgctttggcagagagaagctaaggatgatgaagcatgatgtgacatcctggctaatacaactttcttctccctagtaaattttaccgggcaggtcttcacagagcattcagatcactagtttttcaagtactgatgcttaatgtcgttttttttttccatatcagaatatcaaattttatttcagtgttttatattcactgccagttgaatctgcctagattttaaataagaaaacataccatctaaacatgatttcatgccatctttctgtaatggttttattttaacttggggacttattctcctacatataccccaaatgatacatagtaagtgatatatcactttctgaagacatctcatatggttcctgctttcatgggctttctcctgccagtcctgcttggattactcatccccaatctttacccattataaatctttcaagagccactgctaactcttcaatgattacccccagacaaataaaattctcccctactctgggcttttatgcatttggggctacacttatggcatgtgtttatatgatacttatttgaatattttcaagctaattatagtaggcatgatagtaagaagaagagggatgatagtctcatcgccaataggtgcttaatgcaaacgtactaagtaaaacattgtcctggcaagtaagagcaagtctaagttttagttatatattgcctattaaatgtcacgtattaaaatttatgaacttttgggaaacattttaactacaacttttcttttatgaatttaagtacagaaaatgatattttgtattcaaaaccactgttaaacatccaaggtgctgttaaaactatgaatatcagaaatccctggtcaacatataaaaataaaaggaaagaaaatctggccggcatggtggcgcaagcctgtaatcccagcactttgggaggcctagacgggtggatcacctgaggtcaagagttcgagatcagcctggccaatatggtgaaaccctgtctctactaaaaatacaaaaattagccaggcacggtggtggacacctgtaatcccagctactcaggaggctgaggcacgagaatcgcttgaacctgggaggcggaggttgcagtgagccaagattgcaccactgcactccagcttgggtgatagagcgagaccctgtctcaaaaaacaaacaaacaaaaaagaaaatctcatctttctggtaactcaccttttgtaatcactaacattttcagtgctgcctcatcataacaaaatgtggataaggagacgagcataagaaatatatttctttttcaatttttgccatttcttttttagtgtcagaggttgtcaaaataagagagaaaattcatctcatactcctcttagtgtgattttaaagctttcttcatcttttatacgtgtatcaagttattattctctatatactttttctaatccacaggtagggatgcgagttttatatgatgtctgctttgttttaaatcaagattgtttatttttcttatcctaagagttattttatctaaatgaaatccctggggttttttattagtttacttaaaattggtgtttgaattttatcaattagttttaaaagtcttcctttcattttcaagcaggaagttcttagtgttcttcaaatttatgcaccttctcaatcttttccagaatcccacaggctggatcatctttatatgactatgccctatagctactaaccttgattccagaagaatgacaacagagaaacagcagagtacctgatgctagtttgacttcaaattccaatgaaaattcctagttctatattgtctctatggattcattggtataaatggcttaaataatgacttccaatgtaatatacatttatttgacaatttgaaatcctttagggaacatttcttatgaaaagcactgttctaatactttagagtgttagaaatacttctataaatttctaaaagttgcagatctcaactttatagtgcagatctgtaaacttttctgtaaggggatggacagtaaatatgttaggctttatacagcctctgtcataaggatgaaatccttttgacattgagaagtgtaaaaatcactcaactcatgaactttataaaaacagatggttggctagatggcccatgagccatagtttgttggaacatgagagccatcagattttgtatctgtaactagtaggggagaaagaatataaataataggctacatggttctataagaaatgtatacattattaagagagttcagagaaaccatcaataaaattgtatgaagtatcattttatgcttaaatctgaaggttaactttaatgaaatatttctaataaagcaaaaagttgtgaaaatatgtatttaatattaactctgactaactgtaaatgtagtatcacaaattagaaccaccaaagaattctcaagtctatctgttaattagaagcaggacacaatctcaataagtaaagcaggaagaagagaagtaatgcagaacagttccatgtcaaagcagatgacaaagatgacagaatgggatagcaaagtaaatacacgacattgaggaaataactccttgaatctactgctctcaagcaaggaatgaatgtgagaacaggatcaaagtaactaatgcaggtcaggcgcagtagctcacgcctataatcccagcactctgggaggcctaggtgggcggatcacctgaggtcaggagttcgagaccagcctggccaacatggtgaaacctcatctctactaaaaatacaaaaattagccaggcgtggtggtgggcacctttaatcccagctattcaagaggttgaggcaggagaatcgcttgaacccaggaggcagaggttgcagtgagccgagatggcactattgtactccagcctgggcaacaagagcgaggatctgtctcaaaacaacaacaacaacaacaacaacaacaacaacaacaacaaagtaatgcaggcaacaaaaaatgcaaaccacttgaaaaatattcacataaaaattaactgagccccccaacagtggtcataaatgggataactgaaaaacaaatatggtgtacccatcctcacccccaaactattacaaatgccaggtcaaaacagcacaaaataagctgaatgcttaacactgctgcaagaaatcgtgctgaggagaaatggatttgaattatttaggataacaagttaaaaatcagtccaaacacaattttctttctgagttagtacctaatactgcagactctcaattgtgctgtgcagacatcattaatgagcaatttattcagatacaattctttgctctattagaaatattcttatttagagctaatcaaagacgattttcatttatcataaatggcatcaaaatgccattttgtgatttcatgcttatttcacttgtatgactggataaaataattataaagggctttgcctagcaaaagtcaaaatcagactgtctttatgtagacgagttttgacttcctctccattgacagcagcttttctcttctaattttcctctctccaaaccatctccggacacccaacagtaccaagactggaaattctgccccatgtcgatgtgaaaaatggattagcatttgcgacttctacaactccatggttagcctatatagcagagaatagttctctgtttcactcccacacacctcaaaactgtaatgtctttcatttttactccaggggagctgtctcatgcttcttgagatggggtaaatttgtacataataagagcaaaaggtctaaagagggagcttaattgtccaattagatgttatcaaagcctaattggtgggaacagagtgtaccctgtgacctaattcttaagaggtcaattgggagaaaaacatcatgtttcccactaaatgcaaccacttgcaaagtcttagatgtcaggtctgcagaagtgctcctttgaaaatagctctttgtagaattttctgatttaaaaaatcctgtaaatcaaacatctctttttaggctctatgtatcaccagctatttggttacattttatgattatacaaatttgggttaggcatcagagccaataaacatcttatgttttacagattcttccaagaaaaaagtggactatcaatccaaactgcttatttctagaattagatacttaaggaaattttgttaaggtccccaacataagctacataaacttaacattaaagccactgggatcaaaagggagaaaggaagggaaatagcaattattgagttgctacaaggcattaggcagggtactttagctactttatgtgtggttcagaatttgattttctcagccctgttaggcagatgtcattgtcattttacagaggcacagagactgattttctaaagtcatccaacaactcactggcagtagagtctaatgactgcaaagtctacaggctttccacgacaaaacactgtcctatttattaaatttgaggatgaaaaaagataaactttgagtagaaacggcattaagtgtttttctttgcaaaatttgtctttgcttaaaccccagccaaccttccaggcctaaattatatacctcctcttccattttcttccctttccctgcataactagccagaagtgaccaatctctctcctaacactccccaaatattgttttcactatgaccaaatcattcatatactacattcacggtatggcactaaacaccagagtccttgacctctcattaccaagyactcagtgggctcactgccctgtgtgcatagaggccaacaccaccgtactggcttttgagaaaagaccagctgttggccctcaaggagactgaggaaaagctcaaatctatytctctgagctggggactgggttgggttttatawgcataaggtaatgaggtgtgctctgattggatcttgcaactaggtgatgctggaaggcatgatctgactggatcttgctatgggatgaagccaaaactcaatctgattggatcctggatcttgccatgtggtgtcggcttcctaactcattctccactccttggtgggagcactcaagttccacctgtggttacacccttggttcaactgggcatgctcaggtttcgtgaccttcatggcaacttaaaatcaactcggaactttattacataaaagttgaaccagattggtcttgtgcagttacactctcacaaatgtttctttagtttaatagtcatgatgtcagctgatcaaatgtcaaggagtcccctggcccaagctcagggtaaataacagcccaggattattgctaatgtctttgcacatcccaattactgtctttaatcttccttttccttccaaaaaatggaatgaaagagtttgctcaaaataatattaatttggtaactctaatagatacttatgtttctgtgcttctacattttttgggcaaatttgttccagagtccatcctatttacatatgcaaacttccagttagatttgtaggaccagaaaatgaggggagccctgagtttcattccatggggagaacacaaggccagcagcatggctggagcaggagctatgcctccgactgtctaggcagacaggacttcaaacagcctcacagtttctctgtgtgcccagggacagatgaaaaatcgacatatcaaacatatattagaaatgacctagattgtgaaggccagtcagtatgatggacggctcatgtcagcagacaactgtatgagcaaggactctgagggtcggatctgttgccctagcacccccactaaagcctgttactcygtaagctcctgcaatatagacaatcctagaatgaaggaaagagaagcctttacattggctgagatgatgtgtctgctagggaaggggaattagctcaaagtataacttttgttgaatagaaaaatgaaaacatatattgcatgtattatgttctaagtgctttatatgaattaaatgaattgatcctcagaaaaaaactatttttttttttttgagacggagtgtcgctctgtcacccaagctggagtgcagtggcacgatctcggctcactgcaagctccaccttccgggttcacgccattctcctgcctcagcctgcccagtagctgggactacaggtgcccgccactacgcccagataattttttttttttttgtatttttagtagagacggggtttcaccgtgttagccaggatggtctcgatctcctgacctcgtgatccgcccgtctctgcctcccagagtgctgggattacaggcgtgagccaccgcgcccggccaaaaactattatttacattgcaaacttacacacatgtacacagagacattttactgaagaggaagaaaagtcaattagcttgcccaaggttacaaataaggttgcaaataagtagcaaagttgraattttaatcaagtaatgttgatacggggtcagggaagtgcccggtaaagaaaagcaagtccctagctagggctccaaccctatggacctgggtgaggacaggcactcctgctttcgtatccaaatgttgcattttccaagaccactctggcccaccatgcccccatcctgggcttataccctagcaggtagacacgcaggcggcctgatgtcaagaggagcacatcagcagaaaaagaagctgctggacatcgtgaagaacacatcggtggaagaagacacaagctatttctcgacaaggctgtcgagarcacgccagcgggagagcacgccaataggcgctgccacgccagcaggccatcaaccggcgggacgaggcagagtttggcggaggcagtcaaaggagagccggggccagtgaggagccaaactgcagctcccttctggcttccccatccgctgagagctacttctagtcaataaaactttgcactcggccgggcgcggtggctcacgcctgtaatcccagcactttgggaggccgaggcggkcggatcacgaggtcaggagatggagaccatcctggctaacaaggtaaaaccccgtctctactaaaaacacaaaaaaattagctgggcatggtagcaggygcctgtagtcccagctacttgagaggctgaggcaggagaaccgygtgaacccaggaggcggagcttgcagtgagcccagatggagccactgcactccagcctgggcgacagagcgagactccgtctcaaaaaaaaaaacaaamaaacaaamaaaaaaaactttgcactcattctccaagcccacgtgtggtccgattcttccggtacaccaaggcaacaacccaggatacggaaaaccctctgccctagggacaaggtagagggtcttactgagctggttaatacaagctgcctataracagcaaactaaaagagcatcatgtaacacacacccactggggcttcagctgtaaacattcactcctagacactgctgtaggctcggagccccacagcctgcatgtctgtatgctcccctagagcagtggggcactgaagaagtgagccacacccccatcgcacgccctgcgagggagacaagggaacctttcctgtttcagtgtcattatttactattagcattaggaataacataaactacttaattgccactttttgcagttatcaacgcatagtgttatttttcaaacaatgacaatagtttcctagttcattcacctaaaaaaaaaaaatctatggtaaataagattaggccaggcatggtggctcatgtctgtaatgccagcactttgggaggtccaggtgggaggattaattgaggccaggagtttgagacaagcctggccaacacggtgaaaccccatctttactgaaaataaaaaaaytaggcgtggtggtgcatgtttgtagtcctagctacttgggaggctgaggcaggagactcacctgaaccagggaggcagaggttgcagtgcaccactaccctccagcctgggtgacagccagactccatatcaaaaaaaaaaaaaaaaaaaaaaaagatcatgaaactagcaattgctttataaggtctttttttctctaaatgaattaatttaattagaagcacattcatgtgttatatgcaattactagaaaatgcagccaataaaaatgtatgcgattgatatattcaatagtattttatagttactaaaatccatcagttttgcttttatatatatataaaaaggattattagyacaccaatctttattataatctctcaaccatccacagaagatttaaagatgtggttttgttttctagcaggacaagaaaatggcgttctttaattaaaggtctatttttcaaatcaagatgctttagctcctgcctttgaccrtctctcttttgaaaaggaaaggaagaagacccaactttggagagtcttgcccttcctatcaaatttacactaacaaaaccacatccaaatggaaataaaactttttctgagacactggtttctttagcaaaattaacactaaccagggtaaaatatctgctcctcataaccgtaactaacacacctctaaaacatgtttcattgccaccaaactgagttagaattgctttgattgcagaagaacctggaatttcaattaaccttatatgttttaaaactctctttacacttttttcttccttaacctttccatagtcaatgatgcacaaggaccctattccttatacaaaataaaatataactatgcaagaatctcattaaaaaccaattggttgagctgtagatttggttattatttaaattcaatcataggcttcatattgagcgagatggatactacatttcaataagaataacctagcaccctattacagggccttgatttcttgatgagtggcactacgtgaattttgttagctgattaacaaaaggcaaagtcctcatagaagggagaaaggagagcaagaaggagacacccagatataatgcagatttaagtacagcttgggctacatttgtttggaataaaaccagttactgggaactattgtggcaaagctgtcccttgagatggtcaggaagaaaacaggtagccatgtgtatgaaattacttagatatttttcagaggtaattaaaagtagatgcttcctttgtctccttttcttcctgtgccattaatgcacatttcatatatgcctgatgctatggattaaaccccccaaatgaatcattataagcagtccctaaattataaacagacttagaattctaaacaatgtattatttggactttgtaatgtttcttacagaaacattaatttaggtggtgctgaagtaagctaatatgtatgctatgtattatacgaaggaagtactgaaaatttataacaaattttttaaaatattcagtcataaaacaagtagaaaatatactaaattcttaaatacatataactgtacaataacagtaattaaataaaaatacatgaaacaaattgaataaatgttttatctgattttaatgattatagtggaagaaagtagtattcataataagtaaaakgaacactccattgacattatagaaacaaaaagcctggcatttaatggagtttaaatgttcttttttaaaattttaacaaatacttagaaaatacccatcacatggtgaggttggttctttgctaggttttatgataataccaatccttaaggagctcacagtcttgtttaataagcattctttttttttccagaataataccaacaaaaatttatttttatagttaactaacaaaatactataaaggtaatttgtttgttctaagtccttttgttcatatatccataaaggaattaagcttactgtctttgtatttccaccaataattctctgaaatgaaattcttttgaaggcatgctattttactcctagcttctattttgtaactttttccaaaatgaacaaacgttacctgaatttgaaatgcactgattggaaatgtgtggactggcatacagccattaacattcgttagcaaaattagatgggaaatttgrtttggctgcatttctgaactttctcttcatacatctctgctgtttgatttgacstaaggagtatatgacttataatttaaaaaaagaaaaaagcaagaacagaatctattgaggctggcaccaccaaccttatgtctcagatgtgtttggagccaccttaccaaatattgaatctggagccctccataggcgggtgccttgtcacttatcttgacaatagaagacttgaagggactttcaaaatagtcaactacctggagtttgcaacaaaaattgtgtgagttggcactttccacatgatatatgtagtctatggtttctcctgggtaaacgttaggatagtgatactaatagctagtacttattgatctctctctatatgcagaaactcttgtaagggctttataaactcccttaatgttgagctttcatgcatggcatacagtcaaaaaagttttgttttttatctgtcataatcattttcctatttcctgttgcccatatgttgcagaattttttacatattatgtttcagaatcactccaattttaaaaaacatttagccatgtacatttaggacatctttgacttttcttattttcgctttttcaaaaaaggactgttcccacttttgtgtcatcatcatatgtatgttcttattagcacttaatccactacagaaaatccttttctgcttaaaatagccagatcagtttctattcaccaatccaaagtaaaatttatttcactctttttattctttctccatcttagtttctccatttttttctcacctctctcactttttcattgtattttctcttagttttagaaaagtaatgtggtaaaatgtagcatgcacagttcttgtagtcaaatgataagttcaaacctcagttcttctcacaagctatatgactctagaccaataacttaatctctcatacatctggttcttcaccaggaaaataactcccaagattataataatgaaataatattagcaccgtagcatgttgaaagatcctacgacatgaatatgaatgagattttctattcctgagaaatcaatctttagccaggaagagttagcactcagacgctcccgaccactgtaagcccacagcctcaatgctggagggtgattttggactctgactcctcctttattcaagttctaattcaggagaaagatytgcagcatttacttgccttggagctgcaatatacccatcttggacctctttgtgagtgaccaggacccagacctaagccagggataggcagacaggtatgtggaaggtctgtacctagagcttaagtcctctatgtgtagatccatccccctggctgagaaaaagagatgggcaaggcttagatatcaaaaagtgaaaggaagcatgaataaagagagagagaagtagcctgggcaaaatggtgaaacgccatctctacaaaaaagataataaaaaatagctgggaataatggcgcatacctgtagtcccagctacttgggagactgaggtaggaggatcacctgagtccaggaggttgaggctatggtgcactgtgatagtgtcactgcactccagcccaggaatagagtgagaccctattgagagagagaaagaaagaaagagagagagagagagagaagtgactggccttcagcctataggacaaggatttcccacttgcaccattctcctaagaaaatggtggattctgcccctctaacagagaggaataatcaaagacccacagccagccaactcacttgaaagtccaactgtgtccagtccaagcagacacagtccttcctgtgtatcagaaggaagttgaatgtaaaatatagcggcataggtaagcaagtaaaagcaaaagactccttgactttttttttttttttgagacaaagtctccctctgtcgcccaggctggagtgcagtggggcaatctgggctcgctgcaatctccacctcctgggtttaagctattctcctgcctcagcctcctgagtagctgggattacaggcgcccgccactacacctggctagttttttgtgttttcaatagagaggggatttcaccatatcggccaggctgatctcgaactcctggcctcaagtgatcgacctgtgtcagtatggggattacatgtgtgaggcaccacgcccagatgactatttctggaaggaaagtctagggttgcaaatagaacaaaagcaacaaaagccttacaaaccagagaatccataagctacaattagctacttgtagcaaatccagatcccagaaccttgagtaatcctcatttttttcactgaaaaacactaatcagagaatgagttccaagcacgctatatgccagggtgataatgtcttastgaataagacaaggtgtctatcttcatgcacttacatgcttgtgaggaagagcaccaataaacaggtaaagaagcaagtaatataatttcatataaaaactaaaaatatacagggtaaaaaaatagtcattaggtaggttcgttggggaaaatatatttgaaaaggtaacatttgagcagagacctctttgtgtgaaagaatagctcatgcaaatatctggggcaagaatgatccatgctttggggtggaaaggatcagagtgtgctcaaaacacagcaagtaagcaactggggtggagatagagagaggaagagagtggtggaaggatcctagagtagctctcaatcttggttatacatcagaaacttctgggaagcttttaaattccctgtgccggctgggcgcggtggctcacgcctgtaatcccagcactttgggaggccgaggcaggtggatcacctgaggtcaggagttcgagaccagcctgaccaacatggagaaacccccgtctctaccaaaaatagaaaaaattagccgggcgtcatggtgcatgcctgtaatcccacctactcgggaggctgaggcaggagaacggcttgaactggggaggcggaggttgcggtgagctgagatggtgccattgcactgtagcccgggcaataaaagcgaagctccatctcacacacacatacacacacacacaattccccagacccagctaaagtcagtatttttcaagtccccaggtgatttcccatgtgcagtcaagactgagaatctaggcccttctgggccaagtaaggattttcggctaggtgtaacagggggtcactagacatttttattttgttctttcattttgttttctgttttgtttttttttttaacagtggaatgtcattatctaacttacatttgcaaaaaataattacagttccagtgggcatggaagacaatagaaacaagtcaaaagtagaagcaggaacaccaacaacaagccgctgtggccaatgtgggtgagagatgatgctgcagggacaagaggcagcagtggaggcggtgggaagcagttgtgtttggagcgtttcatcgagtcaaaagcacgtgctgatgaatggagacagatttgagaggagaaaatcaaggatgacttctaggttttaattctgagcaatcggatgaaggtgaggccacttactgagtcacgtcgtagggtcttctaaacttggagctagatcaattttgagacagaaaccaaacaagaaaacatcgctgattcattatgccttgtcaaatgcaattcctaagcatatgtaaacataattcacactgcttttccttcctctgcctgaaggtataagtcatgaggcagagaagagctggcatttctctctcaaagatcagggtgctgtaagaagctgtgcatgcctcttacatttttgtaggaatgagttggaaattgctgcaggtaatgacagtttctgaaatgtttggattagcttttctggagcagagaatttgggctgagaccgtgggtttaatgataaaattatcattttttcttttttttgatctctgcctatggcatagtcctgttagaccttcatgcttaaatcttacgagctatcacttcaactctgttttgctttcttgacaaaacagaagcttttattagggagatagatgaacatatcaaatgagcaaggaaacaattcctacacaaagaggatttcagcatatgaagggagttaatctccctttaggcagataggtagaatccaagaaatggacaaaggtgccttacttaccttgcttaagagcaatgagttgtaggtacacacactacagaaatgaatgcttatgtctactcgagaacatatgcaaacatactagtaacagctagcccaaattggaaacaatgcaatcaatcaataccacaatggataaacaggctgtagaacaatgtgctacacaagaatgaaaaagaaggaactatagctacgtgcagtgatgtatatgaatttcacagatgtagtgttgaaataaagaagycacacataaaagaatgcagactgtatggtttcatgtatgtgaagttcaagagcaggcaaactgttctgtggcaatagagataagaacagggcttatttttggaaggaggtagaaattaactaaggggagatgctgaaaatgttctataacttgatctaactggtgattgcattggtgaatttttacatgtaaaaattcatcaagttatatacttaatatttgtacactcatacatacacacatgtatacttttatactttctataagaaatatatgtaagctatacatacaaatctagtataacttatatacttcaataaaagtgattaaattgaaaataatctaaatggtcccaggctggccaacatagcgaactcacatctctactaaaaaatacaaaaattagctgggcatgatggcacacgcctataatcccagcaacttgggaggctgaggcaagagaatcacttgaatccaggaggcggagaaggctacagtgagctgagattgtgccactgcactccagcctgggtgacacagcaaatagctgggattacaggtgtgcgccacagggcccagctaatttttgttattttcagtggagacggggtttcggcatgatggccagattggttacaaacccctgatcacaggtgatccacctgcctcggcctcccaaagtgctgagattacagatatgagccaccgcgctcggcccaaatgatttatttttgactcatcagcactagctaatcagaaaggatacccagactctcagaagagacaccagcttttatgacacaactgtgtgcactacccagacatctcctctgccttttatgaagatgataaaagaatccactgaagaaactgaaattcttggcaaaacagaggattttattaggaagatggactaacacatcaaataagcaaggaaatagttagatgaaatgaaaactttctacaatatgaaaaacatagttctatactacaaacaacaaaatttatatagtgggttcaaacagatacacctgaagactccagggtttgtagtcttacccactctgctgtgcttcctttgcaccaggacatcaggcatacgtttttgaatttcctcactagtaagccttagcctttgcttgcacttgctcaaatatatatctttaagcacgagtctatatcacctaatttatatgaaaggtttgcttttctcattcaactctgggtatgactgcatggtgcttcagctctgcagtttctttttcttttgagatagagtctcacgctgtcacccaggctggagcgcagtggcatgatcaccactcactgcagccttgacctccctgggctgaagccatcctcccatctcagcctcctgagtagctgggaccacaggcgcacaccaccatgcctggctaatttttatagtttttgtccagaagtggttttgccacgttccccaggctggtctcaaactcacgtgctgagactcagcctcatgaagttctgggactattggtgtaagccactgtgcccagccccagctctggattttcaaccgagccctgggtactgcatttttctgaaaagtgagtgggaagcttgggcctttaaagtcactctgacaagacgatctcctacgcctccatcactaggcagcctcaagtatgccatgacattcccattaatcaccgttaaacagtctcttctactctgagaatagtgccttagacagctaccatttcatcacttcctacccaagattgtatatgtcatacctacattcatgagatgagtttttaaggttaactacttccttcccaattctcctaaaattattacaattacttcacgtcagataaatgagaatgtttataaccaacagataaaagagggtaatttatattcaagtatataaaatctaataagcctctttgtgaagaaacgtctcatatttaaataacctaatgttggctgagcgcagttgctcccgcctgtaatcccagcactttgggaggccaaggcaggcagatcacttgaggtcaggggttcgagaccagcctggccaaatggcagaacccttctctaataaaatacaaaaattagctgggtgtggtggcatgcacctgtaatcccagctactcgggaggctgaggtgggagaatctcttggacttgggaagtggagtttgcagtgagccaagattgcttcactgcaatccagcctgggtgacagaggaagactccatctcaaaacaaataaataaataaataaaaataaaaaataacctaatattttgggcttcatcttaaccagattttctttcatattatcctcagtagttattaaccttgaaatgtcaccaaacctgttgaaagggatgaagaattttggaagatgggatgaaatttaatagtgacttagaataaattattgaaggaaccagaacttttaaaactgctcattaagatcaaacgggttacatacataggaaatatagcctgatagaacatagattcaaacacataccacaagtttgcaatgtcatatctttgtattaaaaaaatgataaagaagtgttccattttgttcctccaggccctattttaccaataatctaggtttcataacttggggtggaccragaaaatttggaacagccagataatagcaatatgatgattaaaggattagtaatacatagatttgcacttgcaagattaattgatgcttcataagacttaccgtttttataaatgtcaagtaactgtttagataatttagtttttgttcaaaatgaaatgttcttttgttcctcttccaaacaactagcaatgagctgactgtgcatttttttatgttaaaatttagcttaaaatctttccttcagagaggattatgtcttctattaaattgtaattttgattatcataatgttttcccagcaagaatatttgtttgtttgtttttaacctaaactagatgcttgactagaggattctaacccacgaataggctaaatccatgattatcaaacccatgttggttagaatttaattaagtttatctgagatattatataaagatttgaaaataaattgtaaaacaccaccattcagctcccataggatggtaataatactggatttttaagctttttattattatgaattcatactagttgtacatatttatggggtacatgtgatactttgatacaagcacacaatgtataacgatcaaatcaggaaaattggagtatccatcacgaatcaagcattcatcatactgctttttctgtaattccccaatgattaaataatcacctttagcagttatttgtatcacagcccttataatcaagtcatatcagtttgaatagtagggggacagagcatctaccttgactgttggttaggttcaataaaattatagaggtggaagaaatgttagtgatacagtattgaccttaacaggtacatgagttgtgataacagtgaccaagtgattctctatggctttgatttaggtcacagagtcctggaaagatttatttatgtctaaactaaacctacctgttgagcaaaattcttcttgtcctgtcttcagggtatatatggatatggaaactttgtcctttgctgtttgggatttttgaaatgcatttgattacaatttaggtaaccctcttaaagtcaaagctgcttaagttctctgtactctaatacccattttagaagctaaattattctgttgcctttcacttcatcatcttcaagttactttccttaaattattttacttaaagaaaaataatgagaggattactaatctagcatatttaaaatatcctcaacataatcatttctttggttggttgtttaaggagaaagagtgcaggtgggtggtgtgtgggtacattctgagtcttagttgtttatgagacacaatcggatgttattatgtaatataacatgacctattagtttggaagaagtataatttaaaagaaaataatgtggtttctggaattagatattatgggttggtatgctagctgtactatttgggagaatttggacaagttgcttaacctttctgggtttcttttcctcgcctataaagcatggataataatagtgagaggattaaataagttaacacatgaaatactcaggatagtactaggttcttggtaagtacacaatatgtggtagctgttcatcgtcatgatgttattgtatacatacatgacatattgacatatttaggctcctcacatctcctagagggaaaccaaaactcatggcagagtcaggaaaatgaaaaataagccaaaaacctcttttttattgtagaaggtctgactcttcaacctgtcccttaatatgaacactaattgacttgggtactttccaccattccccatttttcccttacattttcccatacagggattatattatatatttatcctcaagtatttttatttttttctttttttttcgagacggagtttcgcttttgtcacccagactggagtgcaatggtgcgatctcggctcatgcaacctccgcctcctgggttcaagtaattgtcctgcctcagcctcccgagtagctgggattacaggcgtgtgccaccacgcctggctaatttttgtatttttagcagtgacggggtttcaccatgttggccaggctggactcgaactcctgacctcaggtgacccacctgccttggcctcccaaagtgctgggattacaggcgtgagccaccgtgcccggcctaccttcaagtatttttaaaattcactaactcaggagattcttgctcacctcccattttcaaaagaaagagaattcacataaagtgaacagccgaagtcgctgaaaattggttttccttacactttccctcccagttacagcctttttgttgtaaggaagaaggggctatttgccatcactgaagggctttggagcggcatggtgagttcagtaaaattaattttttttcagtcaagtaatgaaacctctaacaccaagtagcagcaactttcagtttagtttttcattgtcttcaattcaatgtacaaaaccttgtagtaaaaaaagcatgaaaaaattattttttaagtattctagatgagaagagaaatagtctcaaatttaacaactgtcaacagttaaaatctaaaaacaggaggcatagtaggagtttagaacctttgtaaatttagaattttggtaaacttgttttctccttgttgtttctcacttttgactaataatttccgtgaaatcaaggcctgcctttctgtgctccacaaagttgcttatattgctactgttagccccagttagtccagggaatggaatgtagagtacaggcacctatagaatttaaaggggagatttctttattttgtattcaatgtattaataagatttttaaaacatattttggagaaattgctaattagtgtataatcctgatgccaattctaaaaaaccttttttttttttgtagagacagggtcttattctgtcacccgggctggagtgctctggtatgatcctagttcactgtaacctcaaatacctggtctcaagcaatcctcctacctcagcctccccagtagctgtctctataagcatgcaccaccacacctggctaattttcttattatttttggtagagacagtctcactatgttgcccaggctggtcttgaactcctaacctcaagcaaacatccctcctcgtgctcccaaaatgctgggattacaagcataagccttacaagcataagctaccatgactggcttccaaaaaatatttgtttaaattctcttccctccacaaacacacgcaaaagaaatataatctcccttcagtttttttgacaatataccactttcagtggtttatcttagacatctcaaacctttagaaacaagtcctgaacttaagcgttctgcatgtagaatcaaaaggaaaataaactgccaaatctgaaggtttgcatttgaagtttgcattagtatacttatctctggattccgttgattcacatactcctcctacaagattttccctaaacacattttgaaaagaaaatgttgtctttactgaataatttctctacacacacccacaatcacttcttagtttatttaaattagcaattgtgtctgccagaagaaagttccatctagagatacaaggttggttttccaatcagtagctgtgggatagaattaaataaattagtctatggccataccaccctgaacatgcctgctctcgtctgagctcagaagctaagcagggtcggtcctggttagtacttggatgggagaattacataaattagttttgtttttgttttcttcagacagaatctcactctgttacccaggctggagtgcagtggcatgatctcagctcactgcaacctccgcctcctgcgttcaagcaattctttctgcctcagcctcccaagcagctgggattacaggcctgtgccccacacttggctagttttttgtatttttgttataggcggggtttcaccatgttggccaggctggtctgtaactcctggcctcaagtgatctgcccaccttggcctatcaaagtgctgggattacaggcctgagccaccaccccagccagaattaagtaaattagttttaaagaaagaagaaaccattttacctgtatattggctaaattatttgatagctaacatacataatatataccataactctatctcactcattacttaatatatcctagtgttatttgctttagataaaataatctatacagtattcactaaaatgttgcagtaagttacagtaaaagtctactcctttgaagatgtttaacagtaatatagattaattccataattgggtagttatacacaaacatgcctgaagacagtggagaaggctcactttttcaggttttttttccttcttggactccatgattagccacacatacaaaagggcaaggcaggattttaacgtcctttccttgaaaacattcgaaatcgagaaagaggtgtgtctaagcacaagaaacgactgttgttaaaacggtgttgctttctcatatttcacatatctccagacataatgattctggaaattaggataattaccactttgctctcctactcagcttttatggatcacctgatttttctttttgtcatctagagagatgtgtgaacccaggtaatttgacagcagattgtccctgaacagatgtaatttgaagaagactgaagaagcttcattctctttaactatttggttttatttcatacaaagaaaatgaaacgacggaacagtttttcatttggttttattctggcaaatgctataattgaaagtgtaaaaccaatcaatgacaccacctctggttaaaatttatttctgagaattatcccgaaggagtgatttctgaggaataatatgcagccttcaatttactttatcacagctggatatgaagttaaatccccagctggaatttaaccacctagaaccaggcaccagatggcttatctgcacctcaacctgacagctgtgtcctgatatgcacagctggtcttcacatttgaatgacaatatttaaatgataacattatgtaatgtagaaaaatgtgtttgggtagcacgggtcttgaaaactagattgcacagttgctcttaatagtaaacgcacagcctccacggctaattcacattccttctatttgcgttcatgggtcttggctggagataagggtttactgccacatggcaacattccagggccattcatactatactgctgtctatccataacgactctcctgggtactcaccatgttagattttccttcacattaaaataagcgcaacagagtttccactgtgaagcgggagacttttaaaattttgcaataattaatagcgcattctgctatggtggargaattaaaaagtacgtgacyggaaggcagctgctgtggagattcttcaacattgttggaatattattatatcttagttgaaccacaaatatcaccaggtcaacaaacagaacaaaattaataccagaattcagcactttaaattaaacactccgtgaagggcaattctcaaggaaatatatttgaatacatttcagataccagtgaaaaatctgacatgtttcaaatgtgagatggatgaatgaatgtgaaagggttccagaaaatataaagtggcaagttttctattttcacaatttgacagagattccctatgctgctgctcaaactctgatgcatgtatgcaccaccccagtgacaaaaagaaaacttatccttaatgtatctccaaagtagtcatggtgagaagaaagaaacattgtatttgtagtaaggagctgtagatatagtatctcactgctacttttagtttctataggtttggtcctgtcatttaacttctataaacctcaatgccttcaccagaaaaatgggagctatagatgataacacacatgtgactctgttttgcaaactgctatgaaacagaagaaagtggtgtgactctcttactgcttcttggttctctaggggactcagtaaagagtaattctcttccccaccagggttctcagtaaactgaaatataaaattaaggagtggcacagagaggactgaagaccactttcatagttaataaaggctaagtcagaggccatcccttgcttcgagagtcaaatggacttcctagcattcaaccccagatttacgcagcaaggcaagacaaagcagaggcaaagaacacagtccctgtaagcagctccggatcaacaggaacaaggtcaaagatgaggctggcatgcccggttttgtctttcaaaatttatcaatcaaagaagccactcaaagcaaaggaatagaaagacagtggttcactgaataccctcgacatgaaaggaaatataaggagtgtcttcctctaacattcctcagcttttcttcttattccagatgacttaaacattaacgcttggtcagtcagggatatggctctcctctttggaggaagatatcataatcragcaggagagtcctactcctactttcatgaagctactctctcaataccagcaatcacttctgtgagtattttcctgagtccactgtgaacaatatagatttcagtctcataaggctcagaaagctgctagagtactacattcattaaatcaactccaaggtcactctgtacccaaggccgaaaatgtattcctcatcctaaactatgtccagtcacattgttcaacataactaggtaaagttcggtgcttcacttactctactctacaccacatatccaagccatcaccaagccctgtaggttcttccttcaaaaccacttcttggccaggcggtggctcacgcctgtaatcccagcattctgggaggccagggcgggcggatcacctgtggtcaggagttccagtccagcctggccaacatggcgaaaccctgtctctactaaaactataaaaattagtcaggcatggtggtgggcgcctgtaatcccagctactcagtaggctgaggcagaagaatcgcatgaaccagggaggcagaggttgcagtgagccgagatcrtgccactgtactccagcctgggctataagagcaaaacttcatctcaaacaaaaacaacgacaacaaaaataaaaaaacaacaaaacaaaaaaaatccacttctcatcacctcaccatgagcatcgcacctcagcaattccattatgctgcttcaatttcctccatgagttctaaactcttactatgcatttgtttagtagcttaggtaagttccatcagagtaggaattttgtctgttttattcactactatatccacaacacctaaaaacatgcctgatacatggtaggcaaccaataaatacttgtgaaaagaaaagggaaaggagaggagagcagaggaagggaggggaggggagagcaggggaggggaggggagagcaggggaggggaggggaggggagagtagggaaggggagaggaaaaagtaaaagagaagggaggaaggaagaggcagggagggaaaaagaagtaaggaaaaaaggaaggcaaatgaaaagcaacaattgttagggtttctaaggctaagtcacccttatattgcaagacaccctcttcaatttgtggttgaacctacctttgaagcctagaatacaatgttagtggtatatgaaaagggctgttatcatttattacaaactccttattttccaactccagcctgcactttgtcattatcagcaataccaatagatttcccatcaaccaactagactccctctacagtaagggataaccctcacttttagtgttataacttaggtgttttaaaatgatactgaagaaaggcaaaagactgtgattaactaggattcagcaatgttaggctacttgattcaaatggacccccattcatgtttcacaatcttttttgttcagttattgcccatcttcataagactttccataataaatcttttaaaatgcttcaccaatttctagtcaccaattcgatttcaaatctgttgtaatcttggcaggtgatttttactactcttagagaagatcaagattagcaggcattaatcccccatgttcctttaatctcttattctgaaaaataaccatctttttctcccagatggagaactgtcattttcctttctatctctccttgagcaccacagtcataattctgatgttgaatgaggcttctttggtccttgagatctaaataagataggtttagactctgaatttattctcttctgaagtccaaagtcctttaaaacgtttctagacatttacataggtcttaaattttcaagctcacctaagtatctgagcttctgtttctgcatgtgctattcccattatataccatgtggggtttgggggcttttttgtttgttttttgaaacatagtctcgttctattgcctacactggagtgcagtggcctgatctgagctcacggcaacctctgacacatggcagccaataaatacttttgaaaagaaaagggagaggagaggagaggaaaggagaggcggggagaggaggggtggggaggggagaggctgaagcaattctcctgcttcagcctcctgagtagctgtgattactggcatgcaccaccatacccagctaattttttgtatttttagaagacacgggtttcgccatgttggccatgctggtctcgaactcctggcctcaagtgatctgcctggtctggcctcacaaagtgctgggattacaggcgtgagccactgctcccggccccactgtatactatgttgatccggaagcgaaatccagatccttcaaaattttttgaaaaaaagaaagcaatattgttgagtactggagacttcattgaaaaggccaggtggcatcgttctgatgatgagaataaagcagtattctactgggagtgtctgagaaggcttttgctttctggatgaaaagggaaagatgtggctgataccaggtccttgtccttttccccagcttgaatgtggatgtatgtctggagcaacagtagctgtcttgtgaaaacaaagcagcaagtaagttctcacagtttagagctactgaaccaatgccagcaactttcttattaggtgcaaaaaagtaaagccttgtcgctttaaatcaccattaagttttctgttatttgcaaccgaaagcacttaaagctaatacaaaattgcagagttaccatgatcataactctaaacctatgaaattcaaggggtttaaygatttatgagttgggtgcggtggtacatacctgttagtcgcagctgaggcaggaggatcgcttgagtccaggagttccaggctgcagtgagctatcattgtacctttgaatagccactgcacccagcctgggaaacacagcgagacctggcattaaaaaaaaacatttttaagctgtgcctttattctaagggccatccagtaataagggaacctaaactactgagtgtcctcagagctctgggtgcaattaaaagttagtggtttcacagctacccaattctgtggttagtagaaaattataaagatgataggaggatcaaaaagcctcttccacagaagctacattagctgggtgtggtggcccatgcctgggattccagctgctcaggagggtgaggtggaagggttgcttgaacccaagaggcagaggatgcactgccaatcctctcaatcttgagccaagattggaccactgcattccagcctgggcaacagagcaagacactgtctcaagcccctctgatatgaggggcttcctcatatcagagttcttatgataccattctctcaaaccacctgactccctgaatttgtcctgaatttggagaactgcttaatctctaaatctgccctcttgagaaaccttagtgttagtaacagacagcgctaactctgctttgtcagagtcctgaattcctaatactgaccttcactcatgatctagcgtgatgctattttaattgctactgactatcatataaactcaacatagtatctgacagattaattctgaaaaaattcttcgtatacaaagccaaaaatttttacagcaacagaaatcaatggttaagtaatttctgtgcatcataaatagattttatacatcctttaaaattacattgtatctgcacatggaattttttttcagagacaaggtctcactgtgttgccccaggctggagggccgtggtgcaaacagctcattctagttttgaaacactgagcttgagcaatcctcctgcctcagccttccatttaatagctgggactacaggcagcagttgccaccacaaagttaacttaaaaaaatttttttttagaaacagagtctagctgcattgctcaggctggtctctaactcctggcctcaagcaatcctcatgcctcagccttcccagtaactaggattacagacatgcaccaccacacccaggtgcacatggatgtttacagcagctttattcataattcccaaaacttggaagcagccaagatgtccttcagtaggagaatgaataaactgtgatacatccagacaatggaatattattcagcgcttaaataaaatgagctatcaagccatgaaaagacatggaggaaccttaaatgcgtattacaaagtgaaagaagccaatctaaaaaagtctccatactgcacaattccaactaaatgaccttccagaaaaggcaaaaaccatggagacagtaaaaaggtcagttggttgccatgagttagaggggagggagggatgaatagatggagtagaggattcttgcaatactctaatggaatatatgccagtatacatttgtcaaacccacagaatgtataataccaagtgtgaaccttaatatgaattatggatgtggaatgataatgatgtgtacaatttgttcatcaactgtaacaaatgtgccatgaggtcacgagatcaagaccaccgctaacgcagtgaaaccctgtctctactaaaaatacaaaaaattagctgggcctggtggtgggtgcctgtagtcccagctactcgggcggctgaggcaggaggatggcgtgaacccaggaggcggagcttgcagtgagccgagatggcgccactgcactccagcctgggcaacacagcaagattccgtctcaaaaaaaaaaaaatatgaactatggatgtggaatgataatgatgtgtagaatttgttcatcaagtgtaacaaatgtgccactctggtgggaaggctatcatgtgtgggggcaggggtatattttgtactttctgctcaattttgctgtgaaccaaaaattgttcttaagaaataaagtcttcaacttaaatgtaagacctgaaactataaaaattctagaataaaatcataaaatctaggaaaaactcttttggacattggtctaggcaaagaacttatcactaggtcctcaaaaggaaatgtgacaaaaccaaaaatagactaatgggacttcattaaacctaaaggcttctgcacagcaaaagaagtaatcaacagagtaaacacacaaccttcagaatgggagaaaatatttggaaacaatgcatctggcaaaggactaatatccagaatttaggaagaaatcaaacaatacaatgacaaaaacaacaaataaccccattaaagagtaggcaaagacatgaacacatatttttcaaaagaagacatacaagtggcaaacaaccatatgaaaaaaatgttcagcrtcagtaatcatcagaaaaatgcaatttaaaaccacaatgagataccatctcataccagtcagaatggctattactaaaaaagcaagaaacagcagatgttggcaaggatgtgtagaaaaagaaacacttatacacagttggtgggaatgtaaattagtataatctctatggaaaacagcatggagatttctcaaagaactaaaaatagatctacccttcgatccagcaatcccactactgggtatctaaccaaagggaaagaaagcattttatcaaaaagacacctgcactcaaatgtttatcacaacactattcacaatagcaaagtcatggaatcaacctaaatgtccatcagcaaacaactggattaaaaatgtgatatatgtatatatacacacacacaccatggaatactactcatccataaaaatgaatgaaatcatgtcgtttgcagcaatgttaatggaaccgaaggccattatccttagtgaaataactcagaaacagaaagtaaaaaactggatgttttcattcgtaagtgggagctaaacaatgagtacacacagacatttagagtggaataacagaagactccaaaaggtaggagggaaggagggggtgaggaatgaaatactaccttttgggtgcaatgtatcctgtttgggtgatgggtacactaaaagcccagacgtcaccgttactcaatatatacatataacacaactacacttataccccgtatctataaaaataaaaaattaaataaaatttttttaaatcttcagagaacatgttatagaggtccttagcggttttctggggtactgacaatattctgtttgtttatataagtggtgattacatagctgttcattttctacaaaattatttaatctatttatttacattttatgtcctttactgtatttacattgcacaatgaaggtttttaaaaagcataaattttaatgatatgcagaggtcaaagagatattaaataaaaaagcaggttctacaacagtgtgtataataccaagatttttcaccaaacagatacatatcaaaatgttaagaggctggtgattttcaacaagagctagagtatttcagagatatttgaaggacacaaaagtgtttctaaaaaatgaaaaaaataagctatgttatgtgaaaatctttcctttcatatttttatatgaatgattgagaattaacagactatttgtgtagctacacacaggatacatgtgttcattatttggatagttttctaatactcattgtcatgatcgacaagtagatatcattttaaatgcataatgtacttcctgtaagtcactgttagtttagaagtttgcttttattgttgaatttctttattgaaatcatctgtcacactaccttaacaatgtcaaagtcattttttaagtggtaggaagacatcctgacatctactctgttgccctaaggctttactattgtaatggatcacatttatgatgacatcataatgttataaacaactgtcacaaaaagcaagatccaccatgtttaatagtctactatgtccttgttatgaaaactatatcacagcagtggcccagtattacaattacacattgaaaatatgttgtacataatttattttgataagaaataacttaataggcccacattctactgcacaatcttggtctttataagtcactaagatkacttttaaaggttaaaaagtcaaaaaagtttgtgattagaatctgctattgatttgacaaatggttttgggggcatgacccagaaaaattatttcagaagagaagaatgctctcttttctcatttagagaataagaggatgacacttatttctgtataatgactctaattacatccagaatgtacaatcaggtagtaacatcaaatgttcccagattaatgtagacattgatttaaattagaaacacagtaccacaatgctctaacatcagcaaaaatcattacttacagtttatgaaactgacaggagcaaatgccaatcaagtaaatagcctatatttagataacctaggtaatagttcagtggggagttttgaaaaagaaattatcatttcaatgccaagtcaggcttacagctttgaacaagtagcaaaacatggacatgtttctcaaatggatttcacagcatcagtgcaaaagccggaggggatggcttagttttttaagcctcagaattgaaatacctagactccctgcaactacagcattaaatcctctgtggaaccacagcttcaaatgctatcaggagggactcaactcttcatccttctgagactgataaattgaaagccatgaagtttagaggaaataagagagcctgcagcggtctgaaastcctccacccacctccaacacacacacatacacaaacacamacacacaaaggctstatttgcaacatcacttaagattccatttgaggctttccccttgttaagacttaagggtgttgtttttaagacatccagaaatctcacagtcctgccatgcaccatctttataagcattcaaaccaaatttcaggcagctccaagtaaactaaaaacattatttttaattctcatttaatatattcaaggaaattctaagtgattactttcaaatgcattataggtattgggccaactctttattcttcctgtggaaatttctgtgtctcaaattgatcaaattgatttctttttactgccttgtatgtttctggactgcctccttgacatcaattataggtacttgggaatggcaaattagaataagagaattttatttaatttgcctggtattacaccattctcccacatctcctacctcattcacaaagctttgtaaaataagaaagaatactattattatctccattttatagatgagaaaagcatggcttaggaagcttacatgagttaaccacagctgatacacagtcacctttttttaattttttttttaatagagacaggaatctcgctatgttgcccaggctggtctcaaactcttgggctcaagccatccacccacctcagcctcccaaagtgccaggattatggacatgagccactaggcctggccacaccctaagttttaaaatctaagtctsgraaatcctcctgaagtattgctagttataagtaagctctacttaggaacagaaacattttgccaaacaaaattgtgtaatgcattctaaatttaaataaaaatacttttacaaatagttcctttgatttatcagtaacactaaatatctctgccctgtgtataatgatttaaaagaatgaaaaattggagaggatgctggaaaaactgaggatcatttattttacggtctactactgaaacaggaaaagttcccttgtcgcccttgcagggcgtgtgatgggggtgtggctcgcttcttcagtgtcctgctgctcaaacctctataggggcatacagacgggcagattgtgaggctctgaccccacagcagtgtctaggtgtgaatgtttacagctgaagccccagtgggcatgtgttacagggtgctcttttagtttaaccgtctgtaggcggcttgtgttagctcaattagacccctgccttatcgcaaagacagagggctttctgtatcccgggttcttaccttggtgtacgggaagaattggatcacacgtgggcttgaagaatgagtggaaagttttattgagtggaagtagctctcggcagacgggggaaccagaagggagacggttttctcctggagtcaggtatggcggcctgactcttctctgacctcccgcgacaaactctgcattcttccgctggtcaatggcctgccagcatgccggtgtgctcctatgctggtgcgttcctttcgacatccagcagcccctgtattctctgcctatatgctcctctcaatgtccagctgcttgtgcgtctgcctgccagggtctcgggggtttttaaaggcacaggatgagggcatggcaggccagggtggtcttgggaaatgcaacatccgggcaggaaaacaaaaatgcctgtcttcacctaggtaggcccaggcccagggatgaagccctagctggggaccacgccctcctctacccagcacttcccgccccccttccttatcatttaaagggaccacgcccttcccttcccagcattcccttcccagcactttcctgcggcatcactacctgttaacaggtgttccttttcgtttagatttacctcaaaacaacggcgaaggatctaattatatttaggcccaaaagagcacctaagtgagagtaacagaaggttacttctagaactaaaatgaaaattattcttcaagtgttagtcaaaggaaaactactccagaaggaaccaaatatccagacgaatttaacttaagaaacagctacaatttaggcaaactggacagtggatccagtaggtattttagtagccactaagaagacactgaatcgggtagattctatagggattgcatattagttatttaaatacaaatatccggctgggcacggtggctcacacctgtaatcccagcattttgggaggtcgggggggtgggggcggtgggtggatcacctgtgtcaggagttcaagaccaacctggccaaaatggcaaaacctgtctctacttaaaatacaaaaattagccgggcatggtagtaggcagtagcaatcccagctactcaggaggctggggcaagagaatcgcttgaatgcaggaggtggaggttgcagtgagctgagattacaccagtgaactccagcctgggcgatagagcaagactccatctcaaaaaataaatacatacatacatacatacaaatatccatggaaaagttgatatattgagaccttctatcagccattcccactatagtgtaatttagctgtttctctgacaggaatttttatttaagaagaaagaatttggagaaatagacatagtaggaggtaacagatcaggctctttccaccagaagaaacacaaataccttaaaaaacaggaagaggctagagagatcagtggggtactaagaccaattttccatgtattgtattttacaatttttgctaaaggcatgtcctaattccttaaggctgcataaaaatactcagcccaggagctaaggaaaatttactcagaggacaatgtatgtttttctggctttcttaccctgtttcacccaagtttccagtttcacctgccattgggttatgattactccagcacagatgacttgttcctcttccaaaccccatgaaaggaacttagaaaatttgtctttattatatcttttaattaacacttccccaacgggataatgatacttctgggctatcttatgttctttaaattatgtatttaatttcctagcaatcaataagagccttgaaggttttgtaagtctcacaactcctacctagtttatatttttacatttatttatttatttatttttgagacagaatctcactctgttgtccaggctggagtgaagtggtgcgatctcggctcaccacaatctccacctcccggcttcaagcaattctgcctcagcctcccaagtagttgggactacaggcatgcaccaccacgcccggctaatttttgtatttttagtagagacgggtttcactatgttggccaggctggtctcgaactcctgacctcgtgatccacccacctcagcatcccaaagtgttgggattacaggcgtgagccatcgtgcccagcctagttcatatttttaaagtttgtatagatttatagatgcttttaaaaattatgtgattatgtgtcttgccttggcaacctgggcaggcattccagacacccaaagggattattagttcatgttcgcacgtctgcccagcaacaaaactgagcagcctccaccaagcacgtaaaatccccattcctcctcttattcatttatttagcacttaatagtgccaggcaggaaggtaaaaatacatttaaaaaggaatggaggtagccgtcttgccctggaggtgcaggaagctgcacttcagtgtgctaggtagagggtacataggccgtttctgtttttcttccagctcagggatttataatgagaggaagtgctacaaaaagctgtggtgcgaaaatgacggacgctatgaatggaaaaaaaatctaaaatcaatccggtcctaagcaaacacgcttcacctacactcataactattgcagacctccgaggcctgggatccccaagaatatactgagtttgacaaacttttcaacttcaactttaaattaaaaagacagtaaaagaaccaaatccatagtacacagcaatcggctaaagttcctggggccctgcaacccagagttgaataattttgtattaaattcccaatatcaagctaaatctattttaaccacaggaaaagcagcaacttgtctggctattttaaaaatctgaacagcacttaggaagaagcaccttagcgcagggaacagctcagtgccccgtgacacaactctcccgcgggcccagggacgcctcgtctcgcgagagttgagggacgcctgagcgaacccccgagagagcgggcgtgggcgccaggcgggcggggcactggggattaattgttcggcgatcgctggctgccgggacttttctcgcgctggtctcttcggtggtcagggatggcgcggaagtcgaacttgcctgtgcttctcgtgccgtttctgctctgccaggccctagtgcgctgctccagccctctgcccctggtcgtcaacacttggccctttaagaatgcaaccgaagcaggtgcgggttggcggcctgggcgggtggctgcgccgcgagagcttgcgggtggggatgactagcccgccccgctgcagtcacccggcagggcggacggaagagcgccgggctgggccgggcctcgcggtcccgccctctaggtcttcccgagtctccagcgccgctcagtctcttgcaagtggcctttactgcatcctccccacctaccgctgttgcattttaggtcctcccttcatgcagcccccagcgcaatgtattttccaccctgctgctgaccatagttatggcctttgtgctttaatcaagtagcagctacgcttttctgcctgacagtcttttcacgggctgtgtacgtctccacctctcgtttctaatccttcacttctttgcaattttgtagacgactaatagtgtcccagccatagcctactcttttcccatttactttttttgccacgtgttgtcatactttacctgccacttagaattcaaggttccaacctttgctgtacattcacactatctggggagcttctcaaaaatcatcctgccggggcccacctcctgtgactgtgatctaactgctggaatcagggccactgtttttctttaaaaagctccctaggtgatttcgatttgcagacagggttgagaaccactaagctaaggtatcacctcttccaggaagcgttccctgacttaactgccctcgtgtccagaatgagttaggttcctgccttctacaccttgttaatagcctttacgtaccattatcttggcattttcgcattgtactatgcttgtttctttcatttgcttaatgaccagaagagtcattttcagacccctcctcctccatctgaggttgctaacgtattaactttctagggcagaattggctccagaatttggtggcagtgcatacgattcagagaaaatgaagaagcaggctgtgagaaagatattcccagccataatgagacgaaaagaaattgcatcagcctgggcgggggacagttctgtgtttaagttgcctgtattgaaagagggaacttgcgtaaatacactttcaagcctgtaggtgctgtagtgatgcttgaagtgtttaccaaccagagcacccactcttcaaggaattctgttgttaccagaaaagaaattgtccatcaaagacccttccccccacacccccaaatgtatgggatcctggctctgctacttaccagctgtgtgaccttaaactaactgcctgacctgtggctctgtttacttttctttaaaatgagggtcgtgattgtacagtacctaccacagaagctgttatgaagactcaatgaactaatccatatgaagtccacgttgtaattgtttgctgttcagtattattaagacttcctgggataggtgttacctcaatacacatatcaattatgcatattttaatctaatgatgcagaagaaatgtgtgaagaaggctgcggtttagtggattttttatttaactgccttttagtggtttcgattgtaccttttaaaataaaggaggggatactgatttcgtttctcgcacacagaagagatagatattagtaagtgaaaaaaaaaaaaaccttcagcttgcaccaatagccagttttttgagttcttctgataactagttaaataattttgactcttcactgactcctttgtaacacttgataaactaatgtgttaaaaaatcagcttaactcagtaaatgtgaaaaagttgttaaattggagttggtttgttgcatttggcattgaaaaaaatatatatatataaacaagcattattgggatttgattaacagcgtggagggcattagcatctggaggctctgccctggatgcagtggagagcggctgtgccatgtgtgagagagagcagtgtgacggctctgtaggctttggaggaagtcctgatgaacttggagaaaccacactagatgccatgatcatggatgggtaagaacaccgttcaggtcctatttattatgttgagttacatttagagttgtggtcttctgagagcaagatgaaagaatgcatgagttttgacacagatcaaaacccctagcttattatacttgacctttctaaacacagtttccctctcaactgaaaaaaaaaaatcagagtaatagaaatatcacatggagagataggtagtcccttagaactgggagaatgccaagctaaaaaactatgtctctgaccttataaacaatcatttatctgctgtccacaaatgctgtggtttgcctgacctgaagccttcaggcccctttcaaaagccatatttaaaattagcttggagaaactgagaattttagtgctgttgtggtacatggcaagttgattttctatttttttccttaattttgtctgattgtgggaatctatatgaacttcgtggatgtgctgtcacttctgtgttaagatggtggagtttaaccgcaaaacactattgattggagaaaagcaatgtttttaatctatgaacctctgaaaactccttaattcctaactgcattctattttcttgcagcactactatggatgtaggagcagtaggagatctcagacgaattaaaaatgctattggtgtggcacggaaagtactggaacatacaacacacacacttttagtaggagagtcaggtatttttttaactacactgaaattttttctagtcttttgactatagttttcactgaaaaatagtacaaaatcatggataaaaccagatctaagttcaaattccagctgttttacttaacatctattgaactggataagtaacttttaaatctctttacttcttcatctctaagaagaaggcaatggaagttttgagacggagtttcgctcttgtcacccaggctggagtgcaatggcgcgatctcagctccctacaacctctgcctcctgggttcaagtgattctcctacctcagccttccaagtagctgggattacaggcacgtgccaccatgcccagctaatttttatatttttagtagagacggggtttcaccatgttggccaggatggtctcaatctcttgacttcgtgatccacccgcctcagcctcccaaagtgctgggattacaggtgtgagccaccgcgcctggccgggacgagaactcttataatgcatgccccaaaggtttt

SEQ ID NO: 97256 - DNA, 131780 bp, Homo sapiens
  misc_feature (1)...(131780): n = A,T,C or G
ccaataatgccttccttactcccttctaacgattccagattgtcttgggtgatcttaactattttctgttttaaaaatatgctgacatccatcatctctatctctagccctctcccctaaactccaggatctaattatccaagtttactggtcatatccagtcagagagttcagaggcacatgaactcactcaacaggtccaaaggttcagtatgtgctcctcacaacccccgcccaaatactaggcctcctttaatgcctaattctcagacataacgttttaagtctctcccattctgctgccttaagtcttcaaactcttacccaatttagaaacacttggtttagttaacattcaggaatttacttttcacaaaggagcgagggaatggatatactgttgctaaccgaacaaggaattaaagaggagaggggaaacaaggtcttggaaaattgaatttccttttcctttactcattcttgggcaacctaaatgactggaagcctgttctggaacaggttgactagataaatttagttatttgtggattctcagaaaccttgaagtttagctgtcagccagtctctgtcctttggcactttaacacggatttcaccagctccttcattttctggacttgccctgcctccaagcttgcccttcctaaaccttatttctaagatgcaatgccacgatctatataaatttaaacatcagagataacctccttaaaacactcaaagttcaagggagtgcttgccctaagcataaagatcaagccccgctgtgattgatgcacacgaggcccttccagacttcttcactcttcatttcttacattctcgccatcctacacttcacatttttgcagtatctgatcactcatggttgctactgcttcattcctctctgcccacggaaatatcgttcccttacaggtgatgtcctcccattcaactcctagtcatccttcagtaacctcctctcggacgcccttcccaaccccactactcccaaagcacactacatcttacctccttctagtggttcctgcttttgtataactttcgccagcctatcaccctgtgctgcaactatcttctacgtcctgtctcccgaagacaacacattttaaagggcaagaaacatgccctagcctagttccatcacttaagaatttcactccgttttcatcctttctagcacgtaccttagcctaggcccaccttcactccagtctccttccgccccgtctcgggtaccactgccagcgtcccgcccagcgcgtgcatccgcacccagaacccgctcccctcgatctcacggagcaccgggtgggagcccgcctgctcccccttcctcgctcatgagccactcctccaaccccctcacctgaacggccgcgagatgactgccggccaccgacaccgaggactcgccaggtgttccaacctcggaacctgcctcgcctggcttgggggtggagccgggtgggccaggcggcccgtcctgtcgttattggcctgcgagagctcccgccccgccttctcggcgcggtgattggtctgtgcagttgccgacatcgtgtgactcgcgcgaacgagctcctggcggtcccagccattggctccgcggatggagtgaggatagtgagacctgcagagccagccaatggtcggcaccgcggagcgcccggaggcggggaagcgtgagagcgcgccacggcgtgagggggcgggcacagacggatggccgcctcgccctgcagcgcggagtcgccttggcaactgcggtcccggcagattcccagtgagagcctgcgctgtgcgggggagagtgtcgcgccggccgccgtcccaggacttttatttcaaatgtgacctgtgtagcaaccgcagttcccaaacccgggaagaagagagtatagatgagtcttaaaatctatgttgactgttttgtgtttccagacacccttgccttcctttttctggtctaccatttagatttagatctttcgtctcccttgtttccccagcctacgtatcctttaataaattcctgcattttgaaaacggagaatttcaaatgcgattatcgtcattttgcagatgagaaataaaggctgggaaagatttaaaaagattgaacatcaagggagagttcggctcccaggaccttgacctcgctacatgggcagagaacgcccaggtgttgttgcaattgttgtgctggacgatgagtgcccgggggcgggggcgggggcgggggcttgacgcaggtctttgcagctctaaagctcagtttacaccatctctcaacattaaaatattgtgtactggggtttaataataaaactgtacagatgtgataatatactaaaactttcacttaacggaagaggtgcctttaaagaaaaaaccgcacaggggcatcatttgggctagtgaaggccctttttcctccttctttattaaggtataattgacaaaaattgtgtttacggcgtacacatgttttgattatgtgtatattgtgtcaaatatatacagcttctgaaaacagaatactattgtttcattcctccatgcttttgctcaaactggcccttctgcctggaataatcagccatctccatgccgccccatcaattcaggtactatctccttgaggaagttccctcttgaaaagtgtcttttttagattcagtgtgacctgtacttattcgtctatccctcatgtttggcacacacattctttgtaaagtatcatgacagcggtcacgtcaaatgaaaagaaatgggatctgtcccttggttgtcagagtcagccctgtctttaggatgcctttacagtggtgtctgaaaccatgcctatatactttatgaagttaatctgggaaaaaggggtggggggaacgaaattaaaccaagcttgcagcacactgaggattaataattaggtcagcttgctgtctgaccccttcctcataattgtttgcctattgcttcagaatcatgtagactctgttacaaggttatagtttcccctaactgctctatagacaacaacttgaacattatgaaacgttaagtttgtgctttgagataacctttcaggtccttcgtactgatgaaactactgactcagctggtctgacaaggagctgactcaccaaagaatgcagttcccacatcctgatggtttcattcctccttaccccagccaatcgaggaccctaattttccagcccattgccctccaggatccccttaaaagccccagcacagaactcctcagagagatgaatttgagggtttcctcccatctcctctcggcaccctgccatcactaaactctttctcttctgcaaaccctgctgtctcagtgtatactgtgcagtgggcatatgaatctgttggtcctgtagtggatgctgtggcacaccacccagatccccctcttcaagacctaagcaggcattcctccagctgctgagtactgccaaagagaagcacctctccccacgggtataccccctttctaggcaacagctagtcaagtaactggttgaaacgggtataaaatcccctaaaccaatgtagggctactttgcttggccatcccagctccagagctccccatcctattggttgtgtgatgactgcactgccacccaacttttctctctgcccaaacctgccatcctctatcaggtgagcatcaatagcacacactatcgggccacacttactaggcttggcattttattagcagtggataagttacttctctgtcttatctggtacttctgtgaaataataatacctacacctcgaagagttatttatgatgattacatgagataacgtatgtaaagccctttgcacagtctctggcatacaagatatgatcagtaaatgtcagcaattatttctgatttggaattctaccacagtattacattttctaaatcagagcaggtgtaggtgtatggaggggtcagattattttaaaccttaaaggcttagagctggaaaaaaatgctgatgcagcagctcaactcacttatttccctacaatgaagattaacagggggctcagggaacaatagctgtaatttattgagggcccgctggatttcaagcatattaacatgcatcatttctttcaaacgcaacaaccttgtgacacagacactcctattgccattttaaaaacaaaataaggattagaggttaagtaatgtgttgaaagtcacagctagcaattgatagagggagctgcaaacccagaacccttttgtttctatgcccatgggctttccaatataccacatggcttttttccttaaagccaggattagaaccccagaatcttgactcaaaatatagttccattctccagcgtagcctcctctccaaaatgagacactggcagccatggaagtcagtaggaggcagtgtgcttaagacaaaactaaaccaagatggtgtcagcacactgctatgtaatttcatgtgacccttttacacctcataaagttaagtctcataacgcaacagcagttaggattacaaatacctgggttcttatgctgtaaggaacgataaagagataataaataccaggaatcatacaccagactccataagaaacagggaaagaactgatagtcttctgacagtaaatacaccttccgccttaaccacagtcatcactgctttcagccaaggaggcatagatcccaacaaagcaggcagacgagttgcttcacaacgcaggtatgtggatccagccttgaactctgctcaaacgtggggctgcttccttggcaggatttctaagacacctctctgccttcttatttttcatacaacaatggaacaggctgagaacacttccatatgcctttaaaaaaatttcaaactggaaagacaaaggttggcatgggggaaggaggtatgtctaaagtctctgaaatcatagctatgaatccagctactgacaaaccttggcaattatagtatagctattaaagcttcaaagattaagaaagtaaagatagaggtatttgacatgctatgtagttaagtctttgttactttaataggctgagattatattttaagaaaagctttaagatttttcagataaatctttaattgatagattcatatagaacattagtgtttggaagtgatcaggacagacagagacctcatacatttttcttggtgcctctgtcagaaacagctgactactccaagttcattagaccttcaatatgtttgttgacaatgatgtgctgtaaggcagaaattcatgttttcatcaactgagcataggctttttctgattaaattcatttataatggaaagttcaactaagtattaaatgtggttccatgtttaaatttgaatcgaaatgttatcatagcaatctttcctcttgattatcaactggtctagcaacagctcatgccaacttttttaattcctgaggaatggtcacaatatcccatcacctcctccttccccctcttcccttcctctgctgtgtccagcacctcagctgcctacctgactccactattcctatttcctcaattccttttatttggtatcaaaaccacagtttatttctcagttactttggagtaggtattttttttctttgactttccttttggtctaatactacttgttttatccttatctcatgccctacccatatcagggacacaaaaatataaaaggtttaaattttaccaatccttgacagacctctccttgatagttgaagttacttttccttggaaacagaaccatttttattgacttcggttattcatttaatagttttgtcttgtaggtgaggtcactttggcaataaattaaaaatgcagatttgtgaagtgacaaaatgcaaactataaaagagcaaaaaaactaacaggaaactttaacacaaaactaaatagataaaaatcaagaacactgtgaaacaaataatatacaaacttttattcaaagttaattcaagaaagacatgttttggtcatttttaaagtgagattaattgaagatctcagaaaaactgtatctgatcaacacacatggctactcacagaaagttctctcttctgttaatagcagctaaatttatacacacagaaaaaattccgaagaccatgcaaattcaattgaattccatacattcattatattcatcaaaaacctgcagtaatgttcatgccaaagtgttaatttaagaaaaaaattaaaaatacacaccaaaacatgaccaagattaaactaaagaaaataataaataagcataatttatattgtattttaaaaagtttggcatcacacatattcaagtgtgttacaccaggtccattcctcagaagtggcatttaaagtgttaagcattgttaaatatcaaaaaatacaactctgttttacaatgtagtactggcataattcaaagtactgtgccaattataaatagtataatcaagtttcaaacatcttttcaaacatatttaaaggaaagcatatagacacacatttatatgcacataatttattatattcatgtaatcaaagttattttataaaagcaaacagtgtatccctcaactagtttgtatacttacgtagattttaatatctgttcaaagattttcagttcctggtatacagatttttagaagaaataaagataaaatttaattttacaagaacacacattacttcatcctccttcacaaaataatctgtagtcattcaaggttgataagaactagtctttatgaaagcaactgttgtctaaagactacagattaagtcctgcagtccaagtttcttatgaaaattcagtcagctgctgctcattgcagaaaaagcctacacggtgcttctaccaaaaataatcttcagtatctgaggcctataaaggcagacgatcgtatcttctgctgagacttaaagtgcagctacaagtggagaagtgctagattctcagtcacttcacaaatacttgttgaaggctgtttctcatgtataaatatgctgaaaatgtccttcaggctcataatggtttatcaataactgtgacccctgagcaaagaaatgragagagaaaaaagaagtcacaggcagcactctgtatctctgagaaaacactcaattcttcattataatacgaaggcaggaggaactgtacaaatcatgtttcagaatctctttcttaaactttagtagtattatcatttgaatctaaatgacagtgaaaactctgtttagttatgggctagttaaatataagactatttaatccagaactagtcttttcctctttgtagttacaatttggaaaatatactcaaaagggaacacagaaacttttgagcatgatggatatgttcattatcttgattgtggtgatggtttcatgggtatatactctgtcaaaagtaataaaattatatagtttaaatatacagttgacccttgaaccgacatgggggtcaggggtgctgaccctccacgcagtcaaaaacccatgtataattttttactcccgcataatttaattactaatagcttacagttgaccaaacgccttactgatacagtcaattaacacatattttacatgtaatatatgttatgtatgtcataacatgttatgtgttatatattgtattcttaaagtaagctacagaaaaggaaatgttatttaaaaagtcataaggaagaggaactatatttactattcattaaggggaagtggatcatcatcaaggtcttcatccttgtctcttcacattgagcaggctgaggaggaggagaaagaggagaggttggtcttgttgtttcaggggtggcagaggcagaagaggtggaggaggtggaagggaaggcaggggaaacaggagaggcagacacacttggtgcaactttaaggaaatacactgttaattcctgtctgacttttttgtttttttcatttctctaaaaatgtttccacataataccaatcgtctttccactactttcttcagttacagtgcacatatcatagaagggcccatttcataaagtaagtcataaacagtcttgaataaccaaacccttttgccagactgtctaatgtcaatttgttttctgacattgcttctacatcttcttcattgtctggcagtggttaagaagcactcatctccgtcgagtcatgttctgttaatttctctggtttggtatctattagctcttgaatttctccaagatccataccttgaaacccttcaccatcaacctttatagccacatccatgatctctttcatgatttctttgactggctctgtcataactcctgtgaagtcatacacaacatctgaacacagtttttttccagcaggaatttattgttttgggtttgatgactttcatagctttttctataacaatgatatattcaatggtgtaatccatccagactttcatgttttctctgttgagattctcttccatagcactggcaattttttccatagagtgccatgtataatgaaactttaaggttcctatggtcactgatctagaggctgaattagatacattgtgtttaggggcaagtagaccacttctatgcctttggtgttgaactcatggggttctgggtggccaagggcactgtccaatatcaaaataaaaagcagtcccttactggcatggtacttcctgaacctgaagcatagatggaaccagtccgggaaaagatttcttgtctaggccttcttgttatacagtcaaaagactggcagctggtatttatattttcccttcaaggattgggggttagcaactttttagataagagcagtccaaatcataaacccaactgcatttgcacaaaatagtagagttagcttatccctttctgccttaaattctggtgcttgcttatcttcctaataaatgtccctggtggcacatttgtctgcattaaaaacttgttcaggcagatatccattctcctcaacaactttcttcatggcatctgggagctcatctgctggccccttggttgacagaagtgttctcctgttatcttgacattttttgagccaaacccctttccaaaattatcaagtcatcctttgcttgagtaggctgaggaaattctccagctttagatccttcaccttccttttgcttcaggttgtcacataatgactttcctttttctcaaatcatattagagttgacaggtatgcctttcttacagcaatcctgcacccaccaaaaaccaaaaccaaaaagtcaaaaataataaaaataataaaaatttaaaaattagccaggtgtggtggcacatccctgtaatcccagctactcaggaagctgaggcatgagaatcgtttgaatctgggaggcggaggttgcagtgatctgagatcacgctgttgcactccagcctgggcgacaagagtgagattctgtctcaaaaacaaaaatcctgcacccacataaaagctgcatgttcaacacaagataaaaagggatttcacaaaaagtgtgaagttttcaaaactgctgggatggctgcagggacggcttcatgaatttcctttttcctttttacaatgatccctaccctggattcatttattttgaaatggtgggcaagtgcagcagcagacctcaatccatggtatatctcaagcaattcagctttttcttgtaatgtcatgactcttctctgcttcgttgaagcacttcctagcaccatcaccggtggcactttgtatgggtcccatggtattattcaaggtttatgatattgcagtaaacatgatgaaaaataaggcagaaccatgagagagaactttttactgagatacgcatcgctgaagagacaaactgctctttcaaaggtaattagccccccacagctttttaagtggatactcacaacagctgagctcaccaatacagcaacaggagacggctataaaattattatagtagtacagtaacatactacagttaatttcatgcagttatgatttaatattgtatctttgtggtttgttcacatttctctggactgtgaatgacaccatctatggtttgtgggtgtttgttcccataagagtttgtgtgcatatgttttgataaattttaactttttgtaacagatttgtagatattttgtagtaaatgataaaacagactagtatctacgtatattttatgtgttcataatcttaaacttaattttttcaatatttctaggttatgcagtgcatctgagttttttcaaactgttaccaatctccaaaaaaatttttccaacataattattgaaaaaaatccacatgtaagtggacatacacagttcaaacctgtgttgtccaagggtcaactgtacgctatgtattctgtcagtttatacctcaatgaagttgttttaaaaattcatctaatattcacccatgttatactggaattctactgtacatagttcttctcagtactgttttgaatgatacataagcaacagtgatggttaatgagcttaaacattttcttcctccactattggatcaattttgttacagaaacattatactattaaaagcaagataaatataattgaaataaataacataaagactcaccataatatttattaaaattaacatttatcttactaagagaatggaccaaaaaatcacattttataactcaaccagtactatgcttaagaaagaaaaattattccacagcctcactataatactatctcatggagccacaccatggggagatgtaggaatcctatcctatttcttggacatctcaggaattaaagccttgccacatatgaattcttctcctctgcatacagattttagctacattaaattttattatatgattttgtatatcaaagatttgggattttgaatacaaatgactgtagaatgacaaaagtatactggtgctttatttcagaatatacacagccaatgttaatcatcttaagaataagatataaactataccttgagaaaagactttattcttataacagaaaaacttcgttaatataacattcataatgaggtcatctttttgtacggaaattgactttagagacaactgttacctgcataacttctccctgtgctcatacacgatgacacaactgtccatttatcggttgttgggttataatattctactgacgccaagttacaggaaccatcatcccctccaacaacatataacagaccattaactgcacaaactcctttaaaaaattacagagagaaaacaattatttaaaaaattgggatgaatatgagtatcactgtacatgtttagtgaggtaatccagagacactaatttctttgaaaggaggcaagaagagaaaatagtgagcatgaaaagaattcgttttatattaggatagccaggcaccatggctcacgcctgtaatcccagcactttggaaggccaaggtgggcagatcacttgaagtcaggagttcgagatgagcctgggcaacatggcaaaaccccatctctactaaaaatacaaaaatcagccaggcatgggggagtgtgcctgtggtcccagctactccaagaggctgaagccggagaatcacttgaacccagggaggcagaggctacagagagccaagaccacaccactgctctccagcctgggcaacagagtgagactctgtctccaaaaaaaaaaaaaagaattctttctatattaggagaccataataccacttctaagctcctactgagtgtcatttatgcagtagttactttatatatgcattattctacctaattttcacaacattataggttagaaactattttgaccctcatttttttttttttaataaaaagtcaaagtcagctacttagggaatcttaaggaagaaaatatatgttagtagaaggtaaaaatattcttaattttaattatcacactgaatggttagctattttatctccctttaaagagaacaatattatttatctattaaaataactcttttctttgcaaaaattcaaaacatctagaaaagtattataagaaaaaaagatgacctccaaccttatgtctcttagaataatgaccattaaaattttgatctctactctggctaacttttctccatgcatatatactcagacactttcttttttaaccccaaagtagctcacactacacatgctactttattaaataacttacccaccctggccaaccaacctaccttggacatttcctcaagttaataaatataaatgtaatttttatgtatgacagtttatttaatcatttttttactgatggatatttaagtaattttgatttttttgctgttaccaatgatgttgcaatgaacaaagatcccctgaacagtgttttgaatacttgagcaatttttcttaatataaattattagaaggaaaactgctgagtctaatggtaaatgcttttaaaaagctatttcaatgtaattttttaaaagtacatttaatttcttataaaaagttcagtgctactatgaacttatactagagggcatcaaagaatcccgaataatgctgcccaaatctacaaaactttgtaggaaaaaaactcataccattttaaagttgttcaaatacttaaaagcaagaatcaaatgctgctgccacacaagctccacacagtagttacatgtgtatgcaacactgtatttcagcctattgatggacaacataggactgtgagagaaaaaatgatctcaaaaatggccctgctatgatggaaggcatgaacaaggagactatattgttctaaagagttttcccaatcatatctatgaggggctcacagattaaagagcatcccactgcagaaagggaggttggtccatacatccatttgaatatcttagctatacattcagaagacatcaattttactaacccactaactcacaacaccagattccttttaggcgataggagccaaatcactttgccaaaaggatgcaccttcctgcagtgtttgatggttccagtttattcagtttacttcaacacaatcaaattcatattgagaacctattacagatgtgctaggtattaaaggtctatatataatcatctaattcaaatttatttcatttttactccactcttggtgtcataatttaccatacttatgaaaacttttgaaatctggcttgtaagctgcttgctatttcaaatttatatggatgctttcacctctccccgcttaacattgaatacatgtcctccactctttgccagcttagttctttctttccaataatttaggtgcttggatgaggtccttagcctaggttattaaaaaggaagagctgaacagatcttatcagaagtttgtttcagattatcaggaatatggaatgagggtgagattttaaaatactcttatgaacttaaataattttaaaatatatgctcaattggattatactgtatcttgtaaattatagaagtaaataattcaaattttgttatttgcatagaaaataaacatcattgattgagaaggaaaaacaaactgaaaagtaagctttcagatttctctctcttcctgattatcaaataaactcaagtaatgttgtctaaatcaaaatatgaaacaacttttcaacagagacttacgtctttttcctaaatcctaccctttcccacacaattttttgaagaacaggataatggtagctctatatatacaaattatctctttattcttctacctaaatgagtgaattttgatatgaaaacaataaacacatatagagaaaaaataaattagtctaacctttaagaaaatattcataaaaagctcaaattgcaactaaatttcctaatccaggaagacacatgcacaaatcaccatggcttttctaacttaatgtatactggagtcacttattctactaaggacccatatttgagggtcttaccatctaacgaactgattaccatatacaactgactagatgacgtgcaaggccaaacagaattaactataaattctggtctgctgccaacagtatctgcagttccacatacttagtctctcttagtaatcacccttctttaaagagaaactaagatgagcgctgatggaggggggtgtccaatggtgtacagtaagtttgagactcaccaggaacttattttacactatgagaaatgacatgaagataatggcattttgaagaatcctagcatttcctgaaaggctatgtagctatcttgagtctattttccatttgtatttccctttcttgattcttctttttaagtggttagttccctaatcttgaagttctctactttcttaaaattatttgttgttattgttgttgctttagtttttccatttttctggaaatcctgaactgtattaagctagggttacctttgcagacttcccctctagatttagataatcaactagctttttaacctagtataaatatctactcaactagactaaatttcctgagaactaggatctccagtgtatgatagatacatagtaggcactaaattatatctgttgtaagaatgaatgaattcagtatcatttaaagggtctacacctaatttaattagtctccacatttatcaccaaaaagtagcagctagtagaaatgatgagtttactgaagtgtcacaacaacctgttatgttccagagactatggcaggcattcactttataggattattacataagtttctggctttaaagagttcagagtctatcagggaacccagatcagtaaaagaacaatggaaataccattgatattcattgatagagtgataccagtgaaacttaaaataaaattcaacataagttttataaccttaaactgacagatacctgcatttcttctgcacatgttcatatctgcaacctgtctccatgcgttagtggtgggatcatatacttcaacactttttcgtactaaagggccatcatgacctcctacagcatacaataaattgtttaacacaccaacacctataaaacacaaccagccaaatagaggggcaaaaagaacaagagatttatatcatattaggtttatttaaatgacttgtaactaaaactttcgaagttataattcataataaaagcaagctgatactatagcctacaatttaagaaatggaaatcaatacaattgatgattaaataagcatctcaacaaactattattctgaaaaaagaggcatgtcaaacagaataaaaatattaataacatgtaggtgaaacacagggagggaaaaagtcctttaatgtaatccttttgaaaacaatatccatagtaaaataaccgcatattaaagcacaaaattttaagaaatatacatgaaaagacttgattattaagcaagttccccaataagcactaaaaacaaaaaactaaaaggagtgctaacaacttgaatatataaatgaaacagaaatgtctatggcacttagacattaaattttaaagtaaaattactttgtaattactcccattacctgcacaattcaaaagacatttagcagtgccactaaaatcagcatatcatatattttcagataatgtaaagtgatgccactgaatcattttactttaactattttccatcatttttgtgcttcagttgctaaaacaggttcacatgtacctgctccactccgcctggtgctcatttctgctatataggtccactcatttgttgtagcattatagcattctactgtgctaagacactgacgtgatgctccatcataacctcctacagcatagagcaaacctacacataaaatcacatagaaagccaaatttattaaaaaacaaacaaacaaaaaacactaatttttcaagccagaaaatattaatatattttccttcatggcagcagagtttccccttaaagtgctgctgatttttatgaaatatattagggtcttgcctaatggtgacagatggggtaatcaaatcatgttatgaagatctgcagggtatagctgatgatgttaattttatactttcatcaataatctgataaaatagcacactcattatatctttaggtaacactatttgataagtgaacaacatcctgtaagacagaattaaataccaaagttatcttaggaaatcggaaaaaaggttaaatcaaaaattaataacagaatgcaatgcaatattacttggcattaaaaaggcatgaagtactaataaatgcctcagtataaataaacaaatcttgaaaacatcaccctaagccaaagaagtgagtcaccaaagatcacatactgtatgactaaaatattcagaagaggcaaatctctaagtgatagaaagtagactagcagttgctgaaggttgggtaagatacgagtaagagccaagggaagcaggattgcttttagaggataataaaaatgttttaaaatgaattgcagtgatggatgcacaatgaactgtatacatgaaatgggtgaattgtatgatgtggattatatcacaataaagctgtttttttctaagtgcacagattacacctacgatgaggagggggtggaaacctgcaaatttgcccaagtcaattaaaaaaaaataataataataatacttagagccttccttaacttctgttgggagacaaagtaggatataaataaataactgtggcaatccatcccttaacagcccttctccagatataaaattacacatttatgtcacctgaattgttcccccaagcaactgttaaaatcagttgacagtcttatacagcagcagtccccaaaccgcaggccatggaccggtacctgtctggaacctgttaggaaccgggctgcacaacaggaggtgagcggcaggtgagcaagtattacagctgagctctacttcctgtcagatcagcagcggcattagattctcacagaagtgtgaaccctatcttgaaatgcacatttgagggacctaggttgtgcactccttatgacactctaatgcctgatgatctgaggtgggaacagtttcatcccaaaaccatccccccaacccacccctgtccatggaaaaattgtcttccacaaaaccagtccctagtgccaaaaaggttggggactgctgttatataagtcaaacacacacgtgttatataagtcaaacacacacagttatataagtcaaacacacacacacacacacacacacacacacacacacagagagaaaggaggagggataaagggagggggatagagagggagagaaaaggctttatataggttgatttatatagagaagctaattttaaaaagaggataactgaaattttacagtaattacgacttttctttttaaaatgataattagcttgcccattcagaaaactaaagttgagattactggaagaaccactctcaaggatcaaaatgccacatgtacctgaaagaactgtcaacacctacctccaacaacacccacaccaacactgctcctccttgtattcatgggagctacatgaaaccactcattagactttatgttgtatgcttccacagatgacaaacctataataaagcacaatagtcttcatttccttctctaaaaaatgtcartagttcatatatatggaaaaatacttcaggtatgttatactgggctaaaattaagagaagaaaatggtggaacataaacacagcaattacatgaaaaacaggtacagcttgttttccagaaggctcctacctaagctactgatatttataagcttttaaaatttgatgactgatactgatgcataagaaagaaaatttatatactcaccactcatatcatttaaggaaattcttgataaaattttaaacttatctttaaataccagttaaaacctcacatgttgtaatcccagcactttgggaggccgaggtgggcggatcacaaagtcaggagattgagaccatcctggctaacatggtgaaaccccgtctctactaaaaaatacaaaaaaaattagccgggcgtggtggcgggcacctataatcccagctgctcgggaggctgaggcaggagaatggcatgaacccggcaggcggagcttgcagtgagccgagattgcgccactgtactccagcctgggcgacggagcaagactccatctcaaaaaaaaaaaaaaaaacacaaaaaacctcacatgtgccctaatgttgccacaatttattccataaacatgactactacgttaattttagcagcaatgtagaataaatgaaaaggaaattacctgtactcccatcaaagcctcccacagcgtataataatccatttaacacagcagctcccaaagtgcttctccggtctctcatgttagcaacgctggtccactggtccttcacagggtcgtaggaatctacagtgcgaactcttaatgagccattaaagccaccaacagcaaaaacaagtccagccatgtagaccatgcctgcaaaaggagtacagcatttaatgatcaacatgcaactcaactaccaccaatatccaaagattgctttctgataaatctatagctgttgtcagaacatgctactcttaggaggagcctgattaaataaatccttgaaaatgctattcatttgcaagaacatccaatcactaaattgtctttctttctaaggttattattattattatttcttcctttctttattttgagacggagtctcactctgtcgcccaggctggagtgcagtggcgccatctcagctcactgcaagctcagcctcccgtgttcacaccattctcctgcctcagcctcctgagtagctgggactacaggcgcccgccaccacacccaactaattttttgtatttttagtagagatggggtttcactgtggtcttgatctcctgacctcgtgatctgcccgccttggcctcccaaaactgctgggattacaagcgtgagccactgcacctggccttctttctaaggttattaaaaaatgcaatggcatgggctaaagtaccatgttgactcttggtttttttaaatatcaatttacaagcttaaataatgagccattattttccaactacttgaacctgtactcacctcccatagctttcaattttggatcttctagtggatattcttagaatgaaactccatacgcttataatttatttgcataacgtattcctagtttatcatgttagtgggctaaatcaggggtcggcaaatttacagctacaggctaaatttggtccagcgaactatttctgtagaacccataagctaagcatggtttttatatttttaaatggctgaaaaacaaccaaaagaggaataatatttcatgacatgtaaaaagctatatgaaattcaaatttcaccatccataaatatagttttattggaacactgccacactcattcatttacatatggctggttttgcactatagcagtagataagaagctgtgacagagaccatataaccacaaagcctaaaatacttatnnnnnnnnnnnnnnnnnnnnnnnnnnnnnnnnnnnnnnnnnnnnnnnnnnnnnnnnnnnnnnnnnnnnnnnnnnnnnnnnnnnnnnnnnnnnnnnnnnnnnnnnnnnnnnnnnnnnnnnnnnnnnnnnnnnnnnnnnnnnnnnnnnnnnnnnnnnnnnnnnnnnnnnnnnnnnnnnnnnnnnnnnnnnnnnnnnnnnnnnnnnnnnnnnnnnnnnnnnnnnnnnnnnnnnnnnnnnnnnnnnnnnnnnnnnnnnnnnnnnnnnnnnnnnnnnnnnnnnnnnnnnnnnnnnnnnnnnnnnnnnnnnnnnnnnnnnnnnnnnnnnnnnnnncaaataacatctatgttgtgtacttcagggtttaataaatgtaccgtctataatataattactttaaattgttcaaatttttattgttcttagttctataatgtttatgtccctgtgccagcctgagggcaggcaatgtggctcacagttctctgaatccctgtagggagaactggaatcaccagatatgtttgacgagctcaatgttttgcagatgttatcaggcaagagatgtacctctgccccttactgtcttaacctctggtgctttattcccccacccctgtaaaaatacacggaaatgcagtcctccatatggcaacaagacctttccagttcagatgaagttgcctgttttggccccctgctagcacagaatttaacagacatcctaagagggcctggagactcgtgagcagcaacataccaggcagcatgtttcagcatgaaacaatcctgtatcccaaaatcataactaactccagggaatgttcattgtgggaatcttgcccattgcaattttcattttcctttctctacccacaaaataacactacaaatatgccatctcttagaagtaacatagtatgcttaccaaggtttagagaattttaggtcacagagaggaagaaaataaatgaatcaatctatgaagtgccccctaccaaaggctctgggtctggagaagggactgaactaaaagaagtatgataacctcccaaagttatcaggaaactgaagtgcccagaagtttaattacacagtttattaaaatttggccaagtttacacagttaaggacattggctctaatctgaaggagggagaggaaagagggcatgatgaagataaaatttattcatagttacccaataagtaaagaatacattttgcaataaaatgagtcaaatgacttatggcctcaatgaaaagggaactgtattaggaatcagatatgaattaagaaaccagttagtaaatggcatacaagactccatttcagatagtaacgataaagataaaacacctaaaaataaacttgccaagaaacacagaggaccattggaagaaaatgttaaaaatctactgaaggatataaaagaagacaggagtcctatcactagtttcataacatagtaaaacatattataaagctcagtaactaaaattggctttgtcttgatgcatgaataggcaagacaaatcaatggaagagaacagaaaatttagaataaaaccaagtaaatgtggaaatttaatacatgataaaggcagcatttcatcaaatgaatggagacagataagtcaataaggggtatttggacaactgactagccattaaaaaccaaaatctataccttacatcttagactaaaatacagcccagatatcttagatacatatatttataaataaaactgtaaaggtactagaacaacaaatgtttttaaaatataattttgtcatagggtagaaacctggcagataccaccttaaccaagagaacaaggttaccctcacaaaaaataatcatactaagtcaatttaaccatggaaaaatatcagacaaatccaacttgagagacactcttcaaaatatctgaccagtcctcctcaaagaatcaagggcataaaagataagaaaagactctgggactatctcagataagaagatatgacaactaaatgcaaagcaggatcctagaacagcataagagaatcaatggaaaaatggtaaatatgaagtctgtatttcagttaatattaatatgccaatgctaatttctagttttgataactgtatcacagtaagatattaatattggggaaagaatataccagaattctttgttctatctttgcaactcttctgtaagtaaaattatttcaacataaagtttttttgtttttttgtttgtttgtttgttttttgagacggagtctcactctattgcctaggctggagtgcagtggcgaggtcttggctcactgcaacctccgcctcccaggttcaagcgattctcctgcttcagcctcctgagtagctggtattacaggtgcctgccaccatacccagctatcttttgtatttttagtagagaaggggtttcatcatgttggccaggctggtctcaagcttctgaccttgtgatcggcccaccttggcctcccaaagcgctgggattacaggcatgacccactgcgcctggccccacataaagtttttaaaaaatatgtttgtgtgtgtatacacacactcacacgcacatatagataactttggcatatggctttctatgcaagaaacaaaattttaagtccagagacacaaaactttggtatacaggactacattaaaagataaagtttttacatggcaaaaatagcacaaagtcaaaagataaaagattaatacaaataagtattcacactacatatcacagacaaaaaggctactttccttaacataactgtatctgtgacatcaataaaactattaaaatggcaaaaatcatgaactgacaattcagagagaaagatatttaacttccctcataattacataagtacaaattaaggcatttttcacccaccagattggcaaagctcaaaacatttaattacaaagtactgtcaggagtttagggaaactggcaccttcatattttactgttagtgggagtaataattggcatatccttttaagacatcctttgaatcagtaagtctagtttatcctgccaaaatatattagcatatgtacacaatgatgtatgtataagagatttgttgtagcattgtttataacattaagattaaaaacatttgtaatgctctattaaaaactagtaaaaactatgtccagaccaaaataaaacactagacagctcttattgaatgaggtaactccagatatgctgatatgtaacaatctccaagatgtattgttaaagtactaccatcatagaaacgttccattacatacagaactcatttcgctatgggagacagaaattatggatccaagtttaagtcccaggaaaaattctgagtttgtataataactgcttnnnnnnnnnnnnnnnnnnnnnnnnnnnnnnnnnnnnnnnnnnnnnnnnnnnnnnnnnnnnnnnnnnnnnnnnnnnnnnnnnnnnnnnnnnnnnnnnnnnnnnnnnnnnnnnnnnnnnnnnnnnnnnnnnnnnnnnnnnnnnnnnnnnnnnnnnnnnnnnnnnnnnnnnnnnnnnnnnnnnnnnnnnnnnnnnnnnnnnnnnnnnnnnnnnnnnnnnnnnnnatatgtaaaggtggagacagagtagctatcccatcaatgtcttgagaggcatatgaggcccctgaattactgtttaactacatagctattttactcaaagcttttttgatagagatttttctaattaataaaataagacctgaaaaagaagctcccaatgacccaggagtagagaattgaccatgatgcatcatgcttacctgccctgcacctcctggaaggcaactctgctacttggtgccacctttcttctttaaagtcatagcattccacactccggatagcctttggtgcttggcccccaaccaccaccatcaactacaagggcagaaatgtaagcacttgaacaaatgactattacatattcaggatttaaaatgtcctacaaagacactggtgtgggaagtgttaggatgaagatgatagggtgagctggcgaatacaaacatctaaccacctaaccaacatttcataaacatcaaccaaggggacacacgttaaaaatacaattctatcgtccagcacatttagtcaaaaataaggacttcagaaactaagtttctgatccttcaagcaaaagcagttatttaagcaaaaaaacagcacgcagttattactggcaaggctgcagtatgtcatagggcttgctataaactagatcctggtttttgcaatgaccaggcattagaactccataatccaggagagaagatagaaatgaaacatatgttactgggtaggtgaagtgaaacggacagtaagtattaaaagaaagatggaagaaggaaaaaaaatattgaaaaaggaggagtaattgaattggagctcacaagagtacagattcccgaatctccagtagagacctttcctgatgccccacaaataaaacaacctaacaggacatgtaatggagatgctagatatcataatgaacaaatacataaaagtctacttttgagaataaatgaggtctataagttccctcaactcaatccaacaactatttactaaatgcctacggtctatatgtgtccagaactatgttaggtgttatacataagaaatataagacatggtctctacccttcaagacttgatagatctcactaaggagacaagacttatgaagtaactcaagaagagtacacaattacatatgatcgaaaaattatgtgattagtatagacgtaactgctactgctgatcagaaaatgaaaagctgccgtaatttagtgaaagcttcctggaacctgatctatggtcttgctaaatggatagaatttagaaatcaatgtgtctgccttttactgagtatgcacagacactctctggcaacagtgaaaataacagccatcaaatcagaataatgtaaacattaatgatgtctcaaatcaaaaactgtaaagaatggcaaggaccttcaggaaaagaagagataatgattggaaaaatagatgttagaaagaaacaaaaaataaaaacaaacagaatatggagtaactcatatacacaaaaagaggagatttgcagccttgactaggcaatgacctacctgtacttagaattaaagaaagatgggtacaaagcaaaaaatgattcctgaatcagagagcaaatcccaaatttccaaaaagaagcccattttagtttttggtaactggagagcagaatgaattttaaaagtcttaaaagaagactgaacataaaccaactacataatttttttcaggcctgttattcttcttggccaggtatggtggctcacgtctgtaatcccagcactttgggaggctgaagcggacagatcatgagctcaggagttcaagaccagcctggttaacagcaagtcccctttctccacaaaaaataacaaaaattaaaaattggccaggcatggtggtgcacacctgtaatcccagctactggggaagctgaggcatgggaatcacttgaacccaggaggtggaagttgcagtgagccgagattgcaccattacacttcagcctgggcaacagagtgagactctgtctcacaaacaaacaaacagacaacattttggttggccaggcacggtggctcactcctgtaatcccagcactttgggaggccagtgcggttggatcgctttgagatcaggagttcgagaccagcctggccaagatggcgaaaccccgtctctaccaaaaatacaaaaattagccaggcatgatagtgcgtgcctgtaatcccagctacttgggaggctgaggcatgagaatctcttgaacctgggaggcagaggttgcagtgagctgagactgcactaatgcactccagcctgggcgaaagagcgacactctatctcaaaaaataaataaataaaataaacataattaataaagaaaatatacaataccctcacctctgaccacccaaaaacggcggggggggcaaggttgtaaaaattacagaattgggatgcatrttaagataaaccttgtatttagggttctgttcaaaacttcaaaactgcccaagagacaatagttgaaagagtcttagatgatatatctgatgaagaccaatttttctaaaatttcagaagggaacattttttaaattttttgataaataacactgagttatagatttcataatcctcaaagtttgaatataagatttctatttccacgcaatagttcacttttacacattaaaatgaagatgaaaaggaaaactgtgctattacatacagagaacagtagtaatatttgtcctttactcacccaagagagggaaaatggggtaasgatttgggtctccaggaatcagggataaaggagacaaggagaacgtgcaatggggggacaggaaggcaggaatatttatataaaaccaagagactgtgtcataaaccattgtgtggctaccaaaagagttgctcataatgctgacatcccagttatctgtaaaagacacaggtatttgagaaacaccatactaattatgctatgaaggaacaagaaaagaagaccttttgtaaggaaaagttaaaagtaacatatttgaagagggcaaggggtaggaggttaagcaaattcactaatcatcctgaaatgtacgtcaattaaactttgttccttttattttacctattaaataaatattagttgaaaattaactcctgaaaaatcaagattctaactgaaaacttcaataaatatactgggtaaaaatatttttaaaatataatatatacccagaaatatgacagcccttataaaaatacagattccaaagagaaaagctaacaaaatacaaaagaagcaaaacacacacaatttttattatgatgtgcaaatccaaggataccttatacaatctgtttattgagaagccaaaactaatgtctgagatatgaaaagaatcattcatgcaaattaaaaatcagagtgtaatataaaaagtactaattcactctcatggtaaaatattatcaaaaccttgtaatttcttcagcacgactaccacattttgttcaatttgactcattattacgatgataaaaggcatcattactatgaaataataagcataagaaattaatctttgcttcattcttacccaactccttagacttaatctgaacataacaactctaaaatgacaaatggtggtgttggaaaattgttcatcaccagcaccttttcgaaaatatgtgtggataaacaaacacactgagaagggatcatacaagtaaacatgcaaagtcaaagcaacagggctgctcactgctatccagcaagtctgctgccccacccaccaccctgatagagcagaatgaaagagaacctccagggacccacatacccagcacaaaataacagctagagaactgagaaatctaaaagtataacacagctataggagtcctactccaaaaccacaaccagagaagtccaggaacaatgtaaacacaacaccacaaaagagaaagtaagtacttgataggcttttaccgagaactctaggtttcaaaaatgacatgtttattccagaaatcaaaaatgaattcactttcactctaaaggtctctgcagcatagctaaatataggaaagtctgaagatgctagaggaaggaatatacaagaagaaattcttttttacaaatatgaagtatttaaaaagtattaaagatatagcacattatttagaaggaagttggaaagacttacataaaataataaaataaaataaatggcaaccttaaactcactgccaagactgaacaatttttataaatggattattttgtaagaacaaaaactgacaccaaataagatggacaaatatgaattaatgaagacttaaaagatgggtacttataaaagcaggtgtaagggtatttgaaaaatgtaaacacatataaaatcagcagacctggcatgaatactgaggtattaagggaactagctaatgtacttactgagccacttacaattatttctgaaaaatctcagagaactgaggatagatcagaaaatttaaagaaagcaaataccaaattttcaaaccaggataggaagtgaataccttgtaaatacactttgttaagtgatgataattctgagtaaaaatttagaagattttgagaaaagcatttgaacttctaggggccaataaaataccatgcagaagaatgtttaaaaagtcatgccaaatttgaatccatttgatcctcaacctcatcagatgttatatgccaaactacttattttggcttagataataatcatatagaatgaaactttccacaaatagactgtgtcagtggctggctacttctaacaaggtgccaccaagagagttttgagatcaattctaaattaaaatatttgctaacgatctagaaaaataagtcaacagcatcctggcaaatctgcagttagttataaattgagaactgttgttagtaataggcaaaacagaaaaacaataccaatatagatttgcagcaattaaaaatgtagactccaaagtaaaacttagaaaaatattaaagtattaaagtgaaagaatttaaaaaacaattcaatggaaaggacagagtaataactgaagatgatataagaaaacgagagaacagattcttatttcttaatccagcattgcccgaaacatatacaagagttaaaaataaatacataaataaagtctttatattatgagtcattctgattagaccacgcacaaaatggtgcttaaagtattggtcgtactataaagatgtaaacagagcagaaggaattgccaacagagacagaaatgaggggttatttcataagaaaaattgaattggtaaaatatgaatggccacagctaaaaagaccaaggtagaatataaacattcacataggaaaatatgaacacgagacacacgggaagacatgggaatgtatgctgaaatggctacatatgatgtgcagggaaccatcaaatggtatacagcagggaacagcaatgagatgaactgaacaagctatttttatcatctgtagttctaatgtgtaattctgtgaaactactgggttttcagttattaaacaaacacctagcttacaaaataattctttttttttttttttctttttttgagacagagcctgtcacattgttgcccagactggagtgcagtgggcactccactcagctcactgcaacctccgcctcctgggttcaggtgattctctgcctcagcctcctgagtagcagagattacaggcacctgccaccacacgtggctaatttttgtatttttagtagagacacggtttcacgtagatggccaggctggtctcaaactcctgacctcaggtgatccactggcctcagtctcacaaagtgctgggattacaggcatgaatcacagcaccccaggcctacagagaaatccttctacctggtctgatttttttggactataattagagctttctactataattagagctaataaaactcagaggggacaaaaaccagttgtcttctgttccagaagagtgacatcatgcagtttataaaaattaaacggaccaaagaatccccacccttaacatataaaatcaatagaggttgaattacatacactacaatgcattcttaggcacattttctcttgaaggaaaactaaaacaataaatcacggaaattcaaatgagcaaaatactaacagcttcacttataagccttttgcatgaggtaataacaagcatgagaaacagatcctactttgggaaggttcatgggtgtcctcagccgggtccggacactcttcattaatatacgctgctctgttggcagcaaatggtacttcattgcttcaatgaggtaatctttgcaagcactgctattcttgaccaatgcttcctcttcaaccctctgtaacaagaaatcagacacacccactgagggtagggctatttcataattaaattgccaaagaaaaagaagtaaaggagaggaaaaaagcagtaactatatcctttagtttagtctaaaaataaacgaggaaagtttataaatacatctaagagaaaaataaatataaccaaaaaatgctcaagtatctggcctgcagagaaaaacatatataggtaataaaaagaagaaccacagtgaaaaatgataaacttcaatgttagctatggaatatgatgaactcttcggatattatatccacctgtgtatctttaacctttaagacaaaaagtaagcaaaacaagaaacaaagtttagataatacatccttcaggtgaagacaatactaataagttaatgatacctttttcaaacacaagtgggcaagtaaaatatcccaaaaagagattagaaataccttaaagcaacgtacccataacacaaataaatcttgtactgcctagcctgacctcaaacgcaggacaggcttctgggttcgttttcttttttctggggggggagggggggcggggggaagggaacagagtctcactctgttgcccgggctggagttcagtggtacaatcctggcaaactccacctgccgggttccagcaattctcctccctcaccttcttgagtagctgggactacaggcacctgccaccatgtctggctaattttttgtatttttagtagagacggggattcaccacgttagccaggctggtctcgaactcctggcctcatgcctgcctccgcctccctaagtgctgggattatagacgtgagccactgaccgcacccacccttttggatcatcttcttaataccagaagacccatgattacacagatcacaaaaagtaatgagatttcaagaaatcctaaaatgttcaaatctaatttcttaataaatgattctttcaatggtttcaattattaaaataatgctgaaatgttcctagcgggattctaataaaaaaaacagtaaatttaaaattatttggagaccactaaagaatcatttttcacatttatttcaaataatgttttccctcagcttagaaataaagacagaaatcaaatgcatgccactattaaattacgaagtaaaattaaacggtatttgggtcagacctcaaaattccaggtctgcaggggaatcagaagagactatggaaagaaaaaaacagtaaagaagatgcaaagcagtgactgccacagggacatttatttacatgtatttaagtgaccacaaatactaccttgataagctctagtacttgcttacccaaatcaaaaataggggcaaaagcaaatttctaagaacggggaatggtggctgggtgtggtgcctcacaaggcctgtaatcccagtagtttgggaggccgaggcgggtagatcacttgaggtcaggagttcgagaccagcctggccaacagggcaaaaccccaactctactgaaaatacaaaaattagctggggttgtagcatgcacctgtagtcccagctactcagtaggcagaggtacaagaatcacttgagcccgggaggtggaggttgcggagagccgagatgacgccactgcactccagcctgcggggtcctttactgtcttctgtcctgtactccacagatctgcattctacagctcttatcactgcttgatagggatctacatgctgtcaggccagtgacacagtgctgtgtggattcatatgttttgcatatgcatttacctgaactaaatattcccgaggaagcaaaggtaaccgtacatgttccatcagtcgggccataaactcttgcctcacatccttgtcatggttcacccatgctattactgcttcaaataccttgcagaaaatataggagaagaaaaaataagaaatgagttgtgtatcaaggcatctggataaaatatgagactacattttatatataactcttgctaagacatccaagtttaattcacagctcaagtgttttcaaaatcctgacttgcaatgtacttacaaagccattcaccccatttcttttctgttctttttttttttatttacccaaaataataaagcaaagtgatattctggaatgaaaatcatgtatccttataaacaattcatgtttggctttttcttcaggtttacaaacaaatgttagaccatacacataaatcgaaggtttgtacaatagatcgactcagctctgtaatagcagaatatattaaaatgtagtattttgaaatttttttttacaaattaaaaaataagggcattattttttacaatacataattgtgagaaagctaataagctaatatgaagacactgtttgtctacataattttcttctcaactgatgaatatatcacttaataatctttaaaggtttgcaggaaatgtttgacaatatgcaattggataactgagaccaaaaataggttattttgatccaggaataaagcaagaaactaattctctcatactttgtggatcagcttacattttggcaaccttttattgatttctgcaaataaataacaagaatgaacagaatggaggtagtaaaacattttgcaaagtttgaaaaaaaaaagcaagaaactaaaaataatgcacattaaaattaacacccctctttaattcattctgtcaacaagtatttatcaagtgtctctacgtgccaggtgccagagattaggtgaacaagatagtcggccttctggcaattctatctaatatttctcagttctgtcttctctcccccctgcttctatcatcccatatcggaacctgctgctcactggtatgacttcaacatcctctcatctggccctcacctcatttttggtccatactgcccaccaccaccagatagctagtctccaaagatagcctcctaataaaccacatctcccagatccatacccttatatagtaaccctccacactgaatctaagctggccctgttaaccagtagagtgcggaggaagggacactgtgcaatttctgaaggtaggtcttaagcagcctcactacttctactctgctctcttgaaatgctcatttgaaggaagccaaatgtcatgtaagaagtctggctacttgaaaccaccacaccatgagaaacccatgcaagttacagagaagaaaggaggggagaggagggagacctagagagagaccaatcaaccgggagccccggagccagacaaaagtaggtggaggagccaccttggacattacagacccataagatgccatgtgcagaagaactgaagctccagatctatggctccagtagaaccatgccaggtatctccaggcatctgggtcaccttagccgaggtctcagacactgtggagcagagacaagctgtccctattgttctgcatgaattctgaccatagaattgttagcataaaatggttattgtttatgcttttacatttggcaatgacttgagtagcagcagaaaaccagaacagccctcatgatatttctataatgcaggttttggcatggttttctcctctggcttaaaacccttttaaggctcatcactacaatacagttaattttctttaacatagctgagaagatattttattatatcatcttctaattttatcttccaccaatgtctcatattctaaactcccatcatactgaacacattgaatacaattactctttcatatctctttacatttgtatattctgcttcttctacctggaatgccctctgcattcccacccatccctatttctctggcaaactcagactcatttttaaaagacttgaaatatacatctgaaccaagttgaactaccatccccatacctatcccattcctggaaaagttaaatgctcctaaggcaccctttacagcattctgtaatcaattatttactctactggctgtcccactagtctatgagtaacaaattctattctgctaatcttctcttctctaggagcccatggcagtgtctggtacatggaaggcactcaatacatgtctattaagtgtgaaagtaatgtcatcttcctctgtatttctaggatgctaagattatatatgtcacaaatgctttcacattttttaatactgtaaatattagagtaaatgtgtctttaaccccaggtgaaatgaatagccttgagaaagagaatcagaatttacacaacttgaaatgctaagcacacaaaggagaaactcaagtttcatttcctctaagcacagcttttgtgctctgattcccgtgtgctacaaaacccacccaaggaaaaacagcccactaaaaggagcttctctctccaactatacgaaaagtgcaggtggctgacaaaggtaattcaaaacgtggagagacaaaagactacaaccagaagcagtagctgcacagagagggagggaggcagggagggagagagtcagggaggcaggcaggctgaacggactggcaggggtgaggtattatgtcacaggaaatcaatctaaaggaaggtgacaatcaagaatgttcagtctagaactaccaaaacttcgccatcctaggtaacctctttcaactcagaagacaaggaaactaatttagtgacaaatattatgttcacatcataattcctacaggcattgagttgtaggaagaaactagtttccaaaaaagcatttgtttcagatagtctaatgtgtgcaagctcttgctgtggaggtcaagtacaaaactgtagtggctaaaaatttagggaacctcccacaaagtgaagaccgggagtaatttacatagacaatcaacaagtcctgagtttcttttttttctcctggaatcctttcctgaagtaactagctgagtttcttaacttccagttgaaacatcactggctgtcactacacatacaggatcacaaagctataaaaaaaagtgaaattaaaaaaaaaaaaagggaaacatcattgcacactgggaaaagaaaaatatccttaccttctcttctgaagaaatggtaagtttgtcacttgagattaagctgcacacttgttcgatgccaagattgagaaattcttcactaagtacaacatctgcaaaatgttgctctgtttgggaattaaaaagaaaatccactaacatcaacattccattatcatagtttcaaactgcttaaaaaaggtttttcttaatttaatctaacttaagaatgagaaaaccaattgcacacctccaggcaagaactaacaagacaaacccaaacaaactcagagacacctggggatgtaccttcagtgatttgtttatacaacagcacagtagcagtgcaaggagggaagctgccttaatatacacgcacttagttgaatcattcttgttttacatggtggtattttaggcttaaaaaaatctattccttatatggtatgacaccatcagtacttaaatttgtaaaaccttttgattatataaatcagataaagaacatgatgtcatattgtcatatcctacatgtcatatcatgtgaaacattagagggttgttccttatggagtaaggaaaaaagccctgctttatttggaaactaaagaaatctcaaatgctagccaatctgaatatatgaccaacatttttttaaaaagagagaattgggccgggcgcagtggctcatgcctataatcccagcactttgggaggcagaggcgggcggatcacaaggtcaggagatcgagaccatcctggctaacacagtgaaaccccgtctctactaaaaatacaaaaaaaaaaaaaaaaaaattagccaggcatggtgatggacacctgtagtcccagttactcaggaggctgaggcaggagaatggcaatgaacctgggaggcgaagcttgcagtgagctgagatcgcagcactgcactccagcctggatgacagacagagcaagactccgtctcagaaaaaaaaaaaaaaagagagacagaattggtttatgatatagatagctctgaattctaaataaatagtttatttcggatcaaattccaggattttatgcctcaacccatttccagaaacttgtaaaattagtaattcttaaatacttaaaaaatttttttcccttgatttcacaaatatggccactcttcccaaggggaaaaaagatcgcttcttggccttttggctaagatcaagtgtagtatctgttcttatcagtttaatatccgatacgtcctccatccaaggggggaaaagactatcagtgcaatgattgaaaaccttacaaagaacgaatcttttgtaaaataacctttcttgcaaatctgcctcacaagggaatgtggtggtttgggctgcggattcagacataccagggttgaatcccagctctgccatatgctagcttgtacaaccttgggcagttaacgtaatttccctaagccttggtttcctcatctgtaaaatgaggataataaaaataagattgctgtgaggattaaataagctagtggtttataaagcacctagaactgtgtctgtagagagtaaggattcaataacttagctcttgttaatattataaattctaaagtaaaattttgctagaaaatctaggttaatttctaggtcgtcacaatgaaccatatttatttcaccttataaaacccttataaatagagtttataaaactgttttataaggtgaaataaaagattcatttcaaatatgtatttcaacataccataaaaaggaacagttggcttccccttcaatgacatttgaaaaataaaacctgcattttcataaatctcatgaaaaactattcaatttacaaaaggttggcagggcatggtggctcacgcctgtaatctcagcactctgggaggccaaggtgggcggatgacctgaggtcaggagtccaagaccagcctggacaatatggygaaaccccgtctctacaaaaaatacaaaaagtagccaggcatggtggcacacacctgtactcccagctacttgggaggctgaggaggcaggattgcttgaacctgggaggaggaggttgcagtaagccgagatcacgccactgcacccaagcctgggcaacagagtaagattctgtctcaaaaaaaaataaaaaagttcaccccaagataactataaaaaaaacaagcagctctaaaatgtttgtatttacaaaattttttgaaactcaaaagttttttgacacacaattgtttaaaactcagacttgacaaagcaaggtattgcactgaaataaatatgaaattgaagatgtaaatgacaaatacagttggatctccatatccacaagttctacatctgcagattcaaccaaccggtggttcaaccaacctcaaatcaaaaatattgcgaaaaaaatacaataaaaaacaactatagcacatacactatattaggtattataaataatctagagattatttaaagtatatgggacaccgagcacagtggctcacacctgtaatcccaccatgttgagaggctgaggcaggaggactgcctaagcagaggagtttgaggctgcagtgagctaggatcacaccactgctctccagcctgggcaactgggtaacggcttgtctctttaaaaaaaaaaattaaaaataaagtatacgggaggatgtgagtaggctgtatgcaaatactaccccattttatataagagactggagaacccacggattttggtacctgttgggggtcctagaatcaataccccatggatgtggataccaagggatgactgtaggtcgacacaacagaatagagagcccagaaagagaccccacaaaaacacaggcaactgatctgtgacaaagaagcaaagccaattcaatagaaaaagaagagtcttttcaacaaatgatgttgcaacaactgaacatccatatgcaaaacagtaaatctagacacagactccacttctcacaaaaattaactcaaaatggatcagcaacttaaatgtaaaacacaaaatttagcttctagaagataacataggagaaaatttaactaaccttgggtatggcaatgactttttagatacaacatcaaaagtattatccatgaaaaaaaaatggttaagttggacttcattaaaattaacaacttctctgctctgcaaaggatgctcttaagaaattaaaagacaagccacagactgggggaaaatctttgcaaaacacatatctcataaaggactgttacctaaaatataaaaagagcacttaaaggtcaaggaagaaaataaacaactcaactaaacaatgggcaaaaagatctaaatggacacttcaccaaagaagacatatacaaatggcaaataagcacatggaaagatgctcaatattacatgtcattagagaactgcatattaaaacatcaatgagataccatttacgtatctatcagaatagctaaaatccaaaacactgacaacaccaattctgacaaggatgtggaatgacaggaactttcattcactgctggtaggaaatcagtttggcagtttcttccaaaatcaaacaaactccaccccctgggttcaagcgattctcctgactcagccttctgagtagctgggattacaggcacctgccacctcatctagctaatttttgtatttttggtagagacggggtttcaccatgttggctaggctggtctcgaactcctgactcaggtgaacctccaggctcagcctcccaaagtgctgggattacaggcatgagccatcacacccagctggattatagattttaaaaagccatcatgattaattgcaaaagtaccttctatatctaaaatataatcccgctaattcctgactttaccagaagtttatataaaaaaattatacactaaggaagttttctttatacactaagaaaaaagggaaaactttttcaatagttgagtttgttttttaaagactgaacatatttaaacaaacaaacaaacaaaaaacaaggttctttatattaaaagttccaaagtaggccaggcgcagtggctcacgcctgtaatcccagaatcttgggaggctgaggagggtgggtcacttgagtccaggggttcaagaccagcctggccaacatagtaaaacaccatctctacaaaaaattagctgggcatggtggtgcatgtttgtagtcccaactacttgggagactaaggtaggaagatcacctgtgcccaggaggtcaaggctacagtgagccatgatcgtgccactatactcctgcytgacagagtgagaccctgtctcaaaaaaaaacaaataaaaaaagagctctaaaatattgagaaataaattcattttaatgaaaagctggcaaacagcatataaatttagaaacatttatgaataccaacttggaaattcaaacagaaaacacagcagccactgaacaaaagagaagctaacataaatctctttctatccattataaaaatattttcaccttcaaatgtatgtctacagtgattttgggttaagtttcttctgtatattttaaatctgaatcaaagcaagagattgctggccgccttatgcttttcatgaggggaaagaactctccagtggtaacaaacataactgagagaacttttccatactgtgactacatgttatcttagtctctgcttcactgaccagaaaaaaatggacttgctaaaaagccaacttggtggtgattttttaaaagtcagcaattacataaatgtagaagggcattagtaaactctatccaaaaccaagtctgggatctaaattcattgtgtattctttcctagtgtatcaaagaaggttaagagggcaaggaaaatagtcaactattacaactttattgacaaaaccataacacagctgtcactcaaacaccaccccttcaccacttaccaaaaaaaaaaaaaaaaaaaaaccaaaccaaaaattagcctaaaggaaaagtgaagaagaaatgttcaaattaaaagtaactttcattgtgtacatatacatgtttttaaataattctaattctcaaatacttttattttctattggaacaatccctcctccttagaaaaatttttaagtattgatatctaatgtttacattcttatactgagctttctttggaaaggatgtggttaacatatatggagcattactaaaatatagagggcactatttggcaacatctggagtaaattagtttactttagggcctgcctttcttctatttatattaactgtatatttcttcaagtgttctacagtatttactgataggcaatttaatgagattgttgcttgtaacacacttcctaaggacccaacactttacacagtcaggaagcactagatgactggcaaagtcactctaaggcatgcatggaaaattctataggaagaaaggcaagaagcctagtgcagctcacctgttattttatatgttcttgatgccaatcactattagtctgtctggtgcttagttcatgacattaaatgctcttatattaccactagtactaataaaaatgatgtaacatgaacattccttccctggcctcaagccacaaaaccatgaggatcaaagttaaaaaaaaaaaaaaaagcaacaaccctattatgaaacagtatgctatttcatactgctggtgggagtataaatcagcacaatctttacagagagcaattttgaaatctcatcctacaaatatacttgaccactcatgaaatgacacactctgagttattcactgtagcactgcttttaacaactacaaaagagagttcatcagtagacactagtttaaaacatagtatatccatacaatggaatattctgcatctgtaaaaatgaacaaggaagctcatgatatgaaaaaagctttaggaaatactgtcagcttagaaaggaagaacgacagatgtgagaatgcattttttcagtggctagattgtttgttctatgaaccatgtgaatggattacttatcctctccatgcaagaaaacaaaacaaaaccgagaaactaataatagtgattatctttagaggggagagaaatgaggaacaagggtgaaaggatgactctttcaatgtataccgttcaaatatttttaaatcctcatgtatatggtaaaatgatctttgacaagagtgccaagaccactcaatgggaaaagaacaatctcttcaacaaattgtgctaggaaaactagacatccacatagaaaagaatgaaggtggatcatatacgccatacacaaaaattaattcaaaatggactaaggatctaaatgtaagactcaaaactataaaattcctagaagtaaacacaggggggaaagtttcgtgacactggatttgtcaataatttcttggaaatgacaccaaaagctcaggcaacgaagacaaatgggactacatcaaagttaaaagttcagtgcatcaaaggacacaataaagaaaaaaggcaacctgtagaagagaagaaaatatttgcaagtcatgtatctgacaaagagttaatatccagaatataaaaatatctcctacaactcaacaacaacaaaaatcaaataacccaatttaaaaatgagcaaaggactggaataaacgtttctccaaagacgatatacaaattgccaataagcgtatgaatagatgatagatgttcaacataactaatcatcagagaaaatacaactcaaaaccacaatgagatattaccccacacccattagggtggctactagcaaacaaacaaacaaaccagaaaataacaattgttggcaaagatgttaagatactagaaaccttgtgcactgttggtaagattataaaataatgcaactattataaaaaaaagcatggaggttactcgaaaaattaaaagtagaactaccatatgatccaacaatcccacttctgtgtatatatnnnnnnnnnnnnnnnnnnnncttgagaacattatgctaagtgtagtgagccagtcacaaaaataaaaaaatactgtatgattccactaatatgaggtatctaaaggagtcaaatttatagaaacaggaagtataataatacttgccagggacagcggaaagtagaaaagacgagttgtttaaaaggtacagagtttcagttttgcaaaatgaagacgttctagagatctgtttcacaataaagcaagtacttatacatgacactactgagtggaacacttaaaatggctaaggtggtaaatttcatgttatatgttccttaacacaaatatttttaaaagtttataaccatttgaaaacactggtgatgaaaattaaaaaacaaaaataaaaacaaagcaagcaactagatccaactactttccttccccagtgagaaaggaagtgttgctatagacagtcaatgcatgtcactgtcttgacttcagtggacaaatacctgctctgctaaaaaagaaagatcactgggttaacatccctatgtttggctgctgtcctaccttgtcagcctccacaccagacttctcaagagcagatctcaattctgaagcctctgcgtgctgatgcacactcacatctttatgttatggcatagcctctggctcaattttaccttgaaatagttctttggaagtctttttcttggcattggtccttctcaacctctctgctgattttaagcttaatggccttctctactggttaggattctatatatgtttctacctttctgaccactgaatctgcctcctttacctccctaaaactaggtattactatggtcctgcctgccttcagcctccttttgattctccacttgttctgtcttaactatctaatgtatattactgtccacagttatctttattaccctaatattgttgctcccagatccaacctctccccccaaaccccaatgtttgaatttctagctgtctgttagtctccatatgaatatgatctaatcatcatggctcttttaaacaagacagagccacccatacaccatgaaaccagtaccacatacaagcagtcctctaaaaccttcagattaattactaccttgggccacttaccttggcctgttttgagctctgtggtctgacttttcatcattgtgcatttttccactgatgctatgcttcactctttggcctgatactttgataaagattctctaatgtctgttgatattcctctcaacataaatcaagttcttcctctggccaagctgtctttggctactgttaaacatcttgcccaatctgagaacctttaaattgatactgcacttcactgctggctctccctcaagcaaacaagatgaggatatacctacgtttcaaaccgtttcagtgacctcctccagacacctgctggacctcccgtgttccctttgtatcctaatggcttcactctgattccaaggatgaatgaagtcttagtcacagtcatttttgcctccctccctctattatgtgattaaaaacataaaatttaccaccgtaaccatttttaagtgtaaagtttaacagtgttaagtatatccacactgggccaggcatggcggctcatgcctgtaatcccagcactttgggaggccgaggcaggtggaacacctgaggtcaaaagttcgataccagcctggccaacatgatgaaaccccgtctctactaaaaatacaaaaattagccaggaatggtggcgggaacctgtaatcccagctacttgggaggctgaggcaggagaattgcttgaacccaggaggcagaggttgcagtgagcctagattgcaccactgcactctagcctagggaacaagaacgaaactccatctcaaaaaaagtagtatattcacactgttatgaaaaagatctaacattttcatcttgcaaatatgaaattcattaagtaactaccctttccctcatcatcccactcttttttaacccctaatgtgaattatttcataaaccctgttaattctttctcagtaatgccataaaaatcataagatttaatggtataagagatctgaaaggtcacctgacacagcttctataatatgtattcgtaacctcaaaaattttcacaataaatggttatctggctgtagtttacacacatcaacagatggcaagacagtcatatcatccttgaacactgataaggtttggctctgtgtccccatccaaatctcatcttgtaactcccataattcccatgtgttgtgggagggacctggtgggagatgattgaattatgtgggcaggtctttctcatgctgttctcatgatagtgaatgagtctcacgagatctgacggttttaaaaatgggagtttccttgcacaagctctgtttgcctgctgccatccatgtaggatgtgacttgcttctccttacattccaccatgattgtgaggcctccccagccatgtggaactgttaagtccaataaacctttcttttgtaaattgccgagtctcagatatgtctttatcagcagtgtgaaaatgaaccagtacagtaaattggtaccagtaaagtggggtgctgcagaaaagatacccagaaatgcggaagcgactttggaactgagtaacaggcagaggttggaacagtttggagagctcagaagaagatgacagaaaaatgtgagaaagtttagaagtccctagagatttgttgaatggctttgacaaaaatgctgataatgatatggacaatgaaatccacgccgagatggtgtcatatggagatgagaaacttgttgggaaatgaagcaaaggtgactcttgttatgttttagcaaagagactggcggcattttgtccctgccctagagaactgtggaactttgaacttgagagagatgatttagggtatctagtggaagaaatttctaagcaaagcattcaagaggtgacttgggtactgttaaaggcattcagtttcgaaagggaaacagagcataaaagtttggaaaatttgcagcctgacaatacaatagaaaagaaaatcccattttctcaggcaaaattcaagacagctgcagaaatttgcataagttacaaggaactgactgttaatcaccaagacaatggggaaaatgtctccagggcatgtcagagacctttgcagcagccccttccatcacaggcccagaggcctaggaggaaaaagtggtttcataggctgagcccagggtccctgtgctgtgtgcagcctaaggacacggtgccctgtgtcccagccactccagccgtggctgaaaggggccaacatagagctcaggccgyggcctccaagggtgcaagcctcaagccttggcagcttccacgtggtgttgagcctgtgagtacacagaagtcaagaattgaggtttggtaacctccacctcgatttcagatgtatgaaaatgcctgtatgcccaggcagaagtttgctgcaggggcggggtcctcatggggaacctctgctagggcagtgcagaagagaaatgtggggtcagagtccccacacagaatccytactggggtactgcctagtggagctgtgagaagagggccaccatcctccagaacccagaatggtatcactgatagcctgcaccatgtgcctggaaaagccatagacactcaacaccagcccctgaaggcagccaggaggtaggagctgcccaagactgtgggaacctacatcttgcatcagtgtcacctggatgtgagacatgcagtcaaaggagatcattctggagctttaagatttgactgccccactggatttcagacttgcatggggccagtagcccctttgttttggccaatttctcccatttggaatggctgtatttacccaatgcttgtatccccattgtatctaagaagtaactaacttgcctttgattttacaggctcataggcgaaagggacttgacttgtctgggatgagactttggactgtgcacctctgagttaatgctgaaataagttaagactttgggggactgttgggaaggcataattggttttgaaatgtgaggatatgagatttgggaggggccagaggtggaatgatatagtttggttctgtgtctccacaaaatctcatcttgcagctcccataattcccatgtgttgtgggagggacccagtggaagacaactgaattatggggatgggtctttcccatgctgttctcgtgatagtgaataggtatcatgagatctgatggttttaaaaatgggagcttaccttgtacaagctctctttgcctgctgccatccacataagatatgacttgctcctccttgcctttcaccatgattgtgaggtctccccagccatgtggaactgttaagtccaataaacctctttcttttgtaaattgcccagtctcggatatgtctttatcagcagcatggaaatggactaatacaaacacttactattagaagttcttctgtacgttgctctaaaatctttttcactcttattttgcaacactgataattctgccaccacaataaactgaacaagattaatctgtctcttatgaaattcctcaaaatcttacagagagcattatattttcccaaattatccttcaatggtctgtacagtcctatgtccttcaaccactgcttgcacaacatgatttggggtcttcatcatcaccctgactataaattcagggctctagtgcatcagtctttctcaaaacactgaaccgaaaaataaactcaatttcacagctatggtctgatctggacagaacagaacaggataatcaccttacacctttctggacacgaatacataattggttcccactgaatataccatcaactaaaagcctaacatctttgcatcagtttggttaatataagcctaacacaacacagccaaagtgaaaaattcttccgtttcagtgaatgaattctttttcatcctactgtatctcagtaaggtacagtaaaaatcaacagttactgcacacttgctgtaaatatgcacacactaaaatgtacctacaaagaatttacctaaaatgtaatgctcaaaggcaggtcatctcagagtttaatctgtttcctctacttatactcagagttagttcccatatctatgatcttgcttcattcacctcccctctgtgttcattgccctagttctaacgctattaccaacctcaattattgcttccaaacctatcacccacatactgacaggtcattttgtttatggatcatagcttgtgacattagtaatttaccttcagtagttcaccactggccactgaataaagcccaacatagttatactgacatttaatcatcagttgcttatctctaaacaaataccataactgcaatagggcacaattccaagtagtaaagactatgccatcaatatgctatatacgttaaacacataaactacacacacataatatataatatacatatgaatccttccatatatgtatgtggaatatacattccattccttcyataatgaacatatatgctcattactctctaaagcaattgaacttttctgtttccctctaggaaataaaataagctaatcatgaaatgaaagacagtccctagaatttgccataccaggtcaagagagagcatcagggctgggcacggtggctcacgcctgtaatcctagcactttgggaggctgaggcgggtggatcacgaggtcaggagatcgagaccatcctggctaacacagtgaacccctatctctactaaaaatacaaaaaattagccaggcgaggtggcaggcacctgtagtcccagctactagggaggctgaggcaggagaatggcgtgaacccgggaggcagtgctcacagtgagccgagatcgcaccactgcactccagcctgggtgacagagcgagactccatctcaataaaaaatgaaaaaaaaaaaaagagagagagagagagcatcaggttaggaccctcatcccaaataagtgtaataaaatcaacaatataagtctcaagtgttatttgttctgttttgtatcctgtaataaggtacaaagtaccctttgtatttgatttctaaacaccaagcacctttttgaacaaaattaaaatgccatgatgggtctccacaattcctctatactcaatgcaaagtcccatttgaatagtgagggcaaaagtatgaataacaatagtctctgagatccacaagcagctcatccctaacagacaaagtgtttttgggaaaacagaaatatctctggtcttcattttcctaattaataaaatgaaagtgttagactagataactgctaagatttcctataacattaatactctgtgattctttgactttcaacactattaatctttaggagaaaaaaaccatgtatgtctccagaagttctattaacataaggcagttttaatgaaacctgaaaacagttaactcatgtaagctagaaaaaattcctgtcaacaaggcatagcagagactgcatgtagtttactaaggaataaagaggaccataatgaatgcatgaatatacaaataattaactcttttaagaagcatcatttgagttggcatgacttcagctaaaaagtgctgtgtatcaagtgctttcacagttctccaaaggaagaatcttctgtatcagtaaattaacactgcaatagacccttgaataatcagcatctattctttggcatgcatatcccatggctaaggctagcaatacgattattaaaaccactcactcaacacaatttctttcaagagggtggcattcaaatcatgagcttattctaaccgatgtttattccaagcagtgattcctagcctaaattayagaaaggtgggcaaatgattgaagaaattttctgtagaagaaactgttataaaaactggtcttacagagaataatgcatattccaaatatacttaattagggtgtgagtttattgttactggactataaagttagattataagcaagggttaaattgtactgagcctattatctatcacccacaacagtgtgggcaatgccaggcacataaagaggatagctttgaaatgactgactactgggtctaggctgaacggccaagagttggctggaagaacaagggccaaagagcacagatttatgaagaaatacaagagaatgagaaggcacacatctagtccgaaccaaggtagggaccccagagttctaaataccagaaaggtccaacagaccctggaactgcagtctaaggtgatgaatgggtttgtsgggggaagatgatagtcacagggagctatgaaggagtctcacgtgagccaacagtatagattctgaaggcgtttatggcaggagaaacaaaatacgcagggaaagataatctcagtgttaaagacagatgtatgcctggaggccaagacagaaaatgagctgcagagagaacgcagtagcctgctagccagccagtaaagaagtgaggctagttcagcggactcgcgcggcctcgctctttggactcgtcaccctcccctccccctcccgccgccgtcacccaggaaaccggccgcaawcgcsggcggacctgaagctggtttcatggcagcctcaaagaaggcagttttggggccattggtgggggcrgtggaccaaggcaccagttcsacgcgctttttggttttcaattcaaraacagctgaactacttagtcatcatcaagtrgaaataaaacaagagttcccaagagaaggatgggtggaacaggaccctaaggaaattctacattctgtctatgagtgtatagagaaaacatgtgagaaacttggacagctcaatattggtatttccaacataaaagctattggtgtcagcaaccagagggaaaccaccgtagtctgggacaagataactggagagcctctctacaatgctgtggtgtggcttgatctaagaacmcagtctaccgttgagagtcttagtaaaagaattccaggaaataataactttgtcaagtccaagacaggccttccacttagcacttacttcagtgcagtgaaacttcgytggctcctcgacaatgtgagaaaagttcaaaaggccgttgaagaaaaacgagctctttttgggactattgattcatggcttatttggagtttgacaggaggmgtcaatggaggtgtccactgtacagatgtaacaaatgcaagtaggactatgcttttcaacattcattctttggaatgggataaacaactctgygaattttttggaattccaatggaaattcttccacatgttcggagttcttctgagatctatggcctaatgaaagcgggggccttggaaggtgtrccaatatctgggtgttyaggggaccagtctgctgcaytggtgggacaaatgtgcttccagattggacaagccaaaaatacgtatggaacaggatgtttcttactatgtratacaggccataagtgtgtattttctgatcatggccttctcaccacagtggcttacaaacttggcagagacaaaccggtatattacgctttggaaggttctgtagctatagctggtgctgttattcgctggctaagagacaatcttggaattataaagacctcagaagaaattgaaaaacttgctaaagaagtaggtacttcttatggctgctacttcgtcccagcattttcggggttatatgcaccttattgggagcccagcgcaagagggataatctgtggactcactcaattcacgaataaatgccatattgcttttgctgcattaraagctgtttgtttccaaactcgagagattttggatgccaygaatcgagactgtggaattccactcagtcatttgcaggttgatggaggaatgaccagcaacaaaattcttatgcagctacaagcagacattctgtatattccagtagtgaagcccttgatgcccgaaaccactgcactgggtgctgccatggcggcaggggctgcagaaggagtcgacgtatggagtcttgaacctgaggatttgtccgccgtcacgatggagcggtttgaacctcagattaatgctgaggaaagtgaaattcgttattctacatggaagaaagctgtgatgaagtcaatgggttgggttacaactcaatctccagaaggtggtgaccctagtgtcttctgtagtctgcccttgggcttttttatagtgagtagcatggcaatgttaatcggagcaaggtacatctcaggtattccataaaacctaccaactcatggattcccaagatgcgagctttttacataatgaaagaacaacccagcaattgtctcttaatgcgatgacactattcatagactttgattttatttataagccacttgctgcgtgaccctccaagtagacctgtggcttaaaataaagaaaatgcagcaaaaagaatgctatagaaatatttggtgtgtgtgtgtgtgtgtgtgtgtgtgtgtgtgtgtgtttttaacatccacagttaaggttgggccagctacctttggggstgacccccyccattgccataacatcctgctccattccctctaagatgtacgaagaattcagatcctcaccattggaatcttccatcaaacatactcaaacactactggaacaggacttgagtctttgcatgacatatacttgattaaaaggttattactaacctgttaaaaatgagcagctcttcgcttttaacagataccccaaaagtcttcttttctacatagtagaagacggaaacacctttactgaatgtttgaatagaaatatctactaaattattaaaatagacatttagtgttctcatagcttggatatttttctgaaaagtatttgccaaaactgaaatccttccaatattttccatggtcccattaattataatgactttctgtctagatcttataggaaaggatactttcttttttcttccatctttcctttttatattttttactttgtatgtataacatatatgcctatatattttatacactgagggtagcccatttataaattaagagcacattatattcagaaggttctaacagggctggtcttaagtgaaccactatgtatatmaatatgttggaaaacagctgtatacatttttgggcaatggttatgcataatatctaccagaatttttttcttaaacagccaacatttaaaatttatgttttatgtccataaaagaaaatatrctttattgtgacttcaactatatttcttatcccttacatttttatttaattgtcttagcctaaaaaaagaagaaactgtggaatactacagtaaatactgttttcaaacacaagcaataattcaaatagttttcttttgaattaattttagacatattttggatcctattgaggggataagaggatgtcaaaaaagttaaatacctaagtagaaaaaaatatagaaataaagccaggaatctctttcagttcaaatgttatcaattgtgaataagaaattgctatctgggatgacaaaattatctctgcttagtatcttattataactgaaaaaaggtttatcattataaatgccttccaaggaaaccaagaatttctcaaaatatttaatgtcacatattataagaagtcacctaatctagcttcttaacgtcaatctttaaaaatatcttaaaattactttgttttgtaataaacagtgaaaaaaaaaaaagttaggctgatggcagtgagagcaatggtctggaagtggtacccttctacctaggttcccagtgggctgtggggagtgatcccttcgagaagtctgctcacgacatacaggtttgggggaaacacaaagtttcatttatgacaaagacagaggggacacacatgaaaatacttgcgcatataaaaaagtttgatcattttataggcctagtggaaaggacagaagctggacagtgaggggtgcctgaacaggcctgggtaaagtagttactaccgccggggcctgggatatataaactaataacagagttaagagccaaagaatggaaaataaaatgaaagcatatcagtaactggaggacttcttttttgttgttgttattgttgagatggagtctctctgttgcccaggctacagtgcagtggtgtgatctcagctcattgcaacctctgcctcctgagttaatgttattcgcctgcctcagcctcccaaatagctgggactacaggcacatgccaccatgcctggctcttttttttttttggtatttttagtagagacctggttttaccatgttggccaggctggtctcaaactccaggcctcaagcaatctgcccatctcagcctcccaaagtgctgggattgcaggtgtgggccaccatgcccagctctgaaggaattctccacaggtagtcctgttactgaggaatgctgagtgcttaccaagcccagaatttcagctacagctctagcttgaaaatggtagtcaggctgggtgtggtagctcatgcctgtaatcccgactctgggaagccaaggcaggaggactgcttaaggccaggagttcgagcacagcctgggcaacacagcaagagcccgtctctattttaaaaaagaaaaagaaaatgataccacaaacttccccaaagatcagttagaactagtactaagtagtttctcaaattttcagtatgggaagtggtgaggtataggaatgactaaaaatctgaaacaatttttgtccccttaaatgtgcttggctatcaataagaaatactgaataaaattcatayttcaagttataattaaaatccaatttccaaagagtcttttgctagaactattaaaatgcatctaaaccaatgagttcaatttttatctcctctatatttttggcctgcaaaaaatgctaaaaataaaggtgctaatgatttgagaaatggttaaaatatagataccacccaacaaacatgagaagagtccacaaaccagcactctctgaataagttagtacacttggggttaactgagaaaaatttcatttttagacatgatacaaaaaataatttcatacagctttttaagctaaaataaaataaaataaaataaaataaaataaaataaaataaatctttcaggagtgtaacgaaggctgaccatagtccagaacaccatgcctcagcacataggccatttaacctgggcggtctggtcacactgagctgtcactccacgccttggagaagcagggtggtcagtgcgacaggctgtcactgccagtgccacgctgctgaagccacgagagcatctcggggtgagcagcgtggattccacatcctcccctgctctcactctctaacctacccatttggttgctcacatttttactttccctaaagatactgatgttattaaaaataagcaggagttcatggaagagatctccatggaacactgttaattttttcattatacctgtacaatttaatttaattataatgtattctagaaagcttgtttccaatgggcaagagaaagaaatgaagcagttcttacgtccagaatctccagtgagttttcaaaggatagagagtgctcttccatttttttttttttttttgagacgtagtctcactctgtcacccaggctggagtgcagtggagagatctctgctcactgcaagctccgcctcccgggttcaggccattcacctgcctcagcctcccaaatagctgggactacaggctcctgcaaccacgcctggctaattgtttgtatttttagtagagacagggtttcaccatgttagccaggatggtctcgatctcatgacctcatgatctgcctgcctcggcctcccaaagtgctgggattacaggcatgagccactgcgcccagcccgagagtgctcttcttatgtgcagtcacaccatggaccagacaataccccgaggtcctgcaggctttctctccttatccatccttttttccctcagcttctttctcctcccttctgctttacatgtatatatgtatgtatgtattgagtcatctattgctatttatttcttcccttccttcttttctttcctacctagaaaagcctgtcacaagtcctactgcctatgatagggaaaagaaaaagaaaaagaaaaagaaaaagaaaaatattaactttactgccactgtgtcctgtcaccctcttggagttcttcacaagctatgtgatttgacttgaaagtaatttgaaggtttgggtaaattttctggacaaatagagtgctttaaagacaaatcacctaaacaacaattatttgtttatggtagaaaaggagctatagacatcttactgcatggactccttatctccccacttcctatttgcttaaaatgtcaagaacaatcagatagtttcactatgaggaacaattgygtattagtctgttttcatgctgctgataaagacatatgcaagactaggcaatttacaaaaggaagaggtttaatggacttatagttccacatggctggggaggccttacaatgatggtggaaggcaaggaggagcaagtcatgtcttacacggatggcagcaggcaaagagagagagcttgtgcagggaaactcccatttttaaaaccatcagatcttgtgagacttactatcacaagaacagcaaaggaaagacctgccccccatgattcaactacttcccactgggtccttcccaccacacatgggaattcaagatgagatctgggtggggacatagccaaaccatatcaaactgttttatagtattattctggattattttggaaagtttattacaactagttatcaatacaccaaagatatggaaataacttcattatacaagcatggtctttgtaatggcatttgtttaaaatataaggatgaaatacataggtaaagcatgacaattgcttcaagataatacaagaggatgtataaaattcctcaagctgtagacatgatttgtgtacttttctatacgtacattagacttcagtaaaatgtttgcatataaaaaaaagggaaggggagtaacgaaggttataattaaaacaaaattgtccctgagttgacaactgttgaagttggatcatgagtactattctattcttgtacatgcttgcaatttttcataatgaaagatgttttaaaatgttacctaaaacctaagaaactcaagcaaatacaagattcagaagcatggtataaaagcagtacatcctttaaagctagattcagatgcaaaatatagtgcattaaaaatgaagaatcaatgcttctttataattttactgaaagtgaataatttttcatgaaaaattcttggcataattacaaaggaggattctacaaactaagaaacagaagtgttctaattctggtggaaaattttttatattttgtagtatactagaataaatttaagattttaaataagagaaagatttttaaaaatctaatgatctcctaaaaacacagtaaatgagttgcttctgatataagcaaaactaagagttctagtacatcatatgaactatgtttggatatcctgtgcattaatcctactttattcattctctccccaggcactgaccctcctctccccattagcagtcagtaacatttatcaagcactatagagaaaactggcagcccagaaaagataaaaggttaaacagtgattgtttcatgcagcaaaaaatatctaaaaatatgaaatctttcttggttttcctaatagaagtcacttataacaggtgcattaagtctagcagttaatggaatctgaatttagaagtaatattttctacttagttgaacagaattgcttgcattggaatacaccaataaattcatatttgtctttggtttttcataaaatgcttcattctattcaaaagtgctgcatgaatagtgttacacactacaggcattccccaacttacagaagggttgtgttctaaaagctcatctgtaaatcggcttcctagaactcagatcacattttttcactgaaataattttctaaagggcagttaggccatcaggccacccaatagaaatcaataaggtctaaatttattggacctactgtgatttagtgaagcactctggtttttgttttttcaactaaccactttgaaccattatttatttggtaaatgaaatacggattctaggactactactctccaatgctctgtgcaggcagagacacacatatatatacacacatgcattctcccttacccacatctatgtaccaaaagcttccttactcatcagagtaagcacactgaagcagtttagacaaaaggctcttgcatttgaaagctggggaagttacagttctagagcctattaaaggagcagtgaacacagaagcttccacaggaactattcctattgagtctcatagatgcaaagcagagtcttgcaggcagttggtggattgtaacttctaccagatttatctcccagaaatatagtttaaaaacaaattagcaacttctgtaagtcccagacagagtaatcaggcaaaagaaagaaataaagggcatccaaattggaaaagagaaagtcaaactatctctgtttgctgatgatatgatcttatacctagaaagccctaaagactcctccaaaaggcgcctagctttgataaatgaattcagtaaagcctcaggttacaaaatcaatgtacataaatcagtagcactgctacacacgaacaatgaccaagctgagaatcaaattaagaactcaatcccttttataatagctacaaaataaaataaaatacttaggaatatatttaaccaaggaggtgaagaactctacaaggagaactacaaaacactgcttaaagaaatcatagatgatacaaacaaatggaaatacatcccatgttcacagactagaagaatcaacaccatgaaaatgaccatactgtccaaagcaatctacagagtcaatgcaattcctatcaaaatgccatcactcttcacagaattataaaaaaaaaatcctaaaatgcatatggaattttttttaaaaagcccaaatagccaatgtaatcctaagcaaaaagaacaaatctagaggcatgacattacctgacttcaaattatactaatataagggtatcataaccagaacagcatggcactggcatataagtagatatgtagacctatggaacagaatagagaacccagaaataaagtaaatatttagaaacgactgatctccaacaaagcatacaaaaacataaactggggagaacaaaagacagcagacagcttctgcagacttaaacgtccctgtttgacatctctgaagagagcagtggttctctcagcatggcgttcgagctccgagaagggacagactgcctcctcaagtgggtccctgaccccagtgtagcatgactgggagacacctcccagtaggggatgacagacacctcaaacaggtggtgcccctctgggatgaagcttccagagggaggatcaggcagcaatatctgctgttctgcagcctctgctggtgatacccaggcaaacagggtctgaagtggacctccagcaaactccaacagacctgcagctgaggggcctgttagaaggaaaactaacaaacagaaaggaatggcatcagcatcaacaaaaaggacatccacacgaaaaccccatctgcaggtccccaacatcaaagacaaaaggtagttaaaaccacaaagatggggagaaaccagagcagaaaaggtgaaaattccaaaaaccagagcatctcttctccttcaaaggatcgcagctcctcggcagcaagggaacaaaactggatggagaatgagtttgccaaattgacagaagtaggcttcagaaggctggtaataacaaacttctctgagctaaaggagcaygttctaacccatcacaagaaagctaaaaaccttgaaaaaaggttagacgaatggctaactagaataaacagtgtagagaagaccttaaatgacctgatggagctgaaaaccacagcaagagaactttgtgactcatgcacaagcgtcaatagccgattcgaccaagtggaagaaaggatatcactgattgaagatcaaattaatgaaataaagcaagaagacaagattagagaaaaaagagtgaaaagaaatgaacaaagcctccaagaaatatrtgattatggataaagaccaaatatacgtttgattggtgtaccggagagttatggggagaatggaaccaagttagaaaacactcttcaggatattatccaggagaacttccctaacctagcaaggcaggccaacattcaaattcaggaaatatagagaacaccacaaagacaaagataatcctcaagaagagcaaccccaagacacataattgtcagattcaccaaggttgaaatgaaggaaaaaatgttaagggcagccagagagaaaggtcgggttacccacaaagggaagctcatcagactaacagcagatttcttggcagaaaccctacaagccaggaaagagtggagccaatattcgacattcttaaaaagaaaaggattttcaacccagaatttcatatccagccaaactaagcttcataagtaaaggagaaataaaatcctttacagacaagcaaatgccgagagactctgtcaccaccaggcctgccttacaagagctcctgaaggaagcactaaacayggaaaggaataactggtagcagccactgcaaaaacatgccaaattgtaaagaccgtcgatgctatgaagaaactgcatcaattaacaggcaaaataaccagctaacatcataatgacaggatcaaattcaaacataacaatattaaccttaaatgtaaatgggctaaatgccccagttataagacacaggctggtaaattggataaagagtcaagacccatcggtgtgctgtattcacgagacccatctcacatgcaaagacacacacaggctcaaaataaagggatggaggaagatctaccaagcaaatggaaaacaaaaaaaaaaaagcaggggttgcaatcctagtctctgacaaaacagactttaaaccaagaaagatcaaaagagacaaagaaggccattacataatggtaaagggatcaattcaacaagaatagctaactatcctaaatatatatgcacccaatacaggagcacccagattcataaagcaagtccttagagacctacaaagagaattagactcccacacaataataatgggagactttaacaccccacwgtcaatattagacagatcaacgagacagaaggttaataacaaggatatccaggacttgaactcagctctggaccaagcagacctaatagacatctacagaactctccaccccaaatcaacagaatatacattcttctcagcaccacattgcacttattctaaaattgaccacataattggaagtaaagcactcctcagcaaatgtagaagaacagaaatcacaacaaactgtctctcagaccacagtgcaatcaaattagaactcaggattaagaaattcactcaaaaccacacagctacatggaaactgaacaacctgctcctgaatgactactgggtacacaacgaaatgaaggcagaaataaagatgttctttgaagtcactgaaaacgaagacagaatgtaccagaatctctgggacacatttaaagcagtgtgtagcgggaaatttacagtgctaaatgcccacaagagaaagcagaaaagatctaaaatcaacaccctaacatcacaattaaaagaactagagaagcaagagcaaacacattcaaaagctagcagaagacaagaaataactaagatcagagcagaactgaaggagacagagacacaaaaaacccttcaaaaaatcaatgaatccaggaggtggttttttaaaaaaatccacaaaattgatagactgctagcaagactaataaagaagaaaagagagaagaatcaaatagatgcaataaaaaaatgataaaggggagatcaccaccaatcccacagcaatacaaactaccatgagagaatactataaattcctctatgcaaataaactagaaaatctagaagaaatggataaattcctggacacatacaccctcccaagactaaaccaggaagaagctgaatctctgaatagaccagtaacaggttctgaaattgaggcaatcattaatagcctactaacaaaaaaaagtccaggaccagacggattcacagccaaattctaacagaggtacaaagaggagctggtaccattccttctgaaactattccaaacaatagaaaaagagggaatcctccctaactcatttatgaggccagcatcatactgataccaaaggcctggcagagacacaacaaaaaaagagaattttagaccaatatccctgatgaacatcgatgcaaaaatcctcaataaaatactgacaaaccaaatccagcagcacatcaaaaagcttatccaccatgatcaagtcagcttcatccctgggatgcaaggctggttcaatgcacgcaaatatataaacgtaatccatcacataaacagaaccaatgacaaaaaccacatgattatcccaatagatgcagaaaaggcctttgacaaaattcaacagcccttcatgctaaaaactctcaataaactaggtattgatggaacgtatctcaaaatactaagagctatttatgacaaacccacagccaatatcatactgaatgggcaaaaactggaagcgttccctttgaaaaccagcacaggacaaggatgccctctctcaccactcctattcaacatagtgttggaagttctggctagggcaatcaggcaagagatagaaataaggcgtattcagttaggaagagaggaagtcaaattatctctgtttgcagataacgtgattgtatatttagaaaccccattgtctcagcccaaaatatccttaagctgataagcaacttcagcaaagtctcaggatacaaaatcaatgtgcaaaaatcacaagcattcctttacaccaataatagacagagagccaaatcatgagtgatctcccattcacaattactacaaagagaataaaatacctaggaatacaacttacaagggatatgaaggacctcttcaaggagaactacaaaccactgctcaaaaaaataaaagaggacacaaacaaatggaagaacattccatgctcatggataggaagaatcaatatcttgaaaatggccatactgcccaaggtaatttatagattcaatgctatccccatcaggctaccactgactttcttcacagaattggaaaaaactactttaaatttcatatggaaacaaaaaagagcccacatagccaagacaatcctaagcaaaaagaacaaagctggaggcatcacgctacctgacttcaaactatactacaaggctacagtaaccaaaacagcatggtactggtaccaaaacagagatatagaccaatggaacagaacagaggcctcagaaataacaccacacctctaaaaccatctgatctttgacaaacttgacaaaaaccagcaatggggaaaggactccctatttaataaatggtgctgggaaaacaggctagccatatgcagaaagctgaaactggatcccttccttacactgtataaaaaattaactcaagatgagttaaagacttaaatgttagacctaaaaccataaaaaccccagaagaaaacctaggcaataccattcaggacataggcatgggcaaagacatcatgactaaaacaccaaaagcaatggcaacaaaagccaaaattgacaaatgggatctaattaaactaaagagcttctgcacagcaaaagaaactatcatcagagtgaagaggcaacttacagaatgggagaaaatatttgcaaactacccatctgacaaagggctaatatccagactctacaaagaacttaaacaaatttacaagaaaaaaacaaacaaccccatcaaaaagtggacaaaggatataaacagacacttctcaaaagaagacatttatgcagccaacagacatataaaaaatgctcatcatcactggtcatcagagaaatgcaaatcaaaaccacaatgagataccatctcaggccagttagaatggcgatcattaaaaagtcagaaaacaacaggtgctggagaggatgtggagaaataggaatgcttttacactgttggtgggaatgtaaattagttcaaccattgtggaagacagtgtggcaattcctcaaggatctagaactacaaataccatttgacccagcaatcccattactgggtatatacccaaagcattatatatcatgctactataaagacacatgcacacacgtttattgtggcactattcacaatagcaaagacttggaacctcccaatgtccatcaatgatagactagattaagaaaatgtggcacatatacaccatggaatactatgtaaccattaaaaaaggatgagttcatgtcctttgcagggacayggatgaagctggaaaccatcacgttgtgcacgtgtacacattttatatatggtgagagatccctatctctcaccatatataaaaattaacccaagatggattaaagacttaaatctaagacctgaaaccatcaaaattctagaagaaaacttaggaaaaacttctgggcattggccaaaacaaaaaatttatgacaaagaccccaaatgcaaatgtgacaaacgcaaaaataaataaatgggacctaattaaacaaaaaaaaacttccacaagaccaaagaaataatcaccagagtaaacacacaacctatagaatgggaggaaatatttgcaaactatgcctctgacaaaggactaatatccagaatctaaaaggaactcaaacaagtcagcaagaaaaaatcaaataatcccattaaacagtgggcaaatgacatgaacagatatttcttaaaaagaagatatacaaatggtcaacaaacatgaaagaaatgctgaacatcactaatcatcaggaaaatgcaaattaaaacctcagcgagataccaccttgccctaaccagaatagctattattaaaagtgaaaaaacaatagatgttggtgtggatgtggtgaaacgggaacgcttatatgytgctggtgggaatgtaaattcgtacaacctctatggaaaacagtctggagattcctcaaagaaattaaaatccaatccagcaatttcactaccgagtatctacctaaaggaaaagaaatcattaaatcaaaaagacacccagatgtgtatgtttatcacagtacaattcacaattgcaaagatatggaatcaacctaagtgcccatcagccaatgagtggataatgttttatatatatatatatatatatatatacatatatatatatatatatgtatatatatatatatacacacacacacacacacacacatacatatacgtatgtagacatatatgtatatacatgtgtgtacatatatacgtgtatatacgtacrtgtgtgtgtgtatatatatatatatatatatgatggaatactactctgccataaaaaaagaaagaaataatgtcttttgcagcaacttggatgaaaccggaggccattattctaagttaagtaactcaggaatggaaaaccaaatactacatattcacacttataagtgggagctaagctatcagtatgcaaaggcagacagagtggtataatggacatgggagactcagaagtggggaggttgagaggatggtgatggatgaaaaactaccgattagagtacaatgtctactactcaggtgacgggtacattaaaatcccagacctcgtgactatacaagtcattcatgtaaccaaaaaccacttgtactcctaaagctattagaataaaaaaaaaaggatgtaatcattaaatgaaagcataaactaaaaaaagaaatttcctaataatcacttttaatatatatttttgtttataaactcaaataaaatatagattacatttgtgaactatgtgtgtgcattcaaagctataacaatgtctcctccccaactgcagagatgaggggtctgaagggcctgaagagcagctaaagcaagggctccttgaaaacagcaacaggccctccctcygccacagggaaatgccagcagtagcagtaggccatggaaccagcatgcaaggagtgggctgcttctattggtctacttttctactccaccaaatgtatctatatttcactgctttgaagatttttttaagccacaaaattgttttcatggatgcaaaaaaaaaaaaaaaaaaaaaaacaatgtaaaaaatcagagctaaaataacttcacatgcatatactttctcatatgcctattcatttaacaatttgaaagaaaaatacatacagctattcttcttgaaccctggaggcggaggttgcaatgagccaagattgcaccaccacaccgcagcctgggtgacagggcaagactccgtctcaaaaaaaaaaaaacaaaaaaacctagctattcctagctattctattattcaggcccaatcccaatgtatagttgcttgctttttaagttcagaattttatgagtatgcttcagttatgcagtgtgaccattataagattttaaatgtatttttataaagcccagatccagaaatatgacatgactttccagagaccactgtggaatcatatcaaaaaccaagcagtttcctcccaaattcagctgaggtctactccacttgcctgcataggtgttggccttgttcagaaggtcggtacatgcatgcatatcagcaaaagcccggattcctaagcagttgacagggtgaagctgggattccaaaaattcacaacaagtcttcttcacatcctgtaactgtaagagaccagctgctgggagaagtacctgcaacacacacatcaatattcttaggcacttgggtggaaaaacactgcctctttgaccacttctacataggacacaagatgttcagccatagtttattatctgcgtccatacccccatattccctagaaaacaaatataaaaattatttttaataacaatgatgactcttcacattccccataatttccatgtaatctttcaaaggcctcttctccttggtcagaagaatatgagatatcagatcttataagattaatggtttgtttcataagcataaacaaaatgttattttgacttctaaaaacacaaattcttggcagggcatggtgactcacacctgtaatcccggcactttgggaggccaagacaggaggatcgcttgagttcagaagtttgagaccaggctgggcaacatagcaagacctcatctctacaaaaaatataaaaattagcctggtgtggtggcacgcaactgtagtgccagctactcaggaggcagaggtgggaggatcacttgagcctgagaggtcgaggctgtagtaatctgtgatcaccccacagcactccatcctgggtgacagagtgagaccccatctcaaaaacaaaacaaaacaacaacaacaaaagcccgtaaattattaggatgctagggggtgctatgattcaatgaaaatggttttgttctcttagttcaagcagtcatgcacttcagttatctgtggggaaggagtggccccagagtaatccatatcacaacaaagcctcattttgctgaaggcctgtttttccactgtatgagtatcataacaactgctttccttacggggtagaacaatttaaagttcaacaacagtctctacctataagcagacagtttctctagaatgtaatatatgtgctaacaaggaaaatgtaataggtgattatctaataactttttaatttgcatttttatttgagtaactccaagcaattttatattaattataggttattctgtgggattgaaccactatcttcactatraatactatatccaacactacaagtgcttttcaaataagtcaataatagaaaaacatttttccttgtaagtgaattattacagtgttatataaaggaccatatttgaaagtcaaattaaggagaaaaacttcaaaaaaaggttatcgaattctggtgatcctttataaaagccaaagaaaccccacaaaaaaaccttcaactattcgaacaatggtaaattttagaaaagactacattagcattaaaaaaagatctaagttccttcagaaattgactttcatatatgccacactgcagcccaaagacagaaaaataatagtggtttatgactatatgttatgactttcctaaatctatggagtaagtcctaaacatagaaaagaaagacatcattcacatnnnnnnnnnnnnnnnnnnnnnnnnnnnnnnnnnnnnnnnnnnnnnnnnnnnnnnnnnnnnnnnnnnnnnnnnnnnnnnnnnnnnnnnnnnnnnnnnnnnnnnnnnnnnnnnnnnnnnnnnnnnnnnnnnnnnnnnnnnnnnnnnnnnnnnnnnnnnnnnnnnnnnnnnnnnnnnnnnnnnnnnnnnnnnnnnnnnnnnnnnnnnnnnnnnnnnnnnnnnnnnnnnnnnnnnnnnnnnnnnnnnnnnnnnnnnnnnnnnnnnnnnnnnnnnnnnnnnnnnnnnnnnnnnnnnnnnnnnnnnnnnnnnnnnnnnnnnnnnnnnnnnnnnnnnnnnnnnnnnnnnnnnnnnnnnnnnnnnnnnnnnnnnnnnnnnnnnnnnnnnnnnnnnnnnnnnnnnnnnnnnnnnnnnnnnnnnnnnnnnnnnnnnnnnnnnnnnnnnnnnnnnnnnnnnnnnnnnnnnnnnnnnnnnnnnnnnnnnnnnnnnnnnnnnnnnnnnnnnnnnnnnnnnnnnnnnnnnnnnnnnnnnnnnnnnnnnnnnnnnnnnnnnnnnnnnnnnnnnnnnnnnnnnnnnnnnnnnnnnnnnnnnnnnnnnnnnnnnnnnnnnnnnnnnnnnnnnnnnnnnnnnnnnnnnnnnnnnnnnnnnnnnnnnnnnnnnnnnnnnnnnnnnnnnnnnnnnnnnnnnnnnnnnnnnnnnnnnnnnnnnnnnnnnnnnnnnnnnnnnnnnnnnnnnnnnnnnnnnnnnnnnnnnnnnnnnnnnnnnnnnnnnnnnnnnnnnnnnnnnnnnnnnnnnnnnnnnnnnnnnnnnnnnnnnnnnnnnnnnnnnnnnnnnnnnnnnnnnnnnnnnnnnnnnnnnnnnnnnnnnnnnnnnnnnnnnnnnnnnnnnnnnnnnnnnnnnnnnnnnnnnnnnnnnnnnnnnnnnnnnnnnnnnnnnnnnnnnnnnnnnnnnnnnnnnnnnnnnnnnnnnnnnnnnnnnnnnnnnnnnnnnnnnnnnnnnnnnnnnnnnnnnnnnnnnnnnnnnnnnnnnnnnnnnnnnnnnnnnnnnnnnnnnnnnnnnnnnnnnnnnnnnnnnnnnnnnnnnnnnnnnnnnnnnnnnnnnnnnnnnnnnnnnnnnnnnnnnnnnnnnnnnnnnnnnnnnnnnnnnnnnnnnnnnnnnnnnnnnnnnnnnnnnnnnnnnnnnnnnnnnnnnnnnnnnnnnnnnnnnnnnnnnnnnnnnnnnnnnnnnnnnnnnnnnnnnnnnnnnnnnnnnnnnnnnnnnnnnnnnnnnnnnnnnnnnnnnnnnnnnnnnnnnnnnnnnnnnnnnnnnnnnnnnnnnnnnnnnnnnnnnnnnnnnnnnnnnnnnnnnnnnnnnnnnnnnnnnnnnnnnnnnnnnnnnnnnnnnnnnnnnnnnnnnnnnnnnnnnnnnnnnnnnnnnnnnnnnnnnnnnnnnnnnnnnnnnnnnnnnnnnnnnnnnnnnnnnnnnnnnnnnnnnnnnnnnnnnnnnnnnnnnnnnnnnnnnnnnnnnnnnnnnnnnnnnnnnnnnnnnnnnnnnnnnnnnnnnnnnnnnnnnnnnnnnnnnnnnnnnnnnnnnnnnnnnnnnnnnnnnnnnnnnnnnnnnnnnnnnnnnnnnnnnnnnnnnnnnnnnnnnnnnnnnnnnnnnnnnnnnnnnnnnnnnnnnnnnnnnnnnnnnnnnnnnnnnnnnnnnnnnnnnnnnnnnnnnnnnnnnnnnnnnnnnnnnnnnnnnnnnnnnnnnnnnnnnnnnnnnnnnnnnnnnnnnnnnnnnnnnnnnnnnnnnnnnnnnnnnnnnnnnnnnnnnnnnnnnnnnnnnnnnnnnnnnnnnnnnnnnnnnnnnnnnnnnnnnnnnnnnnnnnnnnnnnnnnnnnnnnnnnnnnnnnnnnnnnnnnnnnnnnnnnnnnnnnnnnnnnnnnnnnnnnnnnnnnnnnnnnnnnnnnnnnnnnnnnnnnnnnnnnnnnnnnnnnnnnnnnnnnnnnnnnnnnnnnnnnnnnnnnnnnnnnnnnnnnnnnnnnnnnnnnnnnnnnnnnnnnnnnnnnnnnnnnnnnnnnnnnnnnnnnnnnnnnnnnnnnnnnnnnnnnnnnnnnnnnnnnnnnnnnnnnnnnnnnnnnnnnnnnnnnnnnnnnnnnnnnnnnnnnnnnnnnnnnnnnnnnnnnnnnnnnnnnnnnnnnnnnnnnnnnnnnnnnnnnnnnnnnnnnnnnnnnnnnnnnnnnnnnnnnnnnnnnnnnnnnnnnnnnnnnnnnnnnnnnnnnnnnnnnnnnnnnnnnnnnnnnnnnnnnnnnnnnnnnnnnnnnnnnnnnnnnnnnnnnnnnnnnnnnnnnnnnnnnnnnnnnnnnnnnnnnnnnnnnnnnnnnnnnnnnnnnnnnnnnnnnnnnnnnnnnnnnnnnnnnnnnnnnnnnnnnnnnnnnnnnnnnnnnnnnnnnnnnnnnnnnnnnnnnnnnnnnnnnnnnnnnnnnnnnnnnnnnnnnnnnnnnnnnnnnnnnnnnnnnnnnnnnnnnnnnnnnnnnnnnnnnnnnnnnnnnnnnnnnnnnnnnnnnnnnnnnnnnnnnnnnnnnnnnnnnnnnnnnnnnnnnnnnnnnnnnnnnnnnnnnnnnnnnnnnnnnnnnnnnnnnnnnnnnnnnnnnnnnnnnnnnnnnnnnnnnnnnnnnnnnnnnnnnnnnnnnnnnnnnnnnnnnnnnnnnnnnnnnnnnnnnnnnnnnnnnnnnnnnnnnnnnnnnnnnnnnnnnnnnnnnnnnnnnnnnnnnnnnnnnnnnnnnnnnnnnnnnnnnnnnnnnnnnnnnnnnnnnnnnnnnnnnnnnnnnnnnnnnnnnnnnnnnnnnnnnnnnnnnnnnnnnnnnnnnnnnnnnnnnnnnnnnnnnnnnnnnnnnnnnnnnnnnnnnnnnnnnnnnnnnnnnnnnnnnnnnnnnnnnnnnnnnnnnnnnnnnnnnnnnnnnnnnnnnnnnnnnnnnnnnnnnnnnnnnnnnnnnnnnnnnnnnnnnnnnnnnnnnnnnnnnnnnnnnnnnnnnnnnnnnnnnnnnnnnnnnnnnnnnnnnnnnnnnnnnnnnnnnnnnnnnnnnnnnnnnnnnnnnnnnnnnnnnnnnnnnnnnnnnnnnnnnnnnnnnnnnnnnnnnnnnnnnnnnnnnnnnnnnnnnnnnnnnnnnnnnnnnnnnnnnnnnnnnnnnnnnnnnnnnnnnnnnnnnnnnnnnnnnnnnnnnnnnnnnnnnnnnnnnnnnnnnnnnnnnnnnnnnnnnnnnnnnnnnnnnnnnnnnnnnnnnnnnnnnnnnnnnnnnnnnnnnnnnnnnnnnnnnnnnnnnnnnnnnnnnnnnnnnnnnnnnnnnnnnnnnnnnnnnnnnnnnnnnnnnnnnnnnnnnnnnnnnnnnnnnnnnnnnnnnnnnnnnnnnnnnnnnnnnnnnnnnnnnnnnnnnnnnnnnnnnnnnnnnnnnnnnnnnnnnnnnnnnnnnnnnnnnnnnnnnnnnnnnnnnnnnnnnnnnnnnnnnnnnnnnnnnnnnnnnnnnnnnnnnnnnnnnnnnnnnnnnnnnnnnnnnnnnnnnnnnnnnnnnnnnnnnnnnnnnnnnnnnnnnnnnnnnnnnnnnnnnnnnnnnnnnnnnnnnnnnnnnnnnnnnnnnnnnnnnnnnnnnnnnnnnnnnnnnnnnnnnnnnnnnnnnnnnnnnnnnnnnnnnnnnnnnnnnnnnnnnnnnnnnnnnnnnnnnnnnnnnnnnnnnnnnnnnnnnnnnnnnnnnnnnnnnnnnnnnnnnnnnnnnnnnnnnnnnnnnnnnnnnnnnnnnnnnnnnnnnnnnnnnnnnnnnnnnnnnnnnnnnnnnnnnnnnnnnnnnnnnnnnnnnnnnnnnnnnnnnnnnnnnnnnnnnnnnnnnnnnnnnnnnnnnnnnnnnnnnnnnnnnnnnnnnnnnnnnnnnnnnnnnnnnnnnnnnnnnnnnnnnnnnnnnnnnnnnnnnnnnnnnnnnnnnnnnnnnnnnnnnnnnnnnnnnnnnnnnnnnnnnnnnnnnnnnnnnnnnnnnnnnnnnnnnnnnnnnnnnnnnnnnnnnnnnnnnnnnnnnnnnnnnnnnnnnnnnnnnnnnnnnnnnnnnnnnnnnnnnnnnnnnnnnnnnnnnnnnnnnnnnnnnnnnnnnnnnnnnnnnnnnnnnnnnnnnnnnnnnnnnnnnnnnnnnnnnnnnnnnnnnnnnnnnnnnnnnnnnnnnnnnnnnnnnnnnnnnnnnnnnnnnnnnnnnnnnnnnnnnnnnnnnnnnnnnnnnnnnnnnnnnnnnnnnnnnnnnnnnnnnnnnnnnnnnnnnnnnnnnnnnnnnnnnnnnnnnnnnnnnnnnnnnnnnnnnnnnnnnnnnnnnnnnnnnnnnnnnnnnnnnnnnnnnnnnnnnnnnnnnnnnnnnnnnnnnnnnnnnnnnnnnnnnnnnnnnnnnnnnnnnnnnnnnnnnnnnnnnnnnnnnnnnnnnnnnnnnnnnnnnnnnnnnnnnnnnnnnnnnnnnnnnnnnnnnnnnnnnnnnnnnnnnnnnnnnnnnnnnnnnnnnnnnnnnnnnnnnnnnnnnnnnnnnnnnnnnnnnnnnnnnnnnnnnnnnnnnnnnnnnnnnnnnnnnnnnnnnnnnnnnnnnnnnnnnnnnnnnnnnnnnnnnnnnnnnnnnnnnnnnnnnnnnnnnnnnnnnnnnnnnnnnnnnnnnnnnnnnnnnnnnnnnnnnnnnnnnnnnnnnnnnnnnnnnnnnnnnnnnnnnnnnnnnnnnnnnnnnnnnnnnnnnnnnnnnnnnnnnnnnnnnnnnnnnnnnnnnnnnnnnnnnnnnnnnnnnnnnnnnnnnnnnnnnnnnnnnnnnnnnnnnnnnnnnnnnnnnnnnnnnnnnnnnnnnnnnnnnnnnnnnnnnnnnnnnnnnnnnnnnnnnnnnnnnnnnnnnnnnnnnnnnnnnnnnnnnnnnnnnnnnnnnnnnnnnnnnnnnnnnnnnnnnnnnnnnnnnnnnnnnnnnnnnnnnnnnnnnnnnnnnnnnnnnnnnnnnnnnnnnnnnnnnnnnnnnnnnnnnnnnnnnnnnnnnnnnnnnnnnnnnnnnnnnnnnnnnnnnnnnnnnnnnnnnnnnnnnnnnnnnnnnnnnnnnnnnnnnnnnnnnnnnnnnnnnnnnnnnnnnnnnnnnnnnnnnnnnnnnnnnnnnnnnnnnnnnnnnnnnnnnnnnnnnnnnnnnnnnnnnnnnnnnnnnnnnnnnnnnnnnnnnnnnnnnnnnnnnnnnnnnnnnnnnnnnnnnnnnnnnnnnnnnnnnnnnnnnnnnnnnnnnnnnnnnnnnnnnnnnnnnnnnnnnnnnnnnnnnnnnnnnnnnnnnnnnnnnnnnnnnnnnnnnnnnnnnnnnnnnnnnnnnnnnnnnnnnnnnnnnnnnnnnnnnnnnnnnnnnnnnnnnnnnnnnnnnnnnnnnnnnnnnnnnnnnnnnnnnnnnnnnnnnnnnnnnnnnnnnnnnnnnnnnnnnnnnnnnnnnnnnnnnnnnnnnnnnnnnnnnnnnnnnnnnnnnnnnnnnnnnnnnnnnnnnnnnnnnnnnnnnnnnnnnnnnnnnnnnnnnnnnnnnnnnnnnnnnnnnnnnnnnnnnnnnnnnnnnnnnnnnnnnnnnnnnnnnnnnnnnnnnnnnnnnnnnnnnnnnnnnnnnnnnnnnnnnnnnnnnnnnnnnnnnnnnnnnnnnnnnnnnnnnnnnnnnnnnnnnnnnnnnnnnnnnnnnnnnnnnnnnnnnnnnnnnnnnnnnnnnnnnnnnnnnnnnnnnnnnnnnnnnnnnnnnnnnnnnnnnnnnnnnnnnnnnnnnnnnnnnnnnnnnnnnnnnnnnnnnnnnnnnnnnnnnnnnnnnnnnnnnnnnnnnnnnnnnnnnnnnnnnnnnnnnnnnnnnnnnnnnnnnnnnnnnnnnnnnnnnnnnnnnnnnnnnnnnnnnnnnnnnnnnnnnnnnnnnnnnnnnnnnnnnnnnnnnnnnnnnnnnnnnnnnnnnnnnnnnnnnnnnnnnnnnnnnnnnnnnnnnnnnnnnnnnnnnnnnnnnnnnnnnnnnnnnnnnnnnnnnnnnnnnnnnnnnnnnnnnnnnnnnnnnnnnnnnnnnnnnnnnnnnnnnnnnnnnnnnnnnnnnnnnnnnnnnnnnnnnnnnnnnnnnnnnnnnnnnnnnnnnnnnnnnnnnnnnnnnnnnnnnnnnnnnnnnnnnnnnnnnnnnnnnnnnnnnnnnnnnnnnnnnnnnnnnnnnnnnnnnnnnnnnnnnnnnnnnnnnnnnnnnnnnnnnnnnnnnnnnnnnnnnnnnnnnnnnnnnnnnnnnnnnnnnnnnnnnnnnnnnnnnnnnnnnnnnnnnnnnnnnnnnnnnnnnnnnnnnnnnnnnnnnnnnnnnnnnnnnnnnnnnnnnnnnnnnnnnnnnnnnnnnnnnnnnnnnnnnnnnnnnnnnnnnnnnnnnnnnnnnnnnnnnnnnnnnnnnnnnnnnnnnnnnnnnnnnnnnnnnnnnnnnnnnnnnnnnnnnnnnnnnnnnnnnnnnnnnnnnnnnnnnnnnnnnnnnnnnnnnnnnnnnnnnnnnnnnnnnnnnnnnnnnnnnnnnnnnnnnnnnnnnnnnnnnnnnnnnnnnnnnnnnnnnnnnnnnnnnnnnnnnnnnnnnnnnnnnnnnnnnnnnnnnnnnnnnnnnnnnnnnnnnnnnnnnnnnnnnnnnnnnnnnnnnnnnnnnnnnnnnnnnnnnnnnnnnnnnnnnnnnnnnnnnnnnnnnnnnnnnnnnnnnnnnnnnnnnnnnnnnnnnnnnnnnnnnnnnnnnnnnnnnnnnnnnnnnnnnnnnnnnnnnnnnnnnnnnnnnnnnnnnnnnnnnnnnnnnnnnnnnnnnnnnnnnnnnnnnnnnnnnnnnnnnnnnnnnnnnnnnnnnnnnnnnnnnnnnnnnnnnnnnnnnnnnnnnnnnnnnnnnnnnnnnnnnnnnnnnnnnnnnnnnnnnnnnnnnnnnnnnnnnnnnnnnnnnnnnnnnnnnnnnnnnnnnnnnnnnnnnnnnnnnnnnnnnnnnnnnnnnnnnnnnnnnnnnnnnnnnnnnnnnnnnnnnnnnnnnnnnnnnnnnnnnnnnnnnnnnnnnnnnnnnnnnnnnnnnnnnnnnnnnnnnnnnnnnnnnnnnnnnnnnnnnnnnnnnnnnnnnnnnnnnnnnnnnnnnnnnnnnnnnnnnnnnnnnnnnnnnnnnnnnnnnnnnnnnnnnnnnnnnnnnnnnnnnnnnnnnnnnnnnnnnnnnnnnnnnnnnnnnnnnnnnnnnnnnnnnnnnnnnnnnnnnnnnnnnnnnnnnnnnnnnnnnnnnnnnnnnnnnnnnnnnnnnnnnnnnnnnnnnnnnnnnnnnnnnnnnnnnnnnnnnnnnnnnnnnnnnnnnnnnnnnnnnnnnnnnnnnnnnnnnnnnnnnnnnnnnnnnnnnnnnnnnnnnnnnnnnnnnnnnnnnnnnnnnnnnnnnnnnnnnnnnnnnnnnnnnnnnnnnnnnnnnnnnnnnnnnnnnnnnnnnnnnnnnnnnnnnnnnnnnnnnnnnnnnnnnnnnnnnnnnnnnnnnnnnnnnnnnnnnnnnnnnnnnnnnnnnnnnnnnnnnnnnnnnnnnnnnnnnnnnnnnnnnnnnnnnnnnnnnnnnnnnnnnnnnnnnnnnnnnnnnnnnnnnnnnnnnnnnnnnnnnnnnnnnnnnnnnnnnnnnnnnnnnnnnnnnnnnnnnnnnnnnnnnnnnnnnnnnnnnnnnnnnnnnnnnnnnnnnnnnnnnnnnnnnnnnnnnnnnnnnnnnnnnnnnnnnnnnnnnnnnnnnnnnnnnnnnnnnnnnnnnnnnnnnnnnnnnnnnnnnnnnnnnnnnnnnnnnnnnnnnnnnnnnnnnnnnnnnnnnnnnnnnnnnnnnnnnnnnnnnnnnnnnnnnnnnnnnnnnnnnnnnnnnnnnnnnnnnnnnnnnnnnnnnnnnnnnnnnnnnnnnnnnnnnnnnnnnnnnnnnnnnnnnnnnnnnnnnnnnnnnnnnnnnnnnnnnnnnnnnnnnnnnnnnnnnnnnnnnnnnnnnnnnnnnnnnnnnnnnnnnnnnnnnnnnnnnnnnnnnnnnnnnnnnnnnnnnnnnnnnnnnnnnnnnnnnnnnnnnnnnnnnnnnnnnnnnnnnnnnnnnnnnnnnnnnnnnnnnnnnnnnnnnnnnnnnnnnnnnnnnnnnnnnnnnnnnnnnnnnnnnnnnnnnnnnnnnnnnnnnnnnnnnnnnnnnnnnnnnnnnnnnnnnnnnnnnnnnnnnnnnnnnnnnnnnnnnnnnnnnnnnnnnnnnnnnnnnnnnnnnnnnnnnnnnnnnnnnnnnnnnnnnnnnnnnnnnnnnnnnnnnnnnnnnnnnnnnnnnnnnnnnnnnnnnnnnnnnnnnnnnnnnnnnnnnnnnnnnnnnnnnnnnnnnnnnnnnnnnnnnnnnnnnnnnnnnnnnnnnnnnnnnnnnnnnnnnnnnnnnnnnnnnnnnnnnnnnnnnnnnnnnnnnnnnnnnnnnnnnnnnnnnnnnnnnnnnnnnnnnnnnnnnnnnnnnnnnnnnnnnnnnnnnnnnnnnnnnnnnnnnnnnnnnnnnnnnnnnnnnnnnnnnnnnnnnnnnnnnnnnnnnnnnnnnnnnnnnnnnnnnnnnnnnnnnnnnnnnnnnnnnnnnnnnnnnnnnnnnnnnnnnnnnnnnnnnnnnnnnnnnnnnnnnnnnnnnnnnnnnnnnnnnnnnnnnnnnnnnnnnnnnnnnnnnnnnnnnnnnnnnnnnnnnnnnnnnnnnnnnnnnnnnnnnnnnnnnnnnnnnnnnnnnnnnnnnnnnnnnnnnnnnnnnnnnnnnnnnnnnnnnnnnnnnnnnnnnnnnnnnnnnnnnnnnnnnnnnnnnnnnnnnnnnnnnnnnnnnnnnnnnnnnnnnnnnnnnnnnnnnnnnnnnnnnnnnnnnnnnnnnnnnnnnnnnnnnnnnnnnnnnnnnnnnnnnnnnnnnnnnnnnnnnnnnnnnnnnnnnnnnnnnnnnnnnnnnnnnnnnnnnnnnnnnnnnnnnnnnnnnnnnnnnnnnnnnnnnnnnnnnnnnnnnnnnnnnnnnnnnnnnnnnnnnnnnnnnnnnnnnnnnnnnnnnnnnnnnnnnnnnnnnnnnnnnnnnnnnnnnnnnnnnnnnnnnnnnnnnnnnnnnnnnnnnnnnnnnnnnnnnnnnnnnnnnnnnnnnnnnnnnnnnnnnnnnnnnnnnnnnnnnnnnnnnnnnnnnnnnnnnnnnnnnnnnnnnnnnnnnnnnnnnnnnnnnnnnnnnnnnnnnnnnnnnnnnnnnnnnnnnnnnnnnnnnnnnnnnnnnnnnnnnnnnnnnnnnnnnnnnnnnnnnnnnnnnnnnnnnnnnnnnnnnnnnnnnnnnnnnnnnnnnnnnnnnnnnnnnnnnnnnnnnnnnnnnnnnnnnnnnnnnnnnnnnnnnnnnnnnnnnnnnnnnnnnnnnnnnnnnnnnnaaactatgaggattaccaaattcagacttaaaatataataaaatacaattaacatcaaaactcaaatggtaaataatttaaatttttatgcctctggataataataaattagtactaaccaggtaaagtgataaaatatcaaggtaactgatttctgggtgctagaatgtcagataaattcattacaatgatataagtacccatggttatatcataaacaaccactaatcctgaaggtttgatacaggaatttatgtattttttttttttaagttttaacctgtgttttccaagcacatcatctgccaaacccttttttactcacaaaggacttctatcccataagagaaagaaaacagaaatggaaaagcaataagccttccatagacactgctgggagatacataactttttctctaaccattacatgtcaaaccaatggaacaggtgattctaaatcaaagatttagcatggtactacaatcacccgagtgtggtctccatgccaactcaaatgcacaagagggagagaactctatagcaaattagggacattttttatatgacctgattcagaatataaagagggaaggaaaagtcataggagctattttctacccagtgatcccaaataattttaatgagttattctttttcttggtcttaagtctttttattcctgcccatctcttatttctgctcaacatttatagagcatttagatatttttgcaagctttaactggtatatttttacacgatttcaatgcagtggcaaagcactgttggcctcatttaatagctgagaaacagaaaggttaatatcttactcaaggcccttcttgaagtcagtaataaattcaagatttgagctctgaattttaatactataattagccaaagtccactgggccatgaagtttactagaaagccaatctaagggctccttattattttctgagttgttccacattaatgtaaatatgcagcattatacgtataattcaaatgattttaccttgaggagttgttaacaacattttaaaaaactgctcagtagatgtttctgttcaccttgaagatgaactttctacagaactccttgctacttggcaacttctagatgtgtggctacgaatgaagcatggtcatccactcaaaatgggtggagggcaatgttggaggagcagatctggaatatgactgtaacaaagctcaaaacataatcaaatatatagtgatagtctctgtcagaacaaactattttttttttttttgagacggagtctcactctgttgcccaggctggagtgcagtggggtgatctcggcttactgcaagctccgcctcctgggttcacaccattctcctgcctcagcctccctagtagctgggaccacaggcgcccgccaccacgcccagctaattttttgtatttttagtagagacggggtttcaccgtgttagccaggatggtctcgatctcctgacctcatgatccacctgcctcggcctcccaaagtgctgggattacaggcgtgagccaccgtacccggccaaaagaaactatttttaacatgaggtttaaaatggtccacattattaaatctccacaaggagataaataagaattaaaaataccagggcaccctgccctctagttgagaatctctgtgtcaatgaaccactgtgtctggtggagtttggcacatcctcaagtgcttggggacagaaaaagacaactaccagattacaaaaaaattcagaaatgggttatccaaagagcaattatttgtcagagttttcccagtaccatgaaaggtaaggagacattggatttcacagtatgtaatcaatactcaaatcactagaaaggtatattttgcagtgggatgccagtttggtaagactttccattaccactttgaagtaaattccctttccttgtgattccctgctcaccaaatgaagctctgattactaattctatcacttaggtatctaggtcctgagaatgatgcacaccggataatgtaaacacagtccctagaaacacctgttacccactgaaaattagtttaagatcattttggtttatgtattagtgttctgattttggctactctgagctatttcccaaaagtctgatcaactctgaaggagctaacaaaatagtttctagacctgcaaagccaagaaatagattgggcaagcgatgtctaacccccactgtgacatcaccttcattgctcaccatctcaagcaggtccatctgaatctctgtgccctgttccaggaattgcaccatgagccagcatagaaaacaaagtatactttctggattaccactgagtacctatgtcttcctgatatctaagcagtcaacatctattagtcatctgttgggtatttccatgctagaaatgcatgctgaagaatacagtctagaaaaataaaatatatacacaaataacataaaaatcactgtatttatgcataaacaataacatatattcagttacatctctactgttcatgaaacttttctctctcacactccaagtaacttatagctgaattttcgaattcttttgaccacactacatagtaagactttttacctcacaacctagaactcaaagtttcacaaaacctgcagacttgctaggatctgctattttcttctgaaacagactttaagcttgaatagcatttcctactcttgtctctaatttttctcttaaatgctaataatgacctactaagtttatttcttgacccactagttgatcaccatccacacctgaaaaacaaaaatgctgctttaaggcctggagatgcagctccccattgctatttcctttctcctttctccaaaaacccccgctccttggaagcacgtgtctgctcaccttcctcattgggactatctaaccacaactcagtcactcctactcatttacagatgactttttttacttggccaacttcgtctagtatactaagatggaacaggtggttctaaatcaaagatttagtatggtactacaatcaccccagagtgttgtcatcatgctaactcaaacacaagagagagaactttttaaaacctaaatcaccattctctccaccacaactgctgacaatttttgatgacataaacatccaaatagaacatctcggtttcctgagttccaactaccacttcctcctccactctttctcaactacccactcatgtagtcttgctctagactttcttattccagaataatttttaaaacatggtgtagagccaatcacccagccaacctcagcctagattagttgatcctcagccaatctgcaaatccgtaagaataaatgatttttttattaagccactgagctttggcatactttgttctgtggcatttttgtggcaatagctaactaacacattcatcatctctatactaagtattaagtggtttaacatggctgaagaaaatcacacaaccattctacctgatatttatgactgcgaatctcaaatgagctcccaatatggcctgacaattcgactacacttcactagtaaattcatcttcatcctttgcaagacaatgatttatcatgtttagttcaaatctccagcatccctcttcctcatcttccttttggctaattacttgccacagcctttataattatatgcaagctgataaaatacctacctttccaccatccaagccactaacttgtatctgacaacaacacagtctgccttctctctggttaacagagaagttttcctgctcccatctaaggtaaaccccttcattttgttttagatgccaacccctctcacttttgcaattataccctttgtttctttctcccctttatcacatcaactttcgcttttctactaggttattctaattaacataaaaaatgctttaaaatattacccatcaaaaaacaaaacaaaacaaacaaacaaaaacacccttaaactcatcatccccttcagccagcacattctctcccctttcatagcaaagggcattaaaagaactttcggtactctctgagtccacttattcttagtccactccaaaccagttttcattctcaccatcacctctacatagcttttcccaaggtcactaatgaccagtgtgaccatataatttatcatccacactggaacatttctgagtaaagtaaacactaatcagacaagacaccagattagcaggcataaaataggactgtctcaggcaaacgaatgtaatgacacctacactgatatggctcaattcactttcttgacctatcaagaacatctgacacagccaaacactgtctccttgaagcaccttcttctctagaactagcattctgtgacaccacatacacctgcttttcctcctacatcaccagtactccatctccctcatctgctcatctaaaatctggaatgccccagattatgtctttggcttgcttgctttctctgtctacactacctcttaaagtgacctcatccacttcaatatgccaccaatacaccaaatctacctccctaacctgacccttcccatcacagaaccaacctattcagcatctccacttgtaagcccaactggtaaaagttaacacaaccaaaatagaaccattaattcccaccaccccaaaaatatgtccccatcccatgtcttcaccatctcagacaacagnnnnnnnnnnnnnnnnnnnnnnnnnnnnnnnnnnnnnnnnnnnnnnnnnnnnnnnnnnnnnnnnnnnnnnnnnnnnnnnnnnnnnnnnnnnnnnnnnnnnnnnnnnnnnnnnnnnnnnnnnnnnnnnnnnnnnnnnnnnnnnnnnnnnnnnnnnnnnnnnnnnnnnnnnnnnnnnnnnnnnnnnnnnnnnnnnnnnnnnnnnnnnnnnnnnnnnnnnnnnnnnnnnnnnnnnnnnnnnnnnnnnnnnnnnnnnnnnnnnnnnnnnnnnnnnnnnnnnnnnnnnnnnnnnnnnnnnnnnnnnnnnnnnnnnnnnnnnnnnnnnnnnnnnnnnnnnnnnnnnnnnnnnnnnnnnnnnnnnnnnnnnnnnnnnnnnnnnnnnnnnnnnnnnnnnnnnnnnnnnnnnnnnnnnnnnnnnnnnnnnnnnnnnnnnnnnnnnnnnnnnnnnnnnnnnnnnnnnnnnnnnnnnnnnnnnnnnnnnnnnnnnnnnnnnnnnnnnnnnnnnnnnnnnnnnnnnnnnnnnnnnnnnnnnnnnnnnnnnnnnnnnnnnnnnnnnnnnnnnnnnnnnnnnnnnnnnnnnnnnnnnnnnnnnnnnnnnnnnnnnnnnnnnnnnnnnnnnnnnnnnnnnnnnnnnnnnnnnnnnnnnnnnnnnnnnnnnnnnnnnnnnnnnnnnnnnnnnnnnnnnnnnnnnnnnnnnnnnnnnnnnnnnnnnnnnnnnnnnnnnnnnnnnnnnnnnnnnnnnnnnnnnnnnnnnnnnnnnnnnnnnnnnnnnnnnnnnnnnnnnnnnnnnnnnnnnnnnnnnnnnnnnnnnnnnnnnnnnnnnnnnnnnnnnnnnnnnnnnnnnnnnnnnnnnnnnnnnnnnnnnnnnnnnnnnnnnnnnnnnnnnnnnnnnnnnnnnnnnnnnnnnnnnnnnnnnnnnnnnnnnnnnnnnnnnnnnnnnnnnnnnnnnnnnnnnnnnnnnnnnnnnnnnnnnnnnnnnnnnnnnnnnnnnnnnnnnnnnnnnnnnnnnnnnnnnnnnnnnnnnnnnnnnnnnnnnnnnnnnnnnnnnnnnnnnnnnnnnnnnnnnnnnnnnnnnnnnnnnnnnnnnnnnnnnnnnnnnnnnnnnnnnnnnnnnnnnnnnnnnnnnnnnnnnnnnnnnnnnnnnnnnnnnnnnnnnnnnnnnnnnnnnnnnnnnnnnnnnnnnnnnnnnnnnnnnnnnnnnnnnnnnnnnnnnnnnnnnnnnnnnnnnnnnnnnnnnnnnnnnnnnnnnnnnnnnnnnnnnnnnnnnnnnnnnnnnnnnnnnnnnnnnnnnnnnnnnnnnnnnnnnnnnnnnnnnnnnnnnnnnnnnnnnnnnnnnnnnnnnnnnnnnnnnnnnnnnnnnnnnnnnnnnnnnnnnnnnnnnnnnnnnnnnnnnnnnnnnnnnnnnnnnnnnnnnnnnnnnnnnnnnnnnnnnnnnnnnnnnnnnnnnnnnnnnnnnnnnnnnnnnnnnnnnnnnnnnnnnnnnnnnnnnnnnnnnnnnnnnnnnnnnnnnnnnnnnnnnnnnnnnnnnnnnnnnnnnnnnnnnnnnnnnnnnnnnnnnnnnnnnnnnnnnnnnnnnnnnnnnnnnnnnnnnnnnnnnnnnnnnnnnnnnnnnnnnnnnnnnnnnnnnnnnnnnnnnnnnnnnnnnnnnnnnnnnnnnnnnnnnnnnnnnnnnnnnnnnnnnnnnnnnnnnnnnnnnnnnnnnnnnnnnnnnnnnnnnnnnnnnnnnnnnnnnnnnnnnnnnnnnnnnnnnnnnnnnnnnnnnnnnnnnnnnnnnnnnnnnnnnnnnnnnnnnnnnnnnnnnnnnnnnnnnnnnnnnnnnnnnnnnnnnnnnnnnnnnnnnnnnnnnnnnnnnnnnnnnnnnnnnnnnnnnnnnnnnnnnnnnnnnnnnnnnnnnnnnnnnnnnnnnnnnnnnnnnnnnnnnnnnnnnnnnnnnnnnnnnnnnnnnnnnnnnnnnnnnnnnnnnnnnnnnnnnnnnnnnnnnnnnnnnnnnnnnnnnnnnnnnnnnnnnnnnnnnnnnnnnnnnnnnnnnnnnnnnnnnnnnnnnnnnnnnnnnnnnnnnnnnnnnnnnnnnnnnnnnnnnnnnnnnnnnnnnnnnnnnnnnnnnnnnnnnnnnnnnnnnnnnnnnnnnnnnnnnnnnnnnnnnnnnnnnnnnnnnnnnnnnnnnnnnnnnnnnnnnnnnnnnnnnnnnnnnnnnnnnnnnnnnnnnnnnnnnnnnnnnnnnnnnnnnnnnnnnnnnnnnnnnnnnnnnnnnnnnnnnnnnnnnnnnnnnnnnnnnnnnnnnnnnnnnnnnnnnnnnnnnnnnnnnnnnnnnnnnnnnnnnnnnnnnnnnnnnnnnnnnnnnnnnnnnnnnnnnnnnnnnnnnnnnnnnnnnnnnnnnnnnnnnnnnnnnnnnnnnnnnnnnnnnnnnnnnnnnnnnnnnnnnnnnnnnnnnnnnnnnnnnnnnnnnnnnnnnnnnnnnnnnnnnnnnnnnnnnnnnnnnnnnnnnnnnnnnnnnnnnnnnnnnnnnnnnnnnnnnnnnnnnnnnnnnnnnnnnnnnnnnnnnnnnnnnnnnnnnnnnnnnnnnnnnnnnnnnnnnnnnnnnnnnnnnnnnnnnnnnnnnnnnnnnnnnnnnnnnnnnnnnnnnnnnnnnnnnnnnnnnnnnnnnnnnnnnnnnnnnnnnnnnnnnnnnnnnnnnnnnnnnnnnnnnnnnnnnnnnnnnnnnnnnnnnnnnnnnnnnnnnnnnnnnnnnnnnnnnnnnnnnnnnnnnnnnnnnnnnnnnnnnnnnnnnnnnnnnnnnnnnnnnnnnnnnnnnnnnnnnnnnnnnnnnnnnnnnnnnnnnnnnnnnnnnnnnnnnnnnnnnnnnnnnnnnnnnnnnnnnnnnnnnnnnnnnnnnnnnnnnnnnnnnnnnnnnnnnnnnnnnnnnnnnnnnnnnnnnnnnnnnnnnnnnnnnnnnnnnnnnnnnnnnnnnnnnnnnnnnnnnnnnnnnnnnnnnnnnnnnnnnnnnnnnnnnnnnnnnnnnnnnnnnnnnnnnnnnnnnnnnnnnnnnnnnnnnnnnnnnnnnnnnnnnnnnnnnnnnnnnnnnnnnnnnnnnnnnnnnnnnnnnnnnnnnnnnnnnnnnnnnnnnnnnnnnnnnnnnnnnnnnnnnnnnnnnnnnnnnnnnnnnnnnnnnnnnnnnnnnnnnnnnnnnnnnnnnnnnnnnnnnnnnnnnnnnnnnnnnnnnnnnnnnnnnnnnnnnnnnnnnnnnnnnnnnnnnnnnnnnnnnnnnnnnnnnnnnnnnnnnnnnnnnnnnnnnnnnnnnnnnnnnnnnnnnnnnnnnnnnnnnnnnnnnnnnnnnnnnnnnnnnnnnnnnnnnnnnnnnnnnnnnnnnnnnnnnnnnnnnnnnnnnnnnnnnnnnnnnnnnnnnnnnnnnnnnnnnnnnnnnnnnnnnnnnnnnnnnnnnnnnnnnnnnnnnnnnnnnnnnnnnnnnnnnnnnnnnnnnnnnnnnnnnnnnnnnnnnnnnnnnnnnnnnnnnnnnnnnnnnnnnnnnnnnnnnnnnnnnnnnnnnnnnnnnnnnnnnnnnnnnnnnnnnnnnnnnnnnnnnnnnnnnnnnnnnnnnnnnnnnnnnnnnnnnnnnnnnnnnnnnnnnnnnnnnnnnnnnnnnnnnnnnnnnnnnnnnnnnnnnnnnnnnnnnnnnnnnnnnnnnnnnnnnnnnnnnnnnnnnnnnnnnnnnnnnnnnnnnnnnnnnnnnnnnnnnnnnnnnnnnnnnnnnnnnnnnnnnnnnnnnnnnnnnnnnnnnnnnnnnnnnnnnnnnnnnnnnnnnnnnnnnnnnnnnnnnnnnnnnnnnnnnnnnnnnnnnnnnnnnnnnnnnnnnnnnnnnnnnnnnnnnnnnnnnnnnnnnnnnnnnnnnnnnnnnnnnnnnnnnnnnnnnnnnnnnnnnnnnnnnnnnnnnnnnnnnnnnnnnnnnnnnnnnnnnnnnnnnnnnnnnnnnnnnnnnnnnnnnnnnnnnnnnnnnnnnnnnnnnnnnnnnnnnnnnnnnnnnnnnnnnnnnnnnnnnnnnnnnnnnnnnnnnnnnnnnnnnnnnnnnnnnnnnnnnnnnnnnnnnnnnnnnnnnnnnnnnnnnnnnnnnnnnnnnnnnnnnnnnnnnnnnnnnnnnnnnnnnnnnnnnnnnnnnnnnnnnnnnnnnnnnnnnnnnnnnnnnnnnnnnnnnnnnnnnnnnnnnnnnnnnnnnnnnnnnnnnnnnnnnnnnnnnnnnnnnnnnnnnnnnnnnnnnnnnnnnnnnnnnnnnnnnnnnnnnnnnnnnnnnnnnnnnnnnnnnnnnnnnnnnnnnnnnnnnnnnnnnnnnnnnnnnnnnnnnnnnnnnnnnnnnnnnnnnnnnnnnnnnnnnnnnnnnnnnnnnnnnnnnnnnnnnnnnnnnnnnnnnnnnnnnnnnnnnnnnnnnnnnnnnnnnnnnnnnnnnnnnnnnnnnnnnnnnnnnnnnnnnnnnnnnnnnnnnnnnnnnnnnnnnnnnnnnnnnnnnnnnnnnnnnnnnnnnnnnnnnnnnnnnnnnnnnnnnnnnnnnnnnnnnnnnnnnnnnnnnnnnnnnnnnnnnnnnnnnnnnnnnnnnnnnnnnnnnnnnnnnnnnnnnnnnnnnnnnnnnnnnnnnnnnnnnnnnnnnnnnnnnnnnnnnnnnnnnnnnnnnnnnnnnnnnnnnnnnnnnnnnnnnnnnnnnnnnnnnnnnnnnnnnnnnnnnnnnnnnnnnnnnnnnnnnnnnnnnnnnnnnnnnnnnnnnnnnnnnnnnnnnnnnnnnnnnnnnnnnnnnnnnnnnnnnnnnnnnnnnnnnnnnnnnnnnnnnnnnnnnnnnnnnnnnnnnnnnnnnnnnnnnnnnnnnnnnnnnnnnnnnnnnnnnnnnnnnnnnnnnnnnnnnnnnnnnnnnnnnnnnnnnnnnnnnnnnnnnnnnnnnnnnnnnnnnnnnnnnnnnnnnnnnnnnnnnnnnnnnnnnnnnnnnnnnnnnnnnnnnnnnnnnnnnnnnnnnnnnnnnnnnnnnnnnnnnnnnnnnnnnnnnnnnnnnnnnnnnnnnnnnnnnnnnnnnnnnnnnnnnnnnnnnnnnnnnnnnnnnnnnnnnnnnnnnnnnnnnnnnnnnnnnnnnnnnnnnnnnnnnnnnnnnnnnnnnnnnnnnnnnnnnnnnnnnnnnnnnnnnnnnnnnnnnnnnnnnnnnnnnnnnnnnnnnnnnnnnnnnnnnnnnnnnnnnnnnnnnnnnnnnnnnnnnnnnnnnnnnnnnnnnnnnnnnnnnnnnnnnnnnnnnnnnnnnnnnnnnnnnnnnnnnnnnnnnnnnnnnnnnnnnnnnnnnnnnnnnnnnnnnnnnnnnnnnnnnnnnnnnnnnnnnnnnnnnnnnnnnnnnnnnnnnnnnnnnnnnnnnnnnnnnnnnnnnnnnnnnnnnnnnnnnnnnnnnnnnnnnnnnnnnnnnnnnnnnnnnnnnnnnnnnnnnnnnnnnnnnnnnnnnnnnnnnnnnnnnnnnnnnnnnnnnnnnnnnnnnnnnnnnnnnnnnnnnnnnnnnnnnnnnnnnnnnnnnnnnnnnnnnnnnnnnnnnnnnnnnnnnnnnnnnnnnnnnnnnnnnnnnnnnnnnnnnnnnnnnnnnnnnnnnnnnnnnnnnnnnnnnnnnnnnnnnnnnnnnnnnnnnnnnnnnnnnnnnnnnnnnnnnnnnnnnnnnnnnnnnnnnnnnnnnnnnnnnnnnnnnnnnnnnnnnnnnnnnnnnnnnnnnnnnnnnnnnnnnnnnnnnnnnnnnnnnnnnnnnnnnnnnnnnnnnnnnnnnnnnnnnnnnnnnnnnnnnnnnnnnnnnnnnnnnnnnnnnnnnnnnnnnnnnnnnnnnnnnnnnnnnnnnnnnnnnnnnnnnnnnnnnnnnnnnnnnnnnnnnnnnnnnnnnnnnnnnnnnnnnnnnnnnnnnnnnnnnnnnnnnnnnnnnnnnnnnnnnnnnnnnnnnnnnnnnnnnnnnnnnnnnnnnnnnnnnnnnnnnnnnnnnnnnnnnnnnnnnnnnnnnnnnnnnnnnnnnnnnnnnnnnnnnnnnnnnnnnnnnnnnnnnnnnnnnnnnnnnnnnnnnnnnnnnnnnnnnnnnnnnnnnnnnnnnnnnnnnnnnnnnnnnnnnnnnnnnnnttctgaaaggctgtgatgactaatatttcaggactggaacatgatagttattaaaagaaacatgagaggtgttctcctaattcctaataggcccatgtccccaccacaagaactactacaaacaacattcagggctgaattcacacagtttagtctctaaggcctaaatgagttttctcaattttctcccatgtggcccattatgtgaatcaaagaaatcagtaattcatttgttgaaggtcaaatataaggacataatgaggcccatgcactaaaatgaataaaaagaatgaacaaaaagaaaccaagataaactcttgttgaaaacaatgccccagaatctagcaaatagtctaaatgtacctaaaagaccagaacgagatgacatattagttcagtgatctcatgacatataccaaacactttcttccatgttaaaaaaaaaaaaaaaaagttcatctagcatctgatgcatacatttrgaaacaacyccaatattgaccaaggtttttcaaatgccttacctcayaactggaacttctaagcaaaagctaatgaggccatctgggaaagatcaccaggaggccttactactgccagtatttcacatggaacaatcgatagcatgtcttaacaagtgcaaagatttcagtctccgaattcattctgtagcatatttcaactagttagcagggataaggattgagccaacaacttcctatttgtgcaagtagaatttaaagattatttcttaagaatttagtcctagttatttttgttgtcctcaaaacacagtgtccctgttagaaggaatataaataaacacacattttcagatggcaatttggcattgctatcaaaaaattaatatatgcatgtactctttgatccaccaattccattttgaggaatccagcttataaaatttggggatgcaaatataaaaatgttcactcattgcactgtttttataaaggtgaaaaatcatacatatatatatayagctgattaacatgagttagacccatatacactaatgtgtgaagacccctaagacactgttcagttcaaaaagcaagtttcagaacaagtatagtatttcttatgtaaaaaaattgtgtgtacgtttgtgtgaataaatgcatggaaaacagtctgaagggattcacagtatataacagaagctgccctctagagaagaagaagtgaatcaatgtatgtggactggggtaggttcgaagagaaggtccgttttctaaagagggattttcaccttttactccacacccatctgtattatttaaacatttatgtaacacacataaaacatttgttctttatagaaaataagatgcaatatcaacttttacctaaactccagaatcacttaaagaggatgctcaaatagtaaaacaaagaataggctgggcatatggtggttcacacctataatcccagcactttgggaggctgaagagggcggatcacttgagcccaagagtttgagatcagcctggggaacacagtgagacctctctacaaaaaaataagaaaattagctgggcatagtggcacacgcctgtagtcccagccaagtagctgggaggctgcagcgggaggactccttgagcctaggaggtcgaggctgcatgatccatgatcacaccaccacacaccaccctgagagacagaccaagatcgggtatcaaaaaaaaaaaaaaaaagacagaaataaaaaatattggcagtcaaaaacatactttgtagactatatccttccaaggaataaagaaaaattgtgggcagcatcaatcaacagttataaatgaatatgacagtgttttcatgaaagaacaagcatcattcagagaactaaaggatttgtatctcagatcttaaggaatataaaagatactgaactcagaaacattactaaaaaggtgtaatcattccaaatattttttagaaatacaatttkcacaatgaatcctattattttggtgcaaattgtatactgtgtgggtgtgctttttttattwaaaaaactgtatgcataaaaagctagatggtgtgaagtgtttactcttacctgtacattttcttctgtaacctgaatttctgcagtgtaaacataatcaattagcatcctcagggtccagccatctacctcttttattctaactctctttgctcggctctcactcatctcacctaaaacacaaaggaataagagtgatgttacagcaagacactgctgtggaagttccaatgccaatgtagattgatacatcttcttgccactcactgtattcaacaggcagcataatcagccactttttgcaggccgaaaatactscccccttcctcttccaaaagctcacctgagcaaatcataaaatgtrcttttgttacccacttgcacctgaaaatcrtatcacaacaatgaacgtgccatatgtccagctgcatgaactattcttgtggctataggatcagtagctgaggctgtccctgcttttgggcayttgttgtctttatggatttcyagtcaygactagaagagtaacgatgttactgcctttggctaatagcaatgaacagctgctgaraaggacccacctggttagcattactccttcaacaaacacacaaatgcctgccsgggcatgcatagcctgcaccagacacagaggctccaccctcagtgagaggtcacaaycctcatgccagagacaacgagaaaacaaattacttatgatgcttagagaatgcaaggcataacagggatcacaataataacaaagagttagtcaayaacaaagcttgttacagagatcttctagctcagattcagttcctgtttgtcaactgcagcaacttcacgctgaagtcatttccataccagctttattactaaaaccaggtatccttctacaaaactgcctgcaaagaaaacagtaaaagactttcttcctaatacccacttgtggaaaagaaatagggaaggaggaaagagaagggatggtccctaagccaaggagacttggggagataggaggcaagtttaagcaccgaggtgtgacaacataagtgaactatgatacatggagacacaagcaattnnnnnnnnnnnnnnnnnnnnnnnnnnnnnnnnnnnnnnnnnnnnnnnnnnnnnnnnnnnnnnnnnnnnnnnnnnnnnnnnnnnnnnnnnnnnnnnnnnnnnnnnnnnnnnnnnnnnnnnnnnnnnnnnnnnnnnnnnnnnnnnnnnnnnnnnnnnnnnnnnnnnnnnnnnnnnnnnnnnnnnnnnnnnnnnnnnnnnnnnnnnnnnnnnnnnnnnnnnnnnnnnnnnnnnnnnnnnnnnnnnnnnnnnnnnnnnnnnnnnnnnnnnnnnnnnnnnnnnnnnnnnnnnnnnnnnnnnnnnnnnnnnnnnnnnnnnnnnnnnnnnnnnnnnnnnnnnnnnnnnnnnnnnnnnnnnnnnnnnnnnnnnnnnnnnnnnnnnnnnnnnnnnnnnnnnnnnnnnnnnnnnnnnnnnnnnnnnnnnnnnnnnnnnnnnnnnnnnnnnnnnnnnnnnnnnnnnnnnnnnnnnnnnnnnnnnnnnnnnnnnnnnnnnnnnnnnnnnnnnnnnnnnnnnnnnnnnnnnnnnnnnnnnnnnnnnnnnnnnnnnnnnnnnnnnnnnnnnnnnnnnnnnnnnnnnnnnnnnnnnnnnnnnnnnnnnnnnnnnnnnnnnnnnnnnnnnnnnnnnnnnnnnnnnnnnnnnnnnnnnnnnnnnnnnnnnnnnnnnnnnnnnnnnnnnnnnnnnnnnnnnnnnnnnnnnnnnnnnnnnnnnnnnnnnnnnnnnnnnnnnnnnnnnnnnnnnnnnnnnnnnnnnnnnnnnnnnnnnnnnnnnnnnnnnnnnnnnnnnnnnnnnnnnnnnnnnnnnnnnnnnnnnnnnnnnnnnnnnnnnnnnnnnnnnnnnnnnnnnnnnnnnnnnnnnnnnnnnnnnnnnnnnnnnnnnnnnnnnnnnnnnnnnnnnnnnnnnnnnnnnnnnnnnnnnnnnnnnnnnnnnnnnnnnnnnnnnnnnnnnnnnnnnnnnnnnnnnnnnnnnnnnnnnnnnnnnnnnnnnnnnnnnnnnnnnnnnnnnnnnnnnnnnnnnnnnnnnnnnnnnnnnnnnnnnnnnnnnnnnnnnnnnnnnnnnnnnnnnnnnnnnnnnnnnnnnnnnnnnnnnnnnnnnnnnnnnnnnnnnnnnnnnnnnnnnnnnnnnnnnnnnnnnnnnnnnnnnnnnnnnnnnnnnnnnnnnnnnnnnnnnnnnnnnnnnnnnnnnnnnnnnnnnnnnnnnnnnnnnnnnnnnnnnnnnnnnnnnnnnnnnnnnnnnnnnnnnnnnnnnnnnnnnnnnnnnnnnnnnnnnnnnnnnnnnnnnnnnnnnnnnnnnnnnnnnnnnnnnnnnnnnnnnnnnnnnnnnnnnnnnnnnnnnnnnnnnnnnnnnnnnnnnnnnnnnnnnnnnnnnnnnnnnnnnnnnnnnnnnnnnnnnnnnnnnnnnnnnnnnnnnnnnnnnnnnnnnnnnnnnnnnnnnnnnnnnnnnnnnnnnnnnnnnnnnnnnnnnnnnnnnnnnnnnnnnnnnnnnnnnnnnnnnnnnnnnnnnnnnnnnnnnnnnnnnnnnnnnnnnnnnnnnnnnnnnnnnnnnnnnnnnnnnnnnnnnnnnnnnnnnnnnnnnnnnnnnnnnnnnnnnnnnnnnnnnnnnnnnnnnnnnnnnnnnnnnnnnnnnnnnnnnnnnnnnnnnnnnnnnnnnnnnnnnnnnnnnnnnnnnnnnnnnnnnnnnnnnnnnnnnnnnnnnnnnnnnnnnnnnnnnnnnnnnnnnnnnnnnnnnnnnnnnnnnnnnnnnnnnnnnnnnnnnnnnnnnnnnnnnnnnnnnnnnnnnnnnnnnnnnnnnnnnnnnnnnnnnnnnnnnnnnnnnnnnnnnnnnnnnnnnnnnnnnnnnnnnnnnnnnnnnnnnnnnnnnnnnnnnnnnnnnnnnnnnnnnnnnnnnnnnnnnnnnnnnnnnnnnnnnnnnnnnnnnnnnnnnnnnnnnnnnnnnnnnnnnnnnnnnnnnnnnnnnnnnnnnnnnnnnnnnnnnnnnnnnnnnnnnnnnnnnnnnnnnnnnnnnnnnnnnnnnnnnnnnnnnnnnnnnnnnnnnnnnnnnnnnnnnnnnnnnnnnnnnnnnnnnnnnnnnnnnnnnnnnnnnnnnnnnnnnnnnnnnnnnnnnnnnnnnnnnnnnnnnnnnnnnnnnnnnnnnnnnnnnnnnnnnnnnnnnnnnnnnnnnnnnnnnnnnnnnnnnnnnnnnnnnnnnnnnnnnnnnnnnnnnnnnnnnnnnnnnnnnnnnnnnnnnnnnnnnnnnnnnnnnnnnnnnnnnnnnnnnnnnnnnnnnnnnnnnnnnnnnnnnnnnnnnnnnnnnnnnnnnnnnnnnnnnnnnnnnnnnnnnnnnnnnnnnnnnnnnnnnnnnnnnnnnnnnnnnnnnnnnnnnnnnnnnnnnnnnnnnnnnnnnnnnnnnnnnnnnnnnnnnnnnnnnnnnnnnnnnnnnnnnnnnnnnnnnnnnnnnnnnnnnnnnnnnnnnnnnnnnnnnnnnnnnnnnnnnnnnnnnnnnnnnnnnnnnnnnnnnnnnnnnnnnnnnnnnnnnnnnnnnnnnnnnnnnnnnnnnnnnnnnnnnnnnnnnnnnnnnnnnnnnnnnnnnnnnnnnnnnnnnnnnnnnnnnnnnnnnnnnnnnnnnnnnnnnnnnnnnnnnnnnnnnnnnnnnnnnnnnnnnnnnnnnnnnnnnnnnnnnnnnnnnnnnnnnnnnnnnnnnnnnnnnnnnnnnnnnnnnnnnnnnnnnnnnnnnnnnnnnnnnnnnnnnnnnnnnnnnnnnnnnnnnnnnnnnnnnnnnnnnnnnnnnnnnnnnnnnnnnnnnnnnnnnnnnnnnnnnnnnnnnnnnnnnnnnnnnnnnnnnnnnnnnnnnnnnnnnnnnnnnnnnnnnnnnnnnnnnnnnnnnnnnnnnnnnnnnnnnnnnnnnnnnnnnnnnnnnnnnnnnnnnnnnnnnnnnnnnnnnnnnnnnnnnnnnnnnnnnnnnnnnnnnnnnnnnnnnnnnnnnnnnnnnnnnnnnnnnnnnnnnnnnnnnnnnnnnnnnnnnnnnnnnnnnnnnnnnnnnnnnnnnnnnnnnnnnnnnnnnnnnnnnnnnnnnnnnnnnnnnnnnnnnnnnnnnnnnnnnnnnnnnnnnnnnnnnnnnnnnnnnnnnnnnnnnnnnnnnnnnnnnnnnnnnnnnnnnnnnnnnnnnnnnnnnnnnnnnnnnnnnnnnnnnnnnnnnnnnnnnnnnnnnnnnnnnnnnnnnnnnnnnnnnnnnnnnnnnnnnnnnnnnnnnnnnnnnnnnnnnnnnnnnnnnnnnnnnnnnnnnnnnnnnnnnnnnnnnnnnnnnnnnnnnnnnnnnnnnnnnnnnnnnnnnnnnnnnnnnnnnnnnnnnnnnnnnnnnnnnnnnnnnnnnnnnnnnnnnnnnnnnnnnnnnnnnnnnnnnnnnnnnnnnnnnnnnnnnnnnnnnnnnnnnnnnnnnnnnnnnnnnnnnnnnnnnnnnnnnnnnnnnnnnnnnnnnnnnnnnnnnnnnnnnnnnnnnnnnnnnnnnnnnnnnnnnnnnnnnnnnnnnnnnnnnnnnnnnnnnnnnnnnnnnnnnnnnnnnnnnnnnnnnnnnnnnnnnnnnnnnnnnnnnnnnnnnnnnnnnnnnnnnnnnnnnnnnnnnnnnnnnnnnnnnnnnnnnnnnnnnnnnnnnnnnnnnnnnnnnnnnnnnnnnnnnnnnnnnnnnnnnnnnnnnnnnnnnnnnnnnnnnnnnnnnnnnnnnnnnnnnnnnnnnnnnnnnnnnnnnnnnnnnnnnnnnnnnnnnnnnnnnnnnnnnnnnnnnnnnnnnnnnnnnnnnnnnnnnnnnnnnnnnnnnnnnnnnnnnnnnnnnnnnnnnnnnnnnnnnnnnnnnnnnnnnnnnnnnnnnnnnnnnnnnnnnnnnnnnnnnnnnnnnnnnnnnnnnnnnnnnnnnnnnnnnnnnnnnnnnnnnnnnnnnnnnnnnnnnnnnnnnnnnnnnnnnnnnnnnnnnnnnnnnnnnnnnnnnnnnnnnnnnnnnnnnnnnnnnnnnnnnnnnnnnnnnnnnnnnnnnnnnnnnnnnnnnnnnnnnnnnnnnnnnnnnnnnnnnnnnnnnnnnnnnnnnnnnnnnnnnnnnnnnnnnnnnnnnnnnnnnnnnnnnnnnnnnnnnnnnnnnnnnnnnnnnnnnnnnnnnnnnnnnnnnnnnnnnnnnnnnnnnnnnnnnnnnnnnnnnnnnnnnnnnnnnnnnnnnnnnnnnnnnnnnnnnnnnnnnnnnnnnnnnnnnnnnnnnnnnnnnnnnnnnnnnnnnnnnnnnnnnnnnnnnnnnnnnnnnnnnnnnnnnnnnnnnnnnnnnnnnnnnnnnnnnnnnnnnnnnnnnnnnnnnnnnnnnnnnnnnnnnnnnnnnnnnnnnnnnnnnnnnnnnnnnnnnnnnnnnnnnnnnnnnnnnnnnnnnnnnnnnnnnnnnnnnnnnnnnnnnnnnnnnnnnnnnnnnnnnnnnnnnnnnnnnnnnnnnnnnnnnnnnnnnnnnnnnnnnnnnnnnnnnnnnnnnnnnnnnnnnnnnnnnnnnnnnnnnnnnnnnnnnnnnnnnnnnnnnnnnnnnnnnnnnnnnnnnnnnnnnnnnnnnnnnnnnnnnnnnnnnnnnnnnnnnnnnnnnnnnnnnnnnnnnnnnnnnnnnnnnnnnnnnnnnnnnnnnnnnnnnnnnnnnnnnnnnnnnnnnnnnnnnnnnnnnnnnnnnnnnnnnnnnnnnnnnnnnnnnnnnnnnnnnnnnnnnnnnnnnnnnnnnnnnnnnnnnnnnnnnnnnnnnnnnnnnnnnnnnnnnnnnnnnnnnnnnnnnnnnnnnnnnnnnnnnnnnnnnnnnnnnnnnnnnnnnnnnnnnnnnnnnnnnnnnnnnnnnnnnnnnnnnnnnnnnnnnnnnnnnnnnnnnnnnnnnnnnnnnnnnnnnnnnnnnnnnnnnnnnnnnnnnnnnnnnnnnnnnnnnnnnnnnnnnnnnnnnnnnnnnnnnnnnnnnnnnnnnnnnnnnnnnnnnnnnnnnnnnnnnnnnnnnnnnnnnnnnnnnnnnnnnnnnnnnnnnnnnnnnnnnnnnnnnnnnnnnnnnnnnnnnnnnnnnnnnnnnnnnnnnnnnnnnnnnnnnnnnnnnnnnnnnnnnnnnnnnnnnnnnnnnnnnnnnnnnnnnnnnnnnnnnnnnnnnnnnnnnnnnnnnnnnnnnnnnnnnnnnnnnnnnnnnnnnnnnnnnnnnnnnnnnnnnnnnnnnnnnnnnnnnnnnnnnnnnnnnnnnnnnnnnnnnnnnnnnnnnnnnnnnnnnnnnnnnnnnnnnnnnnnnnnnnnnnnnnnnnnnnnnnnnnnnnnnnnnnnnnnnnnnnnnnnnnnnnnnnnnnnnnnnnnnnnnnnnnnnnnnnnnnnnnnnnnnnnnnnnnnnnnnnnnnnnnnnnnnnnnnnnnnnnnnnnnnnnnnnnnnnnnnnnnnnnnnnnnnnnnnnnnnnnnnnnnnnnnnnnnnnnnnnnnnnnnnnnnnnnnnnnnnnnnnnnnnnnnnnnnnnnnnnnnnnnnnnnnnnnnnnnnnnnnnnnnnnnnnnnnnnnnnnnnnnnnnnnnnnnnnnnnnnnnnnnnnnnnnnnnnnnnnnnnnnnnnnnnnnnnnnnnnnnnnnnnnnnnnnnnnnnnnnnnnnnnnnnnnnnnnnnnnnnnnnnnnnnnnnnnnnnnnnnnnnnnnnnnnnnnnnnnnnnnnnnnnnnnnnnnnnnnnnnnnnnnnnnnnnnnnnnnnnnnnnnnnnnnnnnnnnnnnnnnnnnnnnnnnnnnnnnnnnnnnnnnnnnnnnnnnnnnnnnnnnnnnnnnnnnnnnnnnnnnnnnnnnnnnnnnnnnnnnnnnnnnnnnnnnnnnnnnnnnnnnnnnnnnnnnnnnnnnnnnnnnnnnnnnnnnnnnnnnnnnnnnnnnnnnnnnnnnnnnnnnnnnnnnnnnnnnnnnnnnnnnnnnnnnnnnnnnnnnnnnnnnnnnnnnnnnnnnnnnnnnnnnnnnnnnnnnnnnnnnnnnnnnnnnnnnnnnnnnnnnnnnnnnnnnnnnnnnnnnnnnnnnnnnnnnnnnnnnnnnnnnnnnnnnnnnnnnnnnnnnnnnnnnnnnnnnnnnnnnnnnnnnnnnnnnnnnnnnnnnnnnnnnnnnnnnnnnnnnnnnnnnnnnnnnnnnnnnnnnnnnnnnnnnnnnnnnnnnnnnnnnnnnnnnnnnnnnnnnnnnnnnnnnnnnnnnnnnnnnnnnnnnnnnnnnnnnnnnnnnnnnnnnnnnnnnnnnnnnnnnnnnnnnnnnnnnnnnnnnnnnnnnnnnnnnnnnnnnnnnnnnnnnnnnnnnnnnnnnnnnnnnnnnnnnnnnnnnnnnnnnnnnnnnnnnnnnnnnnnnnnnnnnnnnnnnnnnnnnnnnnnnnnnnnnnnnnnnnnnnnnnnnnnnnnnnnnnnnnnnnnnnnnnnnnnnnnnnnnnnnnnnnnnnnnnnnnnnnnnnnnnnnnnnnnnnnnnnnnnnnnnnnnnnnnnnnnnnnnnnnnnnnnnnnnnnnnnnnnnnnnnnnnnnnnnnnnnnnnnnnnnnnnnnnnnnnnnnnnnnnnnnnnnnnnnnnnnnnnnnnnnnnnnnnnnnnnnnnnnnnnnnnnnnnnnnnnnnnnnnnnnnnnnnnnnnnnnnnnnnnnnnnnnnnnnnnnnnnnnnnnnnnnnnnnnnnnnnnnnnnnnnnnnnnnnnnnnnnnnnnnnnnnnnnnnnnnnnnnnnnnnnnnnnnnnnnnnnnnnnnnnnnnnnnnnnnnnnnnnnnnnnnnnnnnnnnnnnnnnnnnnnnnnnnnnnnnnnnnnnnnnnnnnnnnnnnnnnnnnnnnnnnnnnnnnnnnnnnnnnnnnnnnnnnnnnnnnnnnnnnnnnnnnnnnnnnnnnnnnnnnnnnnnnnnnnnnnnnnnnnnnnnnnnnnnnnnnnnnnnnnnnnnnnnnnnnnnnnnnnnnnnnnnnnnnnnnnnnnnnnnnnnnnnnnnnnnnnnnnnnnnnnnnnnnnnnnnnnnnnnnnnnnnnnnnnnnnnnnnnnnnnnnnnnnnnnnnnnnnnnnnnnnnnnnnnnnnnnnnnnnnnnnnnnnnnnnnnnnnnnnnnnnnnnnnnnnnnnnnnnnnnnnnnnnnnnnnnnnnnnnnnnnnnnnnnnnnnnnnnnnnnnnnnnnnnnnnnnnnnnnnnnnnnnnnnnnnnnnnnnnnnnnnnnnnnnnnnnnnnnnnnnnnnnnnnnnnnnnnnnnnnnnnnnnnnnnnnnnnnnnnnnnnnnnnnnnnnnnnnnnnnnnnnnnnnnnnnnnnnnnnnnnnnnnnnnnnnnnnnnnnnnnnnnnnnnnnnnnnnnnnnnnnnnnnnnnnnnnnnnnnnnnnnnnnnnnnnnnnnnnnnnnnnnnnnnnnnnnnnnnnnnnnnnnnnnnnnnnnnnnnnnnnnnnnnnnnnnnnnnnnnnnnnnnnnnnnnnnnnnnnnnnnnnnnnnnnnnnnnnnnnnnnnnnnnnnnnnnnnnnnnnnnnnnnnnnnnnnnnnnnnnnnnnnnnnnnnnnnnnnnnnnnnnnnnnnnnnnnnnnnnnnnnnnnnnnnnnnnnnnnnnnnnnnnnnnnnnnnnnnnnnnnnnnnnnnnnnnnnnnnnnnnnnnnnnnnnnnnnnnnnnnnnnnnnnnnnnnnnnnnnnnnnnnnnnnnnnnnnnnnnnnnnnnnnnnnnnnnnnnnnnnnnnnnnnnnnnnnnnnnnnnnnnnnnnnnnnnnnnnnnnnnnnnnnnnnnnnnnnnnnnnnnnnnnnnnnnnnnnnnnnnnnnnnnnnnnnnnnnnnnnnnnnnnnnnnnnnnnnnnnnnnnnnnnnnnnnnnnnnnnnnnnnnnnnnnnnnnnnnnnnnnnnnnnnnnnnnnnnnnnnnnnnnnnnnnnnnnnnnnnnnnnnnnnnnnnnnnnnnnnnnnnnnnnnnnnnnnnnnnnnnnnnnnnnnnnnnnnnnnnnnnnnnnnnnnnnnnnnnnnnnnnnnnnnnnnnnnnnnnnnnnnnnnnnnnnnnnnnnnnnnnnnnnnnnnnnnnnnnnnnnnnnnnnnnnnnnnnnnnnnnnnnnnnnnnnnnnnnnnnnnnnnnnnnnnnnnnnnnnnnnnnnnnnnnnnnnnnnnnnnnnnnnnnnnnnnnnnnnnnnnnnnnnnnnnnnnnnnnnnnnnnnnnnnnnnnnnnnnnnnnnnnnnnnnnnnnnnnnnnnnnnnnnnnnnnnnnnnnnnnnnnnnnnnnnnnnnnnnnnnnnnnnnnnnnnnnnnnnnnnnnnnnnnnnnnnnnnnnnnnnnnnnnnnnnnnnnnnnnnnnnnnnnnnnnnnnnnnnnnnnnnnnnnnnnnnnnnnnnnnnnnnnnnnnnnnnnnnnnnnnnnnnnnnnnnnnnnnnnnnnnnnnnnnnnnnnnnnnnnnnnnnnnnnnnnnnnnnnnnnnnnnnnnnnnnnnnnnnnnnnnnnnnnnnnnnnnnnnnnnnnnnnnnnnnnnnnnnnnnnnnnnnnnnnnnnnnnnnnnnnnnnnnnnnnnnnnnnnnnnnnnnnnnnnnnnnnnnnnnnnnnnnnnnnnnnnnnnnnnnnnnnnnnnnnnnnnnnnnnnnnnnnnnnnnnnnnnnnnnnnnnnnnnnnnnnnnnnnnnnnnnnnnnnnnnnnnnnnnnnnnnnnnnnnnnnnnnnnnnnnnnnnnnnnnnnnnnnnnnnnnnnnnnnnnnnnnnnnnnnnnnnnnnnnnnnnnnnnnnnnnnnnnnnnnnnnnnnnnnnnnnnnnnnnnnnnnnnnnnnnnnnnnnnnnnnnnnnnnnnnnnnnnnnnnnnnnnnnnnnnnnnnnnnnnnnnnnnnnnnnnnnnnnnnnnnnnnnnnnnnnnnnnnnnnnnnnnnnnnnnnnnnnnnnnnnnnnnnnnnnnnnnnnnnnnnnnnnnnnnnnnnnnnnnnnnnnnnnnnnnnnnnnnnnnnnnnnnnnnnnnnnnnnnnnnnnnnnnnnnnnnnnnnnnnnnnnnnnnnnnnnnnnnnnnnnnnnnnnnnnnnnnnnnnnnnnnnnnnnnnnnnnnnnnnnnnnnnnnnnnnnnnnnnnnnnnnnnnnnnnnnnnnnnnnnnnnnnnnnnnnnnnnnnnnnnnnnnnnnnnnnnnnnnnnnnnnnnnnnnnnnnnnnnnnnnnnnnnnnnnnnnnnnnnnnnnnnnnnnnnnnnnnnnnnnnnnnnnnnnnnnnnnnnnnnnnnnnnnnnnnnnnnnnnnnnnnnnnnnnnnnnnnnnnnnnnnnnnnnnnnnnnnnnnnnnnnnnnnnnnnnnnnnnnnnnnnnnnnnnnnnnnnnnnnnnnnnnnnnnnnnnnnnnnnnnnnnnnnnnnnnnnnnnnnnnnnnnnnnnnnnnnnnnnnnnnnnnnnnnnnnnnnnnnnnnnnnnnnnnnnnnnnnnnnnnnnnnnnnnnnnnnnnnnnnnnnnnnnnnnnnnnnnnnnnnnnnnnnnnnnnnnnnnnnnnnnnnnnnnnnnnnnnnnnnnnnnnnnnnnnnnnnnnnnnnnnnnnnnnnnnnnnnnnnnnnnnnnnnnnnnnnctctaaataggcccatacttcacaaagtaaaaccctgtgactacttcacagaattacttttcacttcccttctctactcaaatacttggaactatgacgagtaacagaattatttcttaggtgacataatttaaatgaaaacttcacctacagtttatgagattaaaagtaagacccaacaaagaacatctgcatattccccatttcctaataggttagtcacaggaaaacaaaagaagagtagggaaactccctgtccctgagcaagagaatgtaaatgtacatgatgtttggtggaatgaaagcatccaatggtctacttgttaacctcaccataatttttaccaaaaaaaaaaaaaaaaaaaaaaaaaagcttaacagggtttcagaccatgaaaaacaaagaaacaaagtactcatactctggcaaatacttaaatgagtctacatacactaaattacctagacccaatccccgtgtcttctttttttctttttcattttttgagacagggtcatattctcactctgttgcccaggtggagggcagtggcatgatctcagctcagtgcaacctctgcttcctaggctcaagcgatcctcctgcctcagcctccccagtatctgggactgactatacaggcacgtgtgaccatgctcagtcaatttttttaaaaatctttttagagatgagatctccctatttctcccaggctggtttagaacttatgggctcaagcaattctgccacctcggcctcccaaagtgctgggattacaggcatgagccactgcgccctgcctttatcttttttttttttttttgagacagagtcttgctctgtcgcccaggctggattgcagtggtgctatctcggctcactgcaagttccacctcctgggttcacgccattctcctgcctcagcctcccgagtaggtgggactacaggtgcccgccaccacgcccggctaattttttttttgtatttttagtagagacagggtttcaccatgttagccaggatggtctcaatctcctgacctcgtgatccacctgcctcagcttcccaaagtggcctttatcttatctaatttctgccaaattgttggctaaacagtagattcaaaagtagaagaaaaaaaacagtacaaagattgctaaaaagtcaaataacatctactgctgaaaaaccataaaagtttagcctaaataataagcatatagaaagatgcttgacatcattggttattagaaaaatgcaaattaaaactacaatactatgctacttcaacacccactagaagggctataattttttaaaaagcggtaccaagtgttggcaaggatgtggagaaataggaagtttcaaacattgctagtaggaatgtaaaatggtacagtaactttggaaaaacagcttagcagaattttttaagtataaatttaccatgtgacccggcaattacactcctagatatctactcccaagagaaataaaaatatatgtccacacaaagaactgcacatgaatattcatagcagtattattcataatagccaaaaatcgaaacaacacaaaaacatccatcaactggtaaatggaaagtcaaaagcagtctatccacagagaatgctatttagcaataagaacagcaaaccttcctttgaaacatttatgacacggatgaacctcaaaaacattatgtgagaacaaaaatgttctaaaattgatttatggtgatggcagtacgactcagtaaatttgctaaaaatcagtgagttgtgcacttaatatargtaattttttttttctcactctgtcacccaggctagcatgcaatggcaccatcttggttcactgcaacctctgcctcccaggctcaagtgatccttccacctcagcctcctgagtagctgggactatagactagtgccaccacactaagctgattttttatattttgatagagatgggttttcaccatgtggccaaggctggtcttgaacccctcaagcaatccacctgcctcagcctcctaaagtgctggaattacaggtgtgagccattgcatccagccctgaaatragtaaattttatgatatataaaatatgcctcaataaactagtaaaaaaaaagttaggtactcaattcacattttgtatatgtgccagaaattaacatagtattcctattttcaagtactttagcgcatagcaatctaaaatttggctaagcataaaaggtatattctcagacagaaaccagttgaactgcaaaagcacctacctactagttagttgtaatacactataaatacttagaaaatcagaatgtcttcaatgcctcattcccttcattaggcaaagctcacatattcataaaccacgtcagctaaatcatgaagcatagagaaccattagacaaaaacagaagagggaaactgaaatgcagtttagattataaagcaaacagaaaagagagctaaaaacataataagctctcctatctccacctagcatccatttcactggatgtctaaggctcagggagtttggagacactaagtctccaaagccatttgaggggaaagaaaactaaccttgatcttacaggtgtaagttaatcactctatttttgtcactctgtggacaataaaacatttatcaaaaaaaaaaaaagagcctagcttaaagctttccaatcttgtacagaatataaagaaatttaggaagttagagtaaaaaagaatggtgatgatgaccataataattactgtcaaaattaactgatcattttctatgcgtcaagtgctaagaaattcacacatatgatctcatttaatctttacaaaaactctaggatgtgggtaatattattattcccattttccagatggggaaactgaagcacagattaagttttccaaagacctagtagttccaacaagtaagtggcaacagcagtgtcatctgaaggaaggccaccaaggggacagcactttacaaggtaattcctaaagtagcccaacacattccagatcgaatccttctcttacaagccttagagactctctctctctagaaaagtgtccagcagtaataaataagatgtaaatgaagagactagagtgaaccccaagacataaaaatctgactagtctcacttcacgggtattgacttttcagatcaacctcagctctcagctgaaaggcaaccctcccaaacttggctcagagcccacctgctatccttcttcattcctgattatttaactctgttctggaacagcaagatcataaaaggctgaaaactgagcggggctctggtctcctcactactcccaagacacccagaaaagttttcactcagtccgtcttctccatctgaccttctacactcatcttcatctgtgtaaacccctcaatccatcaggtctggggaaatccttctctcagtgctgcccatcacagccctcaacgtctgaccactgctgtgagcactcagatcttccatacactattacctattaaagggtgcacatccatctgcctagctacacaggaagcttttggggcaggaagctgttcacattgtttttgtatgccttgaagtatctagtaaaacagtagcaccagaaatacttaatagtttctaaagtaagaagagctttgtatttttgctttttggtataactacatttctatttgtattttctatttggcataccaataccctaagattataaactcattgatgtaacagataaaaacttcgtttctttgtacagtatattttaaaaaagaatgagagtaagggattcaagtgtgacagacataaattacttcttttccagaagtactaaaatcattctatatattttcacagttgccaaagtagaacatgagcttgtagataaatcgctttattttcttatatttccaaatgaaggatattaaataaacatctttttgttcaatgtaacactggatgaaacaaatgtaaaaatcattttaaaaaatgtaaagtggcttccttttgtcaaaataataaagtgccaaaaagctattataaatggcagaaactaatatacataagtataacttacagggagaaagttgagcataaaattgtgagtgtacctatgtataggcttactgacctccaacaatgcaaaacaaagacgaggaggaatttggaacaaagcaagaacattttcttccactataattcttcatttcataaaagtaaaatgtcaataacaaaagaaaatgtggtaagaaaagcacagatctgaatacattttttaaaatgcctayaactaaaatatttcatacctgtaaacatggcatgaaaataaggactacaggcggccagcaccactctatgagcagaaatttccatgtcttctgccacaattgtgacatcgcacagcaaattttgactgtgtaaaaagcagagagaaaaaatttaaatgatatcaacaacgaatgtattgaacatcctatgcaaaaatattacagtaaagcccactttcatcaagtggagactaacgtaaaagacagccatcctttgggacatgatccctaaacatgaagtacatagaaaacagctgggataaaggtccaacatgccttggactctcactaagaatcctgcctttgaaaaacacagaaatcctcccaaacttgattactgatttctcaacctaaaggcaattactggcagcaaaccatcaatggactgcaaaagaagagggtgtctgaataagaagtagtggcagaagtggcaggtgtagtctgacatgaagatgaagaaaaaacacataccgaaaactaaattgggtcaaatacccatcccctctcaaaaaaaaaaaaaatcttaaaagacgctagttcatcaagcaatggtaaaattatattcagttacacttgctgcttaaaaggctttgcacatttgaagcttaacttaatcacaacattttaccaatgcaaaatatctcatccttcaaggccagaaaatattacatctaaagttaaaaaacactttggccaggtgcagtggctcatgcctataatcccaacactttgggaggccaaggtagatggatggatcacttgaagccagaagtttgagaccagcctggccaacatggcgaaacccagcctctattaaaaatacaaatattagccaggcatggtagaccacacctatgatcgcagctactgaggaggctgagacacaagaatcacttgaacctgggaggcagaggttgcattcagccaagatcgcaccaccgcactccagcctgggtgacagagtgagactctgtttcaaaaaaaaaaaaaaagcattttgttacctcaaaaccattattcagcaaccataattattatatctctaattttaaaacatccattataattcactcaaaaacatgtggtgagcatttttgacatgcaatgcgtggtgccagatcatactctccaggtaattaataatgtcacagaatatttttaacagaaaacgttgctgatgcttattctagaacaagcaaaaaggctccaaagcctaaaacctgccttgctagtagtcatactatgaatgactgaaacaggtgtggtgaaagcaaatgtcccttccacaccttacatacccaagcactgaatttatgtctatgtgcatagtgcatgcaggtcacacttggcaccctcctctactgttctatttcctaaaaaggtggcctgcctacttctgtaattttctagtagcttacaagcaacatttcccatgagcttgaccaagtccttgaagttttccacctgtccatactgcttgcaaacttgttcccataaagttcatgccaaaactttttggagagcctactggtaactattctccttccagtttaggagaaatggaagaaaaaaagagtaccccagcatcagtgatgactgcatcccagggcctcattgctgatgagactgctatgccatttagattatggtatggcttgtgtgttaccagtttaatggctcatgatgctgtatgagacataaagcaggtcccgtattggagtcataaaaggtggcacagtatcactaatttataattcctccagatcattttagagaactgacaaagtttaccatctgctctgagaatataaaaccattctgcaattctatgaattctatgggttcacatataactagggtggaaaagtcagtggtgtcagcagtgttttcaggaaggtactatgcaagagttttacctgcatgtattatttcatttagtgcccaccacaatgttataaggtattatttttatccccaaatttatagctggggaaaccaaggttaaagtcctccaactagaggcagtgccaggattcgaatccacaggctgactccagagcctcttgaccactacacaaaacctaaagctatacggttttaagatctgttaaagtttgaataaaacaagaaagagaaataataaataaataataaataatttattttttgacataatatatactagaaagtatttttaagttctatatatagctaataaaagctccaattttagtgggttttaagcactacctctacagaatatttttaaaaatcaaagtttgttcattcattcaacaaagtactgcaagaccatctctgcccttaagaagacragcagaaaaaactggcaatgcaaaaattataggataaagtggaaagcaccgtaataaagatgttatggaaaggctggggtggggggctgcatttaaatcagactggggatcagaaagggcttcctgcagctattggccttaagctgagttctaaaaacaagtaagagttagctggatcgagaaggagcaaaagaatcccaaagagaacatgatgtactatcgcatggagacctgaagcagcaaagcagaatgcggaactgtgggccaagaagagtggggacagagaagggtgggagcgaagaaactctggaggcaggtaagcagggtcagcagagcatgcatggtctctctagaataaagcaatccaggtttctcttttgtgacctggggatttgaacacaactcaaacatgagtcaagtgcatctttatgcctattttccttttgtcagtaatccttcctagtgctttagtttcaagatggaacacaagtggaattacacctgaacacctcannnnnnnnnnnnnnnnnnnnnnnnnnnnnnnnnnnnnnnnnnnnnnnnnnnnnnnnnnnnnnnnnnnnnnnnnnnnnnnnnnnnnnnnnnnnnnnnnnnnnnnnnnnnnnnnnnnnnnnnnnnnnnnnnnnnnnnnnnnnnnnnnnnnnnnnnnnnnnnnnnnnnnnnnnnnnnnnnnnnnnnnnnnnnnnnnnnnnnnnnnnnnnnnnnnnnnnnnnnnnnnnnnnnnnnnnnnnnnnnnnnnnnnnnnnnnnnnnnnnnnnnnnnnnnnnnnnnnnnnnnnnnnnnnnnnnnnnnnnnnnnnnnnnnnnnnnnnnnnnnnnnnnnnnnnnnnnnnnnnnnnnnnnnnnnnnnnnnnnnnnnnnnnnnnnnnnnnnnnnnnnnnnnnnnnnnnnnnnnnnnnnnnnnnnnnnnnnnnnnnnnnnnnnnnnnnnnnnnnnnnnnnnnnnnnnnnnnnnnnnnnnnnnnnnnnnnnnnnnnnnnnnnnnnnnnnnnnnnnnnnnnnnnnnnnnnnnnnnnnnnnnnnnnnnnnnnnnnnnnnnnnnnnnnnnnnnnnnnnnnnnnnnnnnnnnnnnnnnnnnnnnnnnnnnnnnnnnnnnnnnnnnnnnnnnnnnnnnnnnnnnnnnnnnnnnnnnnnnnnnnnnnnnnnnnnnnnnnnnnnnnnnnnnnnnnnnnnnnnnnnnnnnnnnnnnnnnnnnnnnnnnnnnnnnnnnnnnnnnnnnnnnnnnnnnnnnnnnnnnnnnnnnnnnnnnnnnnnnnnnnnnnnnnnnnnnnnnnnnnnnnnnnnnnnnnnnnnnnnnnnnnnnnnnnnnnnnnnnnnnnnnnnnnnnnnnnnnnnnnnnnnnnnnnnnnnnnnnnnnnnnnnnnnnnnnnnnnnnnnnnnnnnnnnnnnnnnnnnnnnnnnnnnnnnnnnnnnnnnnnnnnnnnnnnnnnnnnnnnnnnnnnnnnnnnnnnnnnnnnnnnnnnnnnnnnnnnnnnnnnnnnnnnnnnnnnnnnnnnnnnnnnnnnnnnnnnnnnnnnnnnnnnnnnnnnnnnnnnnnnnnnnnnnnnnnnnnnnnnnnnnnnnnnnnnnnnnnnnnnnnnnnnnnnnnnnnnnnnnnnnnnnnnnnnnnnnnnnnnnnnnnnnnnnnnnnnnnnnnnnnnnnnnnnnnnnnnnnnnnnnnnnnnnnnnnnnnnnnnnnnnnnnnnnnnnnnnnnnnnnnnnnnnnnnnnnnnnnnnnnnnnnnnnnnnnnnnnnnnnnnnnnnnnnnnnnnnnnnnnnnnnnnnnnnnnnnnnnnnnnnnnnnnnnnnnnnnnnnnnnnnnnnnnnnnnnnnnnnnnnnnnnnnnnnnnnnnnnnnnnnnnnnnnnnnnnnnnnnnnnnnnnnnnnnnnnnnnnnnnnnnnnnnnnnnnnnnnnnnnnnnnnnnnnnnnnnnnnnnnnnnnnnnnnnnnnnnnnnnnnnnnnnnnnnnnnnnnnnnnnnnnnnnnnnnnnnnnnnnnnnnnnnnnnnnnnnnnnnnnnnnnnnnnnnnnnnnnnnnnnnnnnnnnnnnnnnnnnnnnnnnnnnnnnnnnnnnnnnnnnnnnnnnnnnnnnnnnnnnnnnnnnnnnnnnnnnnnnnnnnnnnnnnnnnnnnnnnnnnnnnnnnnnnnnnnnnnnnnnnnnnnnnnnnnnnnnnnnnnnnnnnnnnnnnnnnnnnnnnnnnnnnnnnnnnnnnnnnnnnnnnnnnnnnnnnnnnnnnnnnnnnnnnnnnnnnnnnnnnnnnnnnnnnnnnnnnnnnnnnnnnnnnnnnnnnnnnnnnnnnnnnnnnnnnnnnnnnnnnnnnnnnnnnnnnnnnnnnnnnnnnnnnnnnnnnnnnnnnnnnnnnnnnnnnnnnnnnnnnnnnnnnnnnnnnnnnnnnnnnnnnnnnnnnnnnnnnnnnnnnnnnnnnnnnnnnnnnnnnnnnnnnnnnnnnnnnnnnnnnnnnnnnnnnnnnnnnnnnnnnnnnnnnnnnnnnnnnnnnnnnnnnnnnnnnnnnnnnnnnnnnnnnnnnnnnnnnnnnnnnnnnnnnnnnnnnnnnnnnnnnnnnnnnnnnnnnnnnnnnnnnnnnnnnnnnnnnnnnnnnnnnnnnnnnnnnnnnnnnnnnnnnnnnnnnnnnnnnnnnnnnnnnnnnnnnnnnnnnnnnnnnnnnnnnnnnnnnnnnnnnnnnnnnnnnnnnnnnnnnnnnnnnnnnnnnnnnnnnnnnnnnnnnnnnnnnnnnnnnnnnnnnnnnnnnnnnnnnnnnnnnnnnnnnnnnnnnnnnnnnnnnnnnnnnnnnnnnnnnnnnnnnnnnnnnnnnnnnnnnnnnnnnnnnnnnnnnnnnnnnnnnnnnnnnnnnnnnnnnnnnnnnnnnnnnnnnnnnnnnnnnnnnnnnnnnnnnnnnnnnnnnnnnnnnnnnnnnnnnnnnnnnnnnnnnnnnnnnnnnnnnnnnnnnnnnnnnnnnnnnnnnnnnnnnnnnnnnnnnnnnnnnnnnnnnnnnnnnnnnnnnnnnnnnnnnnnnnnnnnnnnnnnnnnnnnnnnnnnnnnnnnnnnnnnnnnnnnnnnnnnnnnnnnnnnnnnnnnnnnnnnnnnnnnnnnnnnnnnnnnnnnnnnnnnnnnnnnnnnnnnnnnnnnnnnnnnnnnnnnnnnnnnnnnnnnnnnnnnnnnnnnnnnnnnnnnnnnnnnnnnnnnnnnnnnnnnnnnnnnnnnnnnnnnnnnnnnnnnnnnnnnnnnnnnnnnnnnnnnnnnnnnnnnnnnnnnnnnnnnnnnnnnnnnnnnnnnnnnnnnnnnnnnnnnnnnnnnnnnnnnnnnnnnnnnnnnnnnnnnnnnnnnnnnnnnnnnnnnnnnnnnnnnnnnnnnnnnnnnnnnnnnnnnnnnnnnnnnnnnnnnnnnnnnnnnnnnnnnnnnnnnnnnnnnnnnnnnnnnnnnnnnnnnnnnnnnnnnnnnnnnnnnnnnnnnnnnacactcagagggcatggcctaagtctgatactgtttttggatcccacacagcctttcaggcatattagctgattaggtgctcaccaatacttgttgaatacattgtttacatatgactgcagggtttttaaaccaaataatttcaagatattcaagctcttaccaggctgggatataaagctaggtctctgggcctcctgtctaaaaacaattagtttaagaaaacaataaaatgtcatgtactttttctatcaaacaattttaattctgtaacttaaaccttacagaactcctgtcttcctacccccattcccacaaccacaccttacatcagccataattgaaagtgacttttattcctaaaattttgcttccattagccaaaggttcacattaacattgttcggagtacagctgttgctctaccactttgaggttagagcccaagggcagagtggtgagaacaaggaagttttcccttcccagaagtcaggaaaccactctcagctaccctttctgggcaagaggaagttgacgcaaggacaggaaataattaatgattttcagctgtataaggaataggcctctttagagatttttttttaaagaattactcaaaatggctataagatttaagagtggaagggaatgacatttttaaaaaggtctgatgaactccaacgacagtccatttttaaaaatactgttgttgttggcactttcattaaaacaatccgggttatagacctggcagccaacactctggctattcaaaggtcattctttgttctgaaaatcagcatcgactaccagcccagtgacataccagacccagctgctgaaagggtgccacacaaagaacaagaaggtactatctcacagttatagagttcacatccaaaaaggggcaaacagatgaatgaagactggagcttataaataatcctagggccaggcaaggacaccacagggcttgcaggtaagcaggaaaaacatctctaggctgagaatgtcagagcagcactgaaccttagacaccatcctgtccattcctctcattttagtcaggctcaaacaagtaaaataattggctcgagrccagagtctgtcccaaaactcaggtcattcaccccaagggaaggagcacttggtgttaccttccctgcagtttagtgagtcatgcccaggtcaacagagacccactcacattaacaccagcagaaagccaaggctacccgtgccccacccataggagtggggaaaaagaacatttgaatagtcctattaaaagtcagtctttttagacttctcaaagagaaaaaagagccattaaagatcccagtcttaaaacaaccagactatttttcttacttttcttgcagttccacttagtaaccaatgcattttacattctaataactactgtcaaaacaggattaaaatcctgaaacagyaccctcagacttgctggattatcccagttatatattctcccaaagaataagtgaaaacccacattctgaaaatgttgtcaaagcrgtactagaaagcaaattaaatgatccaatattcagtttaactttctcttatctctctccaatccattctycacccagcagccagtgtgttcaaaatataaatctgatcaggtcacattcccgcttaacactctccactggctttctctcaaggcaactcttgattaagaccaaaatttcaggacctcagtccaatggcccctcctacctactcagctgcctctcctgtgtgattccaccgccacgtgcactgcagcaacactgtcagttcctccgatgaggccagctccttcctaccctaagatgtggcacagcattcccaatgcctggaacactgttctccctctcctcactcccatcctgactttatccccttatcttcttttccttctagatatcagcataattattcctgtcttctcaagaaagcctttcctgaccactgttatccacctttctagcaccagcagccctcctctgcaacacttactatcattacagtaaattatttttgtgattctttgatgaatgcctgcttcctgcagtcagctatgggcccacaagggtggcaaccatatttgttcttgctcaccattgtacctacagtacctagcagataaatatttattgaatccctaatttaattaaagaagaaacaaacaaatgatgggcctaaaagggagagcttttaggcagcacagaaagattaagggaaggtttaatcccttcttagccaggctttcagcatttcagatagatatacgtagagtactttcacaaacggaatgctgggaaaaagcagatctttcataaagtgctaagaaaataaaaccaagactcttaatacatatattacccttttaattaaaaaaaaagctactcatttttcaatcaacttttaatactacttaaaagttgcagtgatccttagtacacttgagaattacctcagcaacaggcaggtcactgccccccaaaactaccaccactcccacaaaacaatggttacatttttctctaaaagtttctttccatactctttgccacagtaagttagaagccctagaccagcactgtccaatataaacataatgcaagtcacaattttatagtaatcacattaaaaaggtaaaaagaaacaagagaaattaatttcaataatatattctcttatttttaactttaacagaaagaaaatagggacagagtctcactgtgttgaccaggctggtctcaaactcctggcttcaagtgatcctcctgccctggcctctcaaagtgctgggattataggcatgagtcaccgcacctggcctactgtattctttttaactcaaaatatctagtatattatcatttctacatggaatcaatatatttaaaagtattaataaaatatttacatttcttttttttgcatttagaaatcccctgtgtatttttcacctccaaactatctcatcagactagctgtatgtggctaagtggctaccacactaatagaggagccccacaccatccacacttctgataaattatttgctcttttcctttaaaaaacttgcagaaaaagcttttaatgttctgtgtaccagacaaagcaacaatggaaggttgattatatattcactacaaacaactgaaaaataaagggacgaaaccaatggttgcatgtacattagtataatgataccttcttaattcgttcatgactttgaaagctttcttcatatgccaaggattcactgtcactgggcagtgtttttcggtattatcatcttttgaatcgagaggcttctgatgaccctgctttgtgcatctgtacataaaagaaaagaacaaaaacagaaaaagatcttattaaagatcatttagttcagcttatcaagctacaagagagacaatgaatgtctccttcccctacttatttagaggaagtctcatggacagaatatcccaatgtaaggttaagacaattaagaacagtttctgatggacactatggtttcaataaaaagtgggtaattacctccctggtgtcaaagttccgtcaaagatcaacacagaatattcagtagaagtggcttagcagatatctccaaataaaactgttgagaaatgatcttctccattggaaattaacttgcttttacaaacttctatagtcatacgttattaacaaaccaagacagagcaggatcatattttacacaaacttcagaaacttagaatctgatttaaattttgctctctacctgccaggatatattaaccccatatattttgacctatactaacaagagattaatcgagattaatcatgttagttaatagttattgagtatttaccatatggcagccctgtgctgagcagtttactttcattatttggttaatcctcacaacaactctctgagcaaattactattattatccccatttaacagatgaagagaatagtttgagtaacggggtaaatggtagggctgggtaagagtatggccagtctgattctccatcttgttcttttcactaatatttcaataccatttcctacactgaacagtgaatatttaaatttacattttttaagcacacaaggctatactagcattgctacatgaattattctttcaagacttaggacataaaattaaccaaaaaaatcagggtcccatgaggaggggggcaagaattaastgcaaattaatgaacacaagacaactttttgaagcaatggttataaaactttataaatttaataaaaatcattagattgcacaattataatgggtggatttatggtatgtaaattatacctcaataaagctattacataaaaaatcagggcaccaattttttaacyaggcttaaaaaatgaagtctaaaaatatcatacttgtatatatatcaaagaacaagcaaacatcattattaattgctgcacttctcttcctttcctgacccatttctaaaaggatgattcatttttaaacattatcgttcattaattcattcagcaattgtttttagtaccaaccatgtaccaatcactactcttaaggcacttggaatatatcagtgaataaaacaaagatccctgtcctcatagagcttggagtctggtggggggaaagggaaagacagcacaagtcagggaagcaactggcatgttgggaaatggtgttatggaagtagaaaaagcagggcagcgtgaagagagagagaaatgtggggacggtggaggggtgtaatctgcagtaaatagggtgctcagggaaggcctagttgagaactgagatttgaacaaaagactagggggtgtgggaacatccggatggaagtagtaactacagcaaaggccaatatgtacctggtatgttccaggaactgtgacccatgcagctttggcaaaaggctggggctgagcaggagaggggagtgcagatcacaaagggccttttaggatatcctaaggcctttcactttgagtgaaatgaggagacactgcaaaagagtgatacaatccgacttacgttttccaaagaccactttggctgctggttgagaacactctacacgggtcaaagatgaaaagggggcaactatttagcaggatattacaataattcactaaaaaatgacagtggcttagggaggacagtcgcagtggaggtgatgaaaactggctgggttctggacattttgaagatacagccaacgagatctgttgaaacaaccatatgacatgtcaaagaaagtcagaatgactccaagtcttttggcctgaacaagagaaaggactgagtttctgttcattgagatgaagaaggctgcaggtggaaactgtttgagataggcagagatcaagagctgtttttatacctaatggttttaaaacatcagacatccaagtgaaggcatcaaatcaccagataaatattggagtctagagctggagagaaaagtttagctggagtcagaaatgtgggaatcactggttacatggatggtacacgaagccatgaaacaggtactcaacatgaatataacctctaaaattaagcaaaccccaaaccccagaatcagcactagttgaagcacctgactctctgagggcttgcctactacaagtgcacatcagttctacttcctcaccgcttgagagtttttaaggggcctaacaaatgaattagcgcaaggctttacctccacagggaaagcctacagctgaagtgggagaataaggaggtgccactctactccctatgccctcttgaaggtgtgtgtgtagggaattagttacacccagtctaagaaaggaaaagcactgataagtctagaagccaaaaagatggcagaacattcacgtctggagggagagaactggagaaacactttatagtataagacagatattctcattctacctgtaaaggaaacagtaagaaaccagggaaaggggaaaatgcgtagatatatgcaacccatgcaaactttctaaccatgtaacactgcatgtctatatacgatagcaaggtaatacttattctatatttgcttctagtttaataatttagaaggtgcaacaaaggaagaatgttatactgaggattagcaaaactatcataaaagaattttcaatgcttgaaagtggaagcaaaagcaactctgccccagaaagaatgtcatgatttaagagtcaggagtgtttatatttgcttaagaacttaggaattaaaattccctgcattggagaattcactttaagacagttgccatacaacaatcaatgcccacattggtgctctcttaaacctattttcagctcctcctttttctgatgtactacagaaaccctgcaaagaagactttattcaaaggcttaaaggaataagtaagaaaaaacactgaattttgttaagtgttctctgtaccgagagtcacttacaaatacatcaccccttctgcaaacgtccattttcaaaacgaatgccctttccataaatttccattccctgtgtggctttgtgttagatggcttctcattcagaagcagaacagaaaatgatgcataatgtctaaaactatagatgtgagacatatatacatatacatactaggaataactagttaagtgagaggtaaaggtttaccctttaggttgtaccacattaaatgaagaattacacctttgccctgcttctcttctgaagcaaagtgctagccttttccagaaaagcttctcattctgagaactgtctcccttaaaatacctgaagaagatatttttccaagttcctttcacctttaagtctttatgcaactcttagactcctcaagtagtctggcaattatccaatagcctattgttatcaacacatactctaaaatagttgaggtttcccagggtttggatcccagtgtactgctatgttttatcatagatatcctaaagccttccttcagtgactgacttctgcaaattcccagctgtggacacaggtggcttctcagatgaggtgactttctgactctgcctaagaatacactattgatgataactgaattctcagacaggaagaaaacaaagactctaacagggctgtctctctcaaatagtcaagatttccaaaccaggcaaaggtttaaacctgctgtaacaattctgagaacaccacagaaatgaagtaaaacttctttagatatttattattggctttgaaacaatggttttcagcagcgtgaaagagaaagatcagaatcacccaagcaattttttcaagccacaaataaccaccccttctcacatgaagagtcacacaagccctttttagaattagctatacatacatgatggcatctccaggagtataggagaaagccagcaatgcgtgatttttaaaaataataataataacaaaagtcatgtaatatgtcctgccaccaacttacctcccacctcagaatcatcccagattaaaaacaaatgctttagaaaatatgttgtatttttagaaaaaaaaaatgcaacyattcatgtgaatgatgcagctgcaaagtttaacaggagatcaaagacattttgacatttaggacataaatacttggcccttgggtggccaccatcactgttctcccctttgcctgttcacctcaaaagctgcaagactcccctgcttgcaatgagtcacccaccattactcacaaatttctgccaagttcacgtcagcagctgttgttttcaaagtcaacatccatgctgtaatgttttgaggtttctccattactttataatatttcttctatttctctgctgtcttcccagccaaacttgcattcagaagcaggcatcttactagcattgctctcatawacaaatccaggatatcagaagtacagagtcaaccataactaacattttaactaaaatttgttatgtcattctacagtttctcaacaaaatactctcacatccttcaaacaaataaccactatattacttagaggctgtgaaggtagaagactttctcarttggaaacacgtttgggtctatggtagggttgtgatttcaatttttgcagttagctaaggcaaagagacacactgcaaattttcttcacatgtctggaatttaaacttttattaggtatggaaacagtagactaatctacaaacatatgttcatattaccaaataaatagagctttttaaaaatgttaacatttgccctatagacatgtaagaacttggattaggtcttcagtatgtagaactgaatatgaggtatcttgtgagataaaaacttctatctcttttttctttgtattacttacttctccaagaaaaaaaaaaaacttctgatcttgcatcaagtcacagaatgcctttcagacaatatcataatgccattgaatattttaaacatatatagttaaaaattatttttccaattttccagagctgaaaaggaaacatctagaaaagcttgaattgccaaactttactaaaatatattagcagttaaaaagcagagccctgaactcactgaagggcagagggaggtattaaagagcaccctattctctctggagaactcagttgtgcggctgtatgttaagtgtgtggggaagcattggcaggaggaggaggttgggatgtctgaggtggatggaagttggagtataattgctctctgatagtagaacaatggagctgtaaaaagctctgcttcagttcaactcagctttctctccctctttccctcccacctacatgacaaacagaacacaatcaggcactttttgtccctgacagtgactattaccaggaaaaggaccacggtaaaagcatgtcttatgcaagatcaatctcctaaggaatattttataaataactaacaaagcattgtcagagtgggatatttgtgaggtgctaaaatagggaaaaggaggttgatgatccatttcaaacatttccatttattttatcacttatatttctgacttttcctttgcccctcttcctactattgccatcacttcgttggtaagggggcggcaatacgactccgcaattcagttgactgggatacattttccagcactgaaatgaaaaggtactagatgagaaccagaatcagaaagaagcccaaaattgtagttctgtctatgccaaatactaaccaagagaccctggattagtcacttagcctctctgggcttcagactacttataaaatttatttcacaaatatgtctgatgtgaaatgtaatatgaaagtcaaagatagtaatatctcacctacctatctcagggagctgtataggcactaggcactatatgaatgtaaacaaagtttagaagaaaattgttgaattcaggatctaaactgaatatgcagatatatttttatggatcttattggccttcatttttaattgcaacattcaattcaaagttaatagcaatattcaaaatgaccaaagccaataaattaagtatttaagtgctgcctagatgcccactgcatgccatgtactaagaagggtaagaaacattaggaagsctgaaytgagatcttcctccatttaccatctaaacaggaaggtacrtgggaaaccactaaggaatggcacaagtcagtacataggtgcagtgrcaaacaccataggaatgcaacgatgagctggaaygagttggagtaaagaggaaagacttggtgaaggagatggggctccaatggggccttggaggaacttcaagttgttgtaacaggggagagaagaagagaagcataggaaaaggctggagaatcctggcttgtggacaagggagagttttaaaagcacwtgatgatcttggatatataggataagataaaatgatgaarggctgtgactgcctgagtctctggttttgataagtcacttcacatgactctaagatgttggagggttaaaacagtgtggggactgaaggatgaggagagaatacayagagctcaatagaagaccagtgaaaaagttcaggtatcaagtgatgaaatccattcatcagaatagtagcaaccagaatggacacttgaaaccaagaccacagttcctgggractgataagatgtggaggatgaagaaagagagagaaatcaaagactattccartgytttggttakcagggaccagaagaatggttatcccattgaataagtggaaatgttataaaatgaagtcagtttgtgaacaaacatcagttttggatatattgggtttagaggcatgagctaagagtagagatgtgagaagttcaaaattccacaccaaagcacagacctagagccccgacttaagatatagatggagctagagctcaatgattaacaggtgattgaaaagaactggccaaggcctacttccgtgaggaaatactgcccacaagcagtgatagaagagaagtcatgcaagacagaaaaaagtgatacaacagagagattagaatcccactttttctaatacttgataagcttgagagagtaacttaaactctacttcttcatctgataaataagacacctaccactataaggttgttgacaagactaagtgagattaagtgataaagtatgcaaatcacatttagcaacctaaaaaycagagtaggaaaacaagaaaaagagctatcataaaaagcaggggcttgtttttcaaggtaaaatcagagaatggaactggtcaaaggaatattttagcaaatgccaatagtctraaatgtaagaaagtacagtgcgtaacacacaaaaagttacggacccactcactgcagcaattatctcatcaggggaagaattcaagaatgcctttgtgcttrctattctctctccctggaatgctattccccctctggattgtgctaaaatatcacctcgtcaaagacaccctgaccctatctgaaytattattcttattattctctacccttttatcctgcttcatttttgtttactgtaatactactaacaatattacatatttgtttgctattagtttcaatcataggaaaaggaactttgttttctgagatatccccaaaatctggccatagtaggcactcaataaatataaattaaaaactcaaactacctcatcataaagagtaaatgcatttggatttggtagaacactacagaaatgcaacataaagtgaatttccttctctggatcaccttgaaaaaacctgcctgatcttaagaaagaagttcagtggtcttcataagcactactagtgtaaatccgtaacagccatagatgagtaaacttacagtcaccttcagaaaagyacatttactaatasttactgcatgcctaccatgtacatcagaaacaaaaggtttggggcattttgcagggagtaggtggagtgatttcccagcatcagaaattttttaaactactacataaatgctacctatttccagaattcacttctcaagttcccaaatgcacctcaaagttgtctctatatgtaacacttccttcaacacacattgatccacatgtcttctttcaccattaccttgtttgtgggccattattactcctaaatattttaaatgtctttgtctatcactgggkagattcacctgtgatatgagagatgcccaatgtacatttasttaaacaaaaataagaatacactccwatgcactataacagacaaacaaatgaatactgggtatcctgtagcaaggttccaaattcacagcaattgaatcttagaaagaacattaaaggtcatccrgtccagcggactgcaaatgtcaggcttcagtgaactttttactgatctatgtcaaaatgaggacaatgtaataagttttcataaggctaagttttttaaatttaaagacaatcctttagtcagattatattcttccttatatttgaggaaggatactaaaatgtttttttctttcataaaaagatggtgatagttgatcattgttgtttcataaataattcttttacttagcaaaacaaaaaacttagcaattgttagacttcaattgtttttttctttttttaattttacaggtcagttaaattcaaaaatgtgagaacctctgctctaatccaaccaattttctgctgcctaaatgccttagaacatggtcaacaagttgtttttctgcctatgcatgaccacctctgacgacaagtctctagtaatgtggaaccatcaactgaaaaaagatatggttctatctgagggatgtttgcttagttttgtgaaggaaaagcaaaaaaatcaaggcttacagagagtaagccgacttgtgaaaatggagccagtaaaaaaacaagtgccaagaagactgatcagtaagagaagatcagagggatgcactcaggcctatacctcacagtcttccttcaacttattatgaaaatcctttatacaaataactataaaagccagactgtaaaatacattcctgaggtcagggctggtcaatttacatttccttttgcacatctcagtttaccatctgaaattcctttactaatctacatctaaactacatctctcaatttactacctgaaattcctttactaagctacatcttttagttacacatctttcaggtttgatcagaagcaaatgtaacacagtctcaatatcacccagacccagaatgcaacagaatctaaatgccacatatactcaagtatgcaaaaaacaataagcacaaatatatagtccaacgacaatttttaattatatgagaattaaaaaggatgaaagttggaggcaaggaatagaaaaagcacaaaagatcaaaagctaatttcaaggagtccatcctgaaggaaccaggaatggtgggtacagatgcctgacctccctccaagacaatgtgccaacaggccagtggagaacaaggtgggatctgagaacaatgtaaatttggatgttaaaagagaacacaagcaaaagcaccacgcacagtgccaggcagagacaggcattcaaatatttgcacattgaatgaattaataaacagacacttacacaaagagaatctggggccgtgcttccaaccataccataaggcactttaagtccaggtcatctttctttgacttaaagctcaggctaaaaatctaacttcatgaaaagctgagtcttcctaatagtttccactggcctctgttctagcccagctctggcagtgaggcccggtaaagttccttcctaaagacactgcctgcaagtctcaaatccggcacacgggatccatggtggagggatgttaatgggagtggaggcaaacaggccaaggggtggcaaggaaaaaaactatttctgatccacagaatggcaaataacaccataacgagttcttgaattaggtttaatcctggacagaaccaaatgaaaataaaaacctacttgtatttataattaaatagacagaaacaatgaaaaagtctcaccaactttagccacccctgattgaaaggagttttaacaattctttcatccatgctggcattccaagttttccattatatctcagcctctcattgttccagcactattgatggaatctcaatgccaaaaatggcgctggtcatcaaaattatgattagctgatctaccctagagtcagtttatcaatgtttcaatgcatacatcaattctattttttattatttcaatttaaatcatctgtgtctctattccctccctccctccagaggctgctttcccacacccttcttttcacctgcattctaagtattcccttgttctttcctttagctccctctgttccaaaagtaaaaacgaactgcaggaacttatgtagaaggcaggtttactacagatagcatacctacatgttacatattatataccatatgttggctaaatacagctagcatatcctgctttaagtgcttctgagcctgggcagacccccgtgtgctcatgctgctgatgtgaaccatccaccatcatatttcctaggggttcaggtgccttcctccagcctgctgaagaacatgaccaaatctcagagccctcaaagccacagctatcgagaggtgactaagcccctgcttctgtcagcccaggaaggccaattcaagagtcttatctaccccctagatttccacgacctgttccactcaagctaaaaattctgaaacgcacttttagaaactgtcgttccagaatcccattagctctcctaaaagggctgaacatcaaaaaattattcaacccaagccaagtatccttattttggctggaattctgccaaataaccacaagagactggtgcggtacaatcggcatggagtgaagcttgccaaatttgaccggagaacgacaagcctccatgaataagctctcatgaaaaggtaaaccattcttcaggatgaggtttgtctgcgatttgaaaagtcagattcaaaggactcttgttccttcctaagagaagagggaaccaaaattgaaattttcgaaactcctgggtatttacagttcacttttaccaagatgtttttaaaactaaaaactaaaatttaaaaaaaaaacccttgttctgaataatgcaataatgtcttctacataatgtttcagctattatttctagaaagtaattctgttgccagtgatcttgaatgtacttgggtaccaaagaaaaaagacacctgtgcctggcaggtcgatacgctactaatttgcccgaggtacgaacgaaacagaagatgctgatttctggataaaacgttctgcagtgccaggtaaaagaggtcacatgccctgaacggccgccgctcatttagagtgatgcaaaagctcctcagatattaattttgttagaaattcggggaatcaagcaacctaagatcaattcatttagacagcgggtgactggtactttccagtttccttttttcaacggactcagtgcatcctagcctgatctcttataaaggggtaggcaaactcggcaccaggtgcccatgcatttcagggaggtacacacaggacctgcagggtcacccatgcacagccccaccccgaatcttctatccgcccgagatggggaagacccttccccagaaatcctgggcagcgttttaagtcaccgcctggccaggctgagtttccgtccgcgtccgctcaggactgcgggcacagcgcctcgtcacgccccgcatctcccacctcccgccggccccggcggctgtccccagagctgcgcccgcggccggcgacacgcgccgcagcggcgcgcttatccgcagcggcgcagcccgcccgcccgctcactcacgcgggaggcagcggcggcgtctccattgtggctcctctcgggcttcagaacgcaggcaccgaccaacacagccagcaccattccagccgcggacgccggcactgcccgcccgccgagccgcgttccatccgccccggagggggcgccgcgctctcctcaccgcgcgccaccacctgcggcggcggcccccgcggccatggcccgctcggccgggcgcgctccgtctactgcgcggctcccgcgctcgcccgagtgcggggcggcggcgacgggaccggcgggcgcgcgggctcggccacttccgggttcggccccggccggcgccgacgctgtgacgggactgcgatgcggcctcccgcggcggccgagtacccctccctcggcgcctccccttcctcctgctgctgctgctgccgctgccgctgccgcttctgcttctggaggcgggcgggcgggcgccagccgggtgcggggcgggcgtgcccagacgctggcccgcaggccgggacgcgggcggcggccgcccacagcgggtctctggatcgccgggacgggggcgctggaaaatgggagcggagggggttctccgtgcagaaaaagggcggccgaacgcacggcgtaataatgctcggtatccacttgctgctctgcttcgcgggcgtgtacacgttattcttttcatttgtgcctgtacccagggagatgggaagggtaggcataaccaaccagtgtccttacaaagggtggcactgaggcaagaagaagtgatttgcctgtccagtgtcccaggcaggaagcaggctctccctcctcagtatgctagccattccttggacaagtgaagtgagcacctgctaagcaaggttttagtgctgcggctgtgacagcaaaaccaagtctttctgcttgtggagctgtccatctagacggggtgacggaaacagtaagtgatgcttaccatgaagaaacataaatgaggatgaggagagggaaagagattttagaaagagtggtcagagaaggcctctcaaaaggcatgagttaaagagatggaataacaggggctttgagtaatgcaaagaatgcctagggcagagggaagagcagcgtggagactgctaagcaagatcctgcctgccttgttgaggaacgggaaggagaacagtgcagctggtggttctccaagtatgcccgctggaagcagtagcacctgcgaacttgttagagatgcgaattttccagtcccactttagccctactgaaccagaaactctgggggtggggcccagcagcgtgtgctttaacaagctttccagatgatgcttgctggggccgcgagggtgggagaccctctaatgaagcagagtgaggtcaggaggacggcggcaggaatgggtgtggcgaggagtaatcacagatcacccaggccttgcaggccgtgataaaggacttggcttttactgagattagaagcaattagaaagtggtgagtagcttgatctgatcattaaaaggatgacttttctgggatttgtttgaaaatatcccacaaaaagaaggacagaggtcgggcgccgtggctcacgcctgtaatcccagcactttgggaggccgaggcgggccgatcacctgaggtcgggagttcgagatccgcctgaccaacatggagaaaccccgtctctactaaaaatacaaaaaattagccgggcatggtggtgcatgcctgtaattccagctactcgggaggctgaggcaggagaatcgcttgaactagggaggcagaggttgcgatgagccgagatcgtgccattgcactccagcccggtcaacaagagcgaaacaaactccgtctcaaaaaaaaaaaaaaaaaggacagagaagtgaatagatgaatatttgcaaaatgttaatttttgaggctaagtgttgggtgcataggggtggtcatcatttatgtgtgtttatgtgtatgttttaaaagataataatgggccgggcgcggtggctcacgcctgtaatcccagcactttttgggaggccgaggcgggcggatcatctgaggtcaggagttcaagaccagcctgtccaacatggcgaaatcccgtctcttctaaaaatagccgggtgtggtggtgggtgcctgtaatcccagctactgaggaggctgaggcaggagaatcactcgaacccaggaggcggaggttgcagtgagccgagatcgggccactgcactccagcccaggcaacagagcgagactccgtctcaaaattcataaataaataaaagttcataatacaaagttttttttaaaaaaaaagatgactgattgctgtatgggcaacatgcatagcgaggcaagagagcaagcaaagagattagcctagctgggatgaaaggtaaggatggcttggattagagtccgagtgactgagaaaagtgaacaggttctgaatctgtttagaaggtaaagtactcaggaactgctgacagattagcatataaaagaaagatgatcctaagggttttgttctgatctctggggagaattgagttgccctttactgggattggggatattgagaaagaacaaatattggagggcggggtggagattgtatttgtaaactctgatttagatatggtaagtttgagatgtctgttaaacatccatgtgaagataggtgtagacaattagatatatgtatctggggtagatataaatttggaagttgttagtatacagatgggtattgagatcaactagattatgtagctagagaaaagaagtagaccaagaagtaagccctggggcactccaacattaaaaaagaagaggaggaggactcagcaaaggcgatggtaaaggaacaaccagggaagtagaaggagatccaaggcaggtgtcttggcagcctagtgaagggttccagaaaacaaacaaacaaacaaacaaaaaacccttagtacacttcagcatgagctaacttctctgtatgatggttctgttcagagccataataaaacttcctactttacaaggttgttttaagaattaagtgaaataattgatgtaaagtatatagcacataaatgtataatggaagcacttaataaatgttagttgctgctattatttctgtacacttctgtggccatcagttataccttactctgctaggaactgggttaagtcctagagccaggagatactgacttaggttttaccaaacctttggcctgacttccttctgcatgcaaactcagtgagtagggctgactcatcagccatttcaggaactcttttgaggcggggggtgggaggtggactttttctattgcttttgtatcttcccacccaaaatagtgttatgtgtacaaataaatactaaaaaattacgatgtgtccgtctgacagctaggcacataacttcaaaccatagcccctctcacatcctcctctgggttagttttgtctatcataattctttgcttaaggggttcgactcatctagcatgctaaatgtcaacccaaacctttcttttttcacaaccacccccatttgtaggcttcacaagtatactgggaaagagtacattacccacatacaattcagccttacttggagttaaatgtcacaccaaaactggtcctcagccagatacagcctccacccttaacctgtctctctgctcacaagagaaagtaaacaaaaatgcttgacaggctgagcccaaatccaacattacagtggggaagaaactttttaacacttcttcctttgactctcagtttcactatcttctcaagtgaaggacactaaggattaggagcggctacctaagaccaccaagctcttctctttttcatttcccttgacataaggtctgactgaacatgcaacggtgttgacctccccttgcgtaggttattacctccacccacgttttcatcattctttagctgagcccttcacacccttggcagaggaatgagatcttacaaaagtccatctgcctcctatgctgttaagatagaacaattccttaagcatgttagtaaccataatctaaagctaatgtaagtaaatggaatgtatcacttgtaaagaaaatggaaccactcagatgaacaagtccgtgacagtggctagtggcaaaaatcccttagattgagctgaaatcagatgttgcaatagaactaatgacatgacatggcaggcacaaacacatctcatggcaagtatccgggagctaagaattgctcctataaagaaaagacttaacttcgctgaagaatacaaaaccattagatgctatatttgtaattccttccagtgcaaagatggcaagtatgaaaagattcactcattcaaaattaggtactaaagaagataaaggccttctaaaaagtcgcattttctatcctaaagacttagtttaagttgctttactaattttaaattagggattttgcttttaatattttgacttaggagaaacttagcagcataatatattaagaagcatttcaaaatgttcttttgatactttgcggtttagcaaatggatttgtcaatacattaagatatgtattacaagctttatggtgtcaaatggggtgacgtgcgtcttgtgctccagatcaatagacaatccttaagtgatggagtccattgtttccatgaatccaatttactcttcaaatgcttgcctccttgtttttgtagtctgtaagatagcaactttacttccgacacagcatacctccccattaccccgtatctgagcttcctggagaaatgaatgcaaattgtttgctgcaaaatttaattgaaaatctgttggaattggtacaggaagtatccaaaaataggtttcacactaatgtatatcaggtaagcaatttctctgtgttttaagaaaaggaaatttacttaatctatttttacttatatatagctttatggtatctatttatgtagtctggtgatgtaatccctcatagaattatctaggactgaacatctttctacacagtcagcagtgctggggggaagaaaaagcaagtaaaatttcttgataaattatgcgaagcattattaggttgttgtcattcatctgaaattatgcatccacacatacacaaaaacttctccccacagcttctgcctgtccattacagctgactgttaatagcacaggccctaagcaaaattgtgaaataagtttgccttggcattctcatttttcccattttcttctcttttttcatgtgtcaatacatctctcacctttgacaccatctacaggtctccagtgtcctctctccatccctaatcaaaacttagaaatgatcagacatcagccaacagaatgattagtgaactacactttaaaacaaatggcttttagacatggggtaacctcatactagtatcatttgagctgaataatatctttataccctacccctattgtctttcctagaatgcattcccatgtcatctatattattttaattacaaaattatttacaagttgtgatgtttaaatgtgtctttcattaatataggtattactgaataacactgtgaaatgaatgctttactttgataagggacaatgcagagtataggagataaaaagtattcttcttaaactctagaccttttgagaccatacctcagggagtttgtattacttgttcaaattgttcacatgctaatacaaaaagataagtcttgaatttccacataaatcctaaaatttgagctcggcccaagtcttggaattatttttgcaagaaagagtcctttgccaagaaatcctttctagttcttaatctggtactagtcagcttctggatgcagagaagcatgtttaatgcaggatataagtggttagtcaattcctgaggcatccatatttcttcattttccttgttaagatcttggtaataatccaacccaagaaatagaattaaatccaggctgcatatgtatgagaactattcttcattgaactaaaaatgaacctgagctgccattttgaagtctttgttaaaagccaactaaaattaaatcatgagaaaaatattcaaagtcatattttctgaggcaaactgattcaagctgatcttgattgtattatatttagatatacgtatcaactttttttctatgtcacatacggaaaatactgaccaccctattttaaattgcaactggcactccccctgcaccctcaacactccctaaacttattttcggatttgttt

SEQ ID NO: 97257 - DNA, 14683 bp, Homo sapiens
aagcctcagtctcttcatgtgatatagggacaatactgaccatcccaatttcaaagggaaggttaagtgagatgttggtatacgctctttgtaaatgggaaagtaatcatgaagtgaaagagactgagaagccaatccaagcctttctctcgagcctgttttcatatggaccaatgacacagataatcacaagcttctctgacaagaaaaagagtagaagacttgggttcaaatcctttgtcaccacttacgccggtgtgacttttagaaatgcatttattcaccaaatatttatcaagtgctcacaacatgccaggcactaggctagcagccaaataaaatatgaaacctgcccttgaaggatttgcaatctagcaggaagaggccagcaaacaagaaagagcaataaattgttttaaaaaatcaagtcgtctctcgtaagtctgtttgttccctgtgaaatgagaatacatcttcccaacctcactcataggcgctgctgcaaaaactaatttttaaatgtttgtcaaataactccaaaaacttgaactcataatacattaggaaagtactttttcctacttgtaacccaaaacgatgctggctgctgtgaatgtccagtttgaacattcgttccagttacactgcactcatgaaactccttttgcttctgcaaattttagtaaacatgagaaacaggaagatgaacaggctttaacacaagtattcaatctcaaaatcatgatccaggtcacagttctaaggaacataacacagacctctcaggcaccctacctagttacagttcgtcaagataagcagtcacaagataagctaagggaaactgaataatttaaacggaagaaagagaaaagtcataaagcagtctaggtagacacttctctgtccaagatttcagcagtcactatgttgctgaggtaacgctgggctaggtcaacagtgtaagctaaaagccattttacaggcaaagtgcccacacttatttttttaatttattttctttttttgttttttaaagcctcgatgatggcccgttcagggaaaatctcaaagaaaaatgagctgaagggctaggctcccaagaagtggaaaccctacccacgcaggactaagtgggcgcgagggaagcaagacgatcaagattctgtgatccctcctgaagtttaaaaactgaatgggaccgtcatcaaagtctcgggtaacaatcatttccaaacaggaaggaagggagagactctcagagggggtccaggcagcatctttttccctctggctccacgccataaacccattttcaggcacccccttccagctcagttccaagtcgccccttcccctggtcccgatccctccacaaagatcgctcctctccatgcctgggaacctaagctcctctccccttccgggaggactcgctccagctgcacccttggcggccggggcacccatttcggagcaacccccgcgcgggccgcggcgcgcccaccccactcgggcgggagccgggacacccctcctcggaggccggaaccgccgcgccaggcccctcccacaggaagccgccgccccccgacgcccgggccgcgccgcccccggcccaccccgcgccgcccgccgcccccggcccgccccgtgcaggcagccagcccaccgcgccccccgcgccagcgctcgctacctgccgtggccacagaagcggcgccgaactcctctcctacttccgccttccaccgcccgcactcgggccgggtcacgtgaccgcgcgcggtcacctgacccggaagaggctggccaggctcgcaggtgcgggccacctaggcctggcctgggcacctctggcctcgaggaggcctttttatcgtctctgtagttgaaagtggaagggtttctgctcaccggatggtcccaggcaatcaaataaattgagggctcactgaatgccacctactctgcccatcaaccttatagaggcagggacaggtactagccccattttacaggtgaaacgagaccttcagactgttaagtcagcaaatacttaattgagctcctttagtagggttgccagataaagtacaggacacccacttaaatttgaatttcagataaacaacagtgtaatatgtatgtcccaaatacagaatgggacatatttatactaaaaaaagtattttttgattatctgaagatcaaattgaattgagtatctgtatttctatttcctggcaaccttatgcctattatgtgccaggcactgttctaagatccaggaccacaaacatctcagcctttgtggggcatctgtccttgtgacatgaagcaaaagtacaaaagcttaaaaactcctgcttggctccataaaaagcccctccacactaatccaatcgcattcccttaatctacaactacagggcacagagaacttaatgaattataatccaggtaggtaggtaggtaggtaggtggatagatagatgatattttttttttttttttttgagatggagcctcgctctgtcgcccaggctggagtgcagtggtgcagtctcagctgactgcaacctccgtctcgccggttcatgcaattctcctgcctcagcctcccgagtagctgggattacaggcgtgcaccaccacgcctggctaatttttgcatttttagtagagacagggttcctccatgttgaccagtctggtctcgaacacctgacttcaaatgatccgcccaccttggcctcccaaagtgctgggattacaggcatgaaccaccgcacctggcagagaaatattttttttaagagatgggtctggataggttgctttggctgggctcgaactcccagcttcaagcagtcctcttgcttcagcctcccaagtagctgagactacaggcgaatgccactgtgcctgcccaataactttatttatttatttatttatttatttatttgcttgcttgagacagagtttcactcttgtagcccaggcaggagtgcagtggctcaatcttggctcactgcaacctctgcctcccaggttcaagcaattctccttcctcagcctcctgagtagctgggactacaggcacccaccaccatgcctggctaatttttgtatttttaatagagatggggtttcaccatgttggccaggctggtctcaaactcctaacctcagatgatccacctgccttggcctcccaaagtgctcagattataggcgtgagccaatgcgcccggcctccaagaacattttaaatagacattcttgactgatgttctggacaagttgaatgaaggctcagtttaatcaccattgattaaaattaatactaatgacgtaattagcctcaaagacttgtactaatctgttatttttgggtcttcgaattgggatggattctatcatgcatacaaattaaattggctggtggggcgtggaggctcacgcctgtaatcccagcactttgggaggcagaggcaggtggattacctgaggtcgggagttcgaaacccacttggccaacctggtgaaaccccatctctactaaaactacaaaaaaaaaaaaaaaaagattcgccgggcatggtccgggtgcgggtaatcccaggtactccagaacctgaggcaggagaattgcttgaacccgggaggcggaggtggcagtgagccatgataacgcctctgcactccagcctgggcgacagagtgagactctgtatctaaataaataaataggttgaacacttagtctctactttttgtagtaccactccaaatccaagagattaactttcaaggagatacagtcctgtctttgtacattaaaccctatattagtctcatttataaaactactataactaaaacttctccagttccattgatggcagttttactaattctgttctagataaattagagactatttccttgacttactagcatttgttggtttcggtttgttttcttctttcatatttcattttttatcttttgttgcttttttttaacaaccctgcagaaaagatttagtggcatctgagtaagtgttcaccaaaggggagaagggacaagcaaagagcacacactgcacattaaaagaataaaatctgacagggtgcggtggctggcacctgtaatcccagtactttgggaggccaaggcgggcagatcagactgtcaggggctcgagatcagactgggcaacatggtgaaaacccatctctacaaaaaatacaaatattagctgggcatggtggcacacacccgtagtcccagctaatcaggagcctgaggcttgagaatcgcttgaacctgggaggcggaggttgcagtgagccaagattgcacactggactccagcctggatgacagggtgagactctgtctcaaaaaaaaaaaattgatatgataaactagaaaatgagaaatagcctccagccatactctgttacggcaggtagcacaggcacgttctagataatgaagagactgagtggtgagaaatgttgagccaggtgcaatggctcacgcctgtaattctagcactttgggaggccaaggcaggtggatcaccgtacatcaggagttcgagaccatctggccaatatggtgaaaccccatctgtactaaaaatacaaaaattagccaggcgtggtggcgggcacccataatctcagctacacaggaggctgaggcaggagaattgttgaacctgggaggcagaggtggcagtgagctgagatcgcaccactgtgctccagcctgggcgacgagagcaaaactcagtccccttcccgccaccccaaaaaaagagaaagactgaatttgggtaattgctgaaaggcaatattcagtagcactgaaggatttttggggtaggacagataaatgacaattgaggaatccagctggcgtgaagacttcatgaagaaagtttgcatgaagacccaagtcgacattcagcaaaattcaccggatcttataatcataaaatttcagatttgcaaggaaacgtagaagtcactaaatacaccttctgttcaattcagcaaggaattatttgctaccaaattatgtgtgttgcttagggaggtggggtgagactattaagacaaattagacagactctggccccacgttgctcaaaatgaagtgaaggcacataagcagcagtcagtataacagaatggataattaggtggctcagggacagcaccgtgtctcacacctgtaatcccagcactttgggaggccaaggctaaaggactgcttgaacctgggagtttcagaccagcctgggcaacatgatgagactctcatctctacaaaagtaaaaatgaaaaaactagctgggcatggtggtgtgggcctgtggtgccagctactcgagaggctgaggtaggaggctcacttgagcctgggagttcaaggttgcagtgaactatgatcatgccactgcacaccagcctgggcaacagagagagaccgtgtctcaaaaaaaaaaaaaagaaagaaagaaagaaagagagagagagaaaaggaaaggaaagaaaaaagaagagaagagagaaaaaagtggctctgaatcagtttgtctgggtgttacgttattttcaccacttactgaccatgtcagctacacctagtggctttagttagctatcccttgtctgtaaaacagtacctatcttggccgggcgcggtggctcacgcctgtaatcccagcactttgggaggccgaggcgggtggaccacgaggtcaggagatcgagaccatcctggctaatacggtgaaatcctgtctctactaaaaatacaaaaaaagtcgggcatggtggcgggcgcctgtagtcccagctacttgggtggccgaggcaggggaatggcgtgaacccgggagggggagcttgcagtgagttgagatcgcgccactgcactccagactgggcgacagagcaagactccgtctcaaaacaaaacaaaacaaaaaaaagcttttctcgggacgggagaggccgtgtagcgtcgccgttactccgaggagagaccagtcggtagaggagaagtccaggttagagggaagtgggaggcactttgctgtcttcaatcgaagttgagggtgcaaaaatgcagagtaataaaacttttaacttggagaagcaaaaccatactccaagaaagcatcatcaacatcaccaccagcagcaacagctgcagccgccaccaccgccaatacctgcaaatgggcaacaggccagcagccaaaatgaaggctttgactatttggcctgaagaattttagaaaaccaggagagaagaccttcacccaacgaagccgtctttttgtgggaaatcttcctcccgacatcactgaggaagaaatgaggaaactatttgagaaatatggaaaggcaggcgaagtcttcattcataaggattaaggatttggctttatccgcttggaaacacgaaccctagcggagattgcgaaagtggagctggacaatatgccactctgtggaaagcagctgcgtgtgcgcttttcctgccatagtgcatcccttacagttcgaaaccttcctcagtatgtgtccaacgaagtgctggaagaagccttttctgtgtttggccaggtagagagggctgtagtcattgtggatgatcgaggaaggccctcaggaaaaggcattgttgagttctcmgggaagccagctgctgggaaagctctggacagacgcagtgaaggctccttcctgctaaccacatttcctcgtcctgtgactatggagcccatggaccagttagatgatgaagggggacttccagagaagctggttataaaaaaccagcaatttcacaaggaacgagagcaaccacccagatttgcacagcctggctcctttgagtatgaatatgccatgcgctggaaggcactcattgagatggagaagcagcagcaggaccaagtggaccgcaacatcaaagaggctcgtgagaagccagagatggagatggaggctgcacgccataagcaccaggtcatgctaatgagacagaatttgatgaggcgccaagaagaacttcggaggatggaagagctgcacaaccaagaggtgcaaaaacgaaagcaactggagctcaggcaggaggaagagcgcaggcgccctgaagaagagatgcggcggcagcaagaagaaatgatgcagccacagcaggaaggattcaagggaaccttccctgatgtgagagagcaggagatttggatgggtcagatggctatgggaggtgctatgggcataaacagcagaggtgccttgacccctgctcctgtgccagctggtaccccagctcctccaggacctgccactatgatgccggatggaactttgggattgaccccaccaacaactgaacgctttggtcaggctgctacaatggaaggaattggggcaattggtgaaactcctcctgcattcaaccatgcagctcctggagctgaatttgctccaaacaaacgtcgccgatactaataagttgcagtgtctagtttctcaaaacccttaaaagaaggaccctttttggaccagccagaattctaccctggaaaagtgttagggattccttccaatagttagatctaccctgcctgtactactytagggagtatgctggaggcagaggacaagggaggggtggtattaaacaagtcaattctatgtagtatattatttaatcagttctgtgtggtgcattcctgaagtctcaaatgtgattgttgagggcctggggaaaccatggcaaagtagatccagttagagcccattaatcttgatcattctgtttttttggtttgtttgttkttttttttttttttttttttttgtccatcttgtttcatttgcttgccctgcccccgagatggagtcttactctgtcgcccaggctggagtgtagtggcacgatctcggctcactgcaatctctgcctctcgggttcaagcttgtccaggctgatcttgaactcctgacctcgtgatcccctgcctcagcctcccaaaatgctgggattacaggggtgagccaccgtgcccaacctcacttgctttcttatccttacactcccccagtcccagagaaactgccacatacaccacaaaaaccaaacatcccccaatgaccttagccgcattgctccattcactcccaggtgagaattcaggtaaacgtccacaaaggtcacaggcarcgtacatacggttctattatatcccatatattaccccttcatgtcctaaagaagacattttctcttagagattttcattttagtatatctttaaaaaaaaatcttgtgttaacttgcctccwtytttttcttgggtgaggacacccaggaatgacccttttgtgtctatgatactgctgttcacagcttttcttgataggcctagtacaatcttgggaacagggttactgtatactgaaggtctgacagtagctcttagactcgcctatcttaggtagtcatgctgtgccttttttttccattggtgtattgtatttgatttgtctctgatatatttggagtttttctgagaactggagcagtaatgcagcatcgacctattaaaatacattttaagcctttaaaaaaaaacagtacctatctcataggggtgctgtgataacgaaattaggtaatctgtattgattgacttttaaccataagaatatatacaggttttaaatttatttatttattgaagagatgggggtctctctatgttgcccaggctggtttcacattccagggctcaggcaatcctttcgcctcagcctccttaatagctgggactctaggcgcgcaccactacacctggcaggttttatcttcaaaggtgaagaaggcactaaggtctagatgctgaagccgatttcccaggtgtcccccaaggtttgaccccgcccacacttctctggctatgcgggcggcgtcgctgcgcatgcgcgcgagtagagcagggaggtgctggcgcggccgccaggaggcgcagctaagtcgcggctgctcttcctggttcccagaggcccagacttggacataggagccggcgcaagctccgtgcgcatgcgcgctcccctctcacgcagccaacatggctccagtggagcacgttgtggcggatgctggggctttcctgcggcatgcggctctgcaggtacggggagctccctccgggacgagagagatctgggctggccgcccctcccggagtgcgtggagtcgcgcggagcgttgcttggtgcgggtgggtctgagctggggcgttctgtccgcaggacatcgggaagaacatttacaccatccgggaggtggtcactgagattcgggacaaggccacacgcaggcggctcgctgtcctgccctacgagctgcggttcaaggagcccttaccggaatacgtgcggctgggtgagtgcctctgccctagcgttgacgggaagctggggtccagggcgcagatggcacccagttgggtgcgagttggggtctagctgccttatcagagcagtagatttagagccagcactttctaggagattgtggtaggagagaggcttcctgggtctggagtcctccagtaactagctgtatgctctcgggcatagcattcaaatttgggcctcgtttacctcatccgcaaaatgggaataataattgtatctgtctccaaggttgctgtgagcatgaactgaggaatatggcagtcagctcagtgtcaagcactttgcagacaagcaataaatttatttggatttaaaataagagtttggatctcttgctattactctcgtccattccttttcagtagattgggctgatgactggatacaaagatctgcacctggcagagctttaaaaagggaatgctttgcattgtattaaatgtgaaagaaaattaagctgggcgcggtggcttacggcctgtaatcccagcactgggagaccgaggcgggcgcatcacctgaggtcaggagtttgagaccagcctgaccaacatggtgaaaccctgcttctactaaaaatacaaaattagctgggcgtggtggtgtgctcctgtaatcccagctacttgggaggctgaggcaggagaattgcttgaacctggaggtggaggttgcagtgagccgagatcgtaccactgcactccagcctgggcgacagagcgagactctgtctcaaaaaaaataagaaataaagaaaattaaagaattgtctcttggcttaggagtcagcgttgttctcttgttgggaatcaaggtgatacccaggaaaggcccctcagtggttggaagtgttttagaggttagaggctgatagtggagatgatgttacctcctctgtttgtgatttctacgattttctccaccaacttagtagctctgtgatctttgccaacttactaaatctttccgaggaaatactaatagtacttttgaagaatggcaaaggatgaaatgcattaacacataaagcttttaatgcagtgcctagtacacagtaagtgcacagtaaattttcgttgctgctaatgtctgttttttaggaaataagagcaatatacctagtgttccttgtaccagggtagcaggagacatctttctgttaatttcaggaaattttaagtgtttattatggatgactctggagaataacagcagtctgacatgtattatgcattaagcacatgctttttgtttcctcatagactactacaattacaagttgagcatactgaatctgaaatccagaatgctcctaaatctgaaacttttttttttttgagatggagtctggctgtgttgcctagcctggagtgcagtggcacgatcttggctcactgcagcctccacctcctgggttccagcaattcttctgcctcagcctccccagtagctgggactacaggcacacgccaccacacctggctaacttttgtatttttaggagacaaggggtttcaccatgttggccaggctggtctggaactcctgacctcaagtgatctacccacctcagcctcctgtagtgaggtgtgagccaccacgccccaactttcttcttttttttgagaaggagtctcactctgtcgcccaggctggagtgcagtggcgcaatcttgactcactgcaacctccgcctcccaggttcaaacaattctcctgcctccgcctcctgagtagctgggattacaggcccccccgctaccacaccgggataatttttgtatatttattagagacaggtttcaccacgttggccaggctggtctcctgacctcaagtgatccgcccacctctgcctcccaaagtgttgggattacaggcgtgagccaccacgcctggccccagccaactttctgctccttcctctgtatttgataagggtgttacagtaaatctaactggcatgaatcttggtggtggagaatacaaatttctcaactgcgagtaggaaaaggtcagaaaatggatgaaagtgttaaggtttttcatgacatagtgatcctttctaaattgttttgatacttccattattttgatctgttctaaattgttttgatacttccattggttatccaaggtcatatggctttttacctctaactgaagatgtaaatctgttgtttacagtgactgagttttcaaagaaaacaggagactaccccagcctctctgccacggacatccaagtgcttgcactcacataccagttggaagcagagtttgttggggtgtctcacctaaaacaagaaccacagaaggtaaatcaagaggatgggtttttaaaagctttgtattatgggaactgtcaggtatacaaaagtagaaggactagtgtaatggacccagggttcccatcatccccccctccaattatctcttagctagtctgtattcatctacactgatccacagccctgagtacttttttttttttgagatagagtcttgctctgtcgcccaggctggagtgcaacggcgtgatctcggctcactgcagcctccgcctcctgggttcaagcgattctcttgcctcagtctcgagagtagttggtaggattacaggcgcccacgaccacacccggctaatttttgtatttttagtagagatggggtttcgccatgttggtcaggctggtctcgaactcctgacttcaggtgatgcgcccgcctcggcctcccaaagtgctgggattataggcgtgagccagtgcgcccggcctcagccctgagtattttaaactcagacatcgtatactatttcactgatagatatttcttggtatgtctctaaagatcaagactcttaaaaactttaaagccatcattacacctacacaaaattaatagtaatgcctgttatcaaatatccagtcaacattcacattccccagttattttgtaaatgttaaagcgtttgtttgtttggatcaggatcccaatgaggttcatacattgcaattggcaagtgtgtctcagtcccttttttttttccctctttgatccagggtctagctgtgttgcccaggctggtcttagaactcctgggctcaagtgatcctcccacctcagcctcctgattagtctcttttgatctgtaggtttttgggaaaggtttaaatttggaaaatgcaaaaagaataaaaatctatatatctgtatataataattttttttaaaaaaagaactatttctggccaggtgccgtggcttatgcctataatcccagggctttgggaggccaaggcaggagcattacttgaacctaggcatttgagaccagcctgggcaaccccgtctgaggcaggaggatcacttgggcccaggagattgaggttgcagtgagttgtgatcataccactgcactccagcctgagtgacagtgagaccctgtctgaaaaaaagagagctttctggaggtaaaaaagaatgaacactaagtacttgcaagtgttttttcgaaccttgcttccttcaaaactttgacttcctattgtgtttttagggtcttacccactgtggctaggttgaagagactgatacatttgtgcctgcacccattgtctatttctaagccagaggattttagaagtcaaaaattttaacctaataataattcattttcaatagtgttgacaaataattgcttaatcttctctgcctaaagtcatcaaaactatggtggactcatatttttgcactagttgaaactaccctcaaatttttttaagaaagatggggtctctctgtgttgcccaggctggtctcaaactcctgggctcaagccatcctcccaccttggcctcccagaatgctgagattacaggcatgaactaccacacttgttttttgtttgtttgtttgtttgtattttaataagacaggatcctgtcatcacctgggctggagtacagtggcgctgatcacagctcactgcagcatcaaactcctgagcacaagcagtcctcctacctcagcctcccgagtagctgggactgtaggtgtacaccaccatgcctggctaattttaaaatttttttatagagacagggtgtcacttttgtccaggctggtctcaaaatcctggcccaaaacaatcctcctacctcagccttcctaagggctgggagttagtgagccactgcacccagctatttttttatttttattctctgatttttttaaaacactggatgtcagccaggctcggtggctcctgtgtgtaatcccagcgctttgggaggctgagatgggcagatcacttgaggctgggagtttgagaccagcctggccaacatggcgaaaccccatctctactaaaaaatacaaaaatcagtggggcatggtggcgcacacctgtaatcccagctacttgggaggctgaagcatgagaatcgcttgaacctgggagtcggaggttaggttgcagtgagccaaggttgtgccactcccctccggcctgggtgacagagcaagaccctatctcaaaaaaaaaaaaaaaattgggtatccttttttttttttgagacagagtctcatttttgttccccaggctggagtgcagtggcgtgatctcagcccactgcaacctccgcctcccggtttcaaggaattctcctgcttcagcctcctgagtagctgggattacaggtgcctgccaccacgccaggctaatttttgtatttttagtagagacagggtttcgccacgttggccaggctggtctccaattcctgaccttgggtgatccgcccacctcggcctcctaaagtgctgggattacaggcatgagccatcgtgcccggccaaaaaaaaaaactggatatctttaattttgataacaagaggtatatgttttttgtttttttaaaggttaaggtgagctcatcgattcagcacccagaaacacctctgcacatttctggtttccatctgccctacaaggtaatttcttagacaagccaggccgttcatgctcttttctgaaacatgtcacatctctctaagtcatctcttcacagtgaactaaatttacgcggaccaataacatagtttgtccagccctgtctgatctgacttgtatatcatatgtg

SEQ ID NO: 97258 - DNA, 39924 bp, Homo sapiens
ctagaatgaaatcctgacttaaaaacttcagatcacagtaatactttttttctttttgagacagagtctttctctgttgccgagggtggagtacagcagtgaaatctcggcttactgcaacctctgcctcctgagttcaagcaattctcatgcctgagcctcccaagtagctgggattacaggtgcgcaccactacgcctgattaattagatcacagtaattcttaaatatgggtttaagtgtctaacaatatgaaaatattaattacctttttaataagtaagaaaataataatacaaaaagcaaaaaaataatacaagactcataaaaacaaaaccaaacaaaacaaaatgataaaggatatagatattaagtaggtgacctttatatggcaaaacactcaatgagttaattctttacttttttcattccatttgaaaagcaatggggaccattgatctcactgatatgggggatacagagaagcccagtaatttcaagtccttcataaatgcactgtgtgcacaaatatcactttgaggccgggtgcggtggctcatgcctgtaatcccagcactctgggaggccaaggcgggcagatcacctgaggtcaggagttcaagaccagcctggccaacatgctgataccgcctcccctactaaaaatacaaaaattagttgggcatggtggcatgcacctgtaatcctagttactgaatcaaggagaatcgcttgaatccgggagacggaagttgcagtgagccgagattgcaccattgcactccagcctgggcgacagagcaagactctgtctcagaaaaacaaaaacaacaacaacaaaaaacaagtatcactctcatatttacagtatagttcttgggattgatcttaacaccagctttagcacccccaaatggcacatctgaaagacaaggctgatggttgttattccatataaaggttaaaaaagtaaaatgacagaaaatgccacacaatattagaaaaacgtgtgatgctttaagcttgaatttctgaaagttcaagaaataaacctaccatagttttctaaactgtactttaaacaacattttattgaacagaaattgttcaataaaattggctagccaagttctaatatatatattttatataattaataataattaaccaataataataaatacttcaacctctaatccatagattgcaaatacaatgatagcttattttcttggggaacagcagttggtggggacagagggaatgggaaaaggacttttgctgaaaggagggatgacaggaacacaaggctatgggtgaaaagaagaacaaatagaacaaacagcagagagggcagctggccggggtggggtgggcgcctccctggccttgctccaggactcaggactgggtcctgcctgggccacccctcctgccaaggccctggcctcttcccagggtgactggtccactcctagaccctagaacatctgaagggcaggggtcccaatggcctgagagggtatgggccaggggcagcaggctgacccacctgggcccaaaagccacctgtgtttgggggccggcatgctgtctagagagagagtgccctgggaaaggggcacacgggagtttctctcctgagaagcccccatgcaggtcggggcaaaggagagggctttatctgccttgagggcagcgctccctaagtgaagcaggcctaccccagaagcacagggacttggctggcgcctgaacttcctgtgcgaagcagcacctgctcttggagccccttagcctgctggtgcacacctggtttccaagtcctgcctggggacttgctaggtgggggacggacctggaacaggaccctaagcccaccccctccgcatacctggcggtccagggctccccgcccagtggagccagcacaggctagccaggccccactcctgcgtcacccccggaggccaagctcctctcctgcactggtgccgtcctgcctggcaggtagttctgggggcagggtcaaaggagaagggagggccgcagccctctgggaatggcctttctgagccaccagtggctggactggggctctggcaggagttggggacattaacaacacccccatcctcccctgggctccacctcatctgacgctccagaaccccctgccccaagcccctacacactctgttctattcctcagcccctctcaacgtcctggcaccatggggcccaatgcctgtcctcccttgagaaggaacagctctggggcaacgggcagcggggtgccctccctgccaccaagatttggtgcctggagctggtggagggctggccgcatctctctggcacaccagctcctgctcccccaacctatggctttggggcagagcctgaagggaggaagaaggtgggggggggggtccgcggctgtttgtggcaaataagctttttttttttccttttttaatcctttttcttatgtaaaaagtgcacaaaagttcggcagtctttgcaagtgtcagcagtgtttcctggggtgggggaactgggaggggcaccaggcctggcacccaccttgcgactgaaggtggcctcgtattgcttagaaaggtatgtttcagtataaataccagacagtaaaaatagagctcgaggaccacctgcactgttgccaaatcattgccagaatgaatagcttaaataaataaaaaatagaaatatttacttctcaataaaaataaaagtaaaaccatttacctttctttgcattatatataatatatatttataacgggtctggctgtgggcagcggagctaagggcagcggaggggtcaggacatctcgatgacctccacgctgcccgagaagctcgcctgcttgcccatggcggccagctcctcgccgcgagtgcgcccctccaggatgccctcctcgaactccatctggcagctgcagcgcttgatctgcgtctccgtctccggggcggctcgtcgggccagttggtccgcgcgtcccggggctcagcccttgctgcctccggccgccgcagctcgctgccgccgccccgtctgggggcgcccgcctgaccaaagggcgcgaacagcacccgcccgccccttgcgcgccctgggggctgaagcactagggcccgtcgggcgacggcgtgcccggggagtcaagcggggcgcccagactccggggccggctggccagggccgggcagcctgggcgccgacagggaccgagaggccgaggctgtgcgcgggggagcggggagccggctgggggcctgggccgcccgcagggccgtgggcgcgcggcatccgggctgtcggggctgggcgaaggtaggctcagcgtggctccgacgggccgtgcagcttgcagagctttgggacctcgccggggtcgggtgacccggggccgttgggccgccggccgggggtgttcgctgatttgatgtacagcgagaaggagcgcttgaggcggttggtgtcctgcaggcggtcagaggagaggtacaggccgcgcaggccctgctgcagcgcgcaggtgtctgggggcgtggggggcagtgggggctccccgcccgcgctcaggccgccctccctggcagctgcactcccggtggcagcgctttctgaggtaggtggtggcagccatggcagccgggccccagccgcagggctgggcggaggctccggcgtccctgagggggtgcccgcatccccctgcacggtggccagcagcttcaggctgcgctcctactccagcagctggcccaggaagttgaagttgggcgagatggactggcgcctatccttcatgaacctgtaggtgtcgtcggaggatatgcccatggtcttcatgatgtaggcgatggcgatggtggcagagtgggagataccgaccagacagtggacgatgacttggcagctggacagcttgcctttacagatgaactccatagacttgtccagccagggcagcagcttttcacagtagttgtcgttgatggggacccgcatgaagcggctctcgcagatgaagtcaggcttggggcaggagttgctggcattgaggacgtagcttattccattctgtgtcgtcagatccttgttcagaacgtctttctgcgagcccaggtagaggtgaggcaggatgagggtcaggctcacgctaggcacgggcaggcagggctgggagaggctcatgggtagcagggcagcaggcttgccctggcagaggctggggaagcaggaggagaaggtggcgaagccccccgtgaggatggccacgctgtcgaagcagctgtccagcttgctcagcaggatggagaggaagcggtctgcggccagcacactggcgtcccgtgtgctctggtcatagaccaccatatcctgtggctcagtggcctccatttggctgcgtgtggccagccagatgaactctgcaatggtcaccttgcccttctgcagccggcacttcaccagcttggagcagcagatgttgacggagctgagcacatgccagctgttgtactccaggaaggagcggctgtagatgaccaggcaccctaggcccgccccgcagcaggctggccagcttcttggcgtccatcatcttcctcgggagccggtctccggccatggtggggcaatgggtggtggggagggtgacccctgacgtgaggaggggttgctcggatggcccaagtgtggccttgcactgggagtgacctagcacatggtgccggacctcgttagcgctcgcctcggggggcgttccgggggacccgcgctgccctcgccagctcggctgcgccgaccatgggccctttggcgggggcccgcgcagccaaggcaggggcggggtctctaatatagagttaatcagtgctctttacaacttctaaaagataatagcttatttactatccttctactataatttggtcttatttatagaatatgttgaggaattgaaaacaaagatctagacttaaaattcaataagctcctataaaaaaaatccctcacataaaaaaaggctatatattaatttagactaattgaaaaatgatgcaggtcttaaagaggacaacttaaaaaaaatcagttctgataaggtatatttctatagcatcttaacagtaaccatgtgagtaaacatatttccccagagttctcattaggtagcaagaaaggcgatcacttaccaaccactgcacacttgtatgtcatcagggaagccaaagtttttacttcatctacactcacatcaatgctgtaatggatatttggtggtgttttttttaaaaatgtgttggggtaggtgagaaagaaggggatatatttagaacaaacttcagtaagtttcaaaaaagaaagctacaaattgaaaatatccactttttacattttacacccaagctatgtccaaaaacacttgaagcagctcatatgtcagaacaccataaaaaatgaatataaaacgtttaaaaaactgctaataacagtaactatgatttcacaagacaaaaatcactgtgcaatgaatttttttacactttccagaaggcttttttatgttccttttaccttttggtttgggtgactccggggtggccaggaccaaatgtgtctccttctggctttttgcaccacaccaagtaacccgcgccaggccgcacagctgccctggccttggggaggactaaggcaagggcggtgtacgctgctccggagtcccaccgcaggagttgaggcagcgagttccgagggcggggtggggcggaatcgggagggatacggacccggtggaacgcactgcgtagacggcgccggcgcccgcactcagctgttgacagtctttcttccagctctcccctgaaagtcgtccaggcgccggtctcttttttctgcctttttgtttccctccggagagtcggcgcgacggtgaatttccgtttccggtggtgtccaatccgacctgaggagtcacagttgtgagcargttcggtgccgcgggctggggtaggcggcagtggggtccctggctttggggcactgggaagatcgcgagtgggaaggtcctcccgcggtcctccgggtcatctttcctcctgaggagcagcatatttcgcatctgccggaggtgtgcccgrggtcgttgggagagtgacgggatgaattgctgcagagagcccggacggggagggaaggtgtcggggagacgtcgtttcctggcgacgtggtcccggccggcgacttagacctgagccgaatctgttgaccccaaattgtgcttttcccaccaagaagaaaagggagagaaacattagtacaagttcggaactaaaatatagtagasaagcaacataacctcggaaatcacacagctgttcggtttcaaagcgttcctagtgcccagctctcctaactcccggccagtgttccttgacatatggtgatatataaagactttctgtttccgctcgtgtgtgtgtctgtgrgaagcctytgactcacttctgtgccccagtagcaccctgtgcagccttgcaatgtagcycttattgcatggcacggaagatactagtttggatttcctctgcaagtcagatcatagctatatccatttactggcacagtggctagcacatcatagacagacacaaacatttactaaacggaatgaatacaggaccttaattgaatgaaatggcaccctgccccgcttttttccaatcaagctgtcagattttatgcagctggatatccttaaaaaactcactaattcagtgattaccaatttattggccacagattcccaggtacctcagaaatcactggaagggtctctgtaagtccatggggtctccaggcatcatctagaactagtcatgtctcacacatacagatattgctatttttctttctttttttttttttttttttttttttttttttttttttttttgagacggagtctcgctctgtcgcccaggctggaatgcagtggcgcaatcttggctcgctgcaagctccgcctccggggttcacgccagtctcctgcctcagcctcccgagtagctgggactacaggcgcccgccactacgcccagctaattttttttttatatttttagtagagacggggtttcaccgtgttagccaggatggtctcgatctcctgacctcgtgatccacccgcctcggcctcccaaagtgctgggattacaggcgtgagccaccgtgcccggcctctagatattgctatttttcaaatgtatgtagaagagttgtaatttaggagttttgcagagtcaacaggtactaaaagtaatactgtgatcatgttggaagttcataaaagcattttaaattttttattaaaatttaagttttagtttaagttaggaaaccacttcattagtccagttgatatctaggtctgagctgtccagtatggtagccacatgtgactatttagagttggaataaaattaattaaaaattcattttttcagtttctctaagtacattttaagtaaccacatgtggctaatggctaaatggctgaaaagtacagatatagaatgtttccatccttgcagaaatggatactgctgatgttgacacttaagatgaataaaaagtaacttaaccataaaatgtacccttagcagaggtaactcatctaatttatagcataacagagataaatgaaattggggagggttaagcagtttctacccttgttcagtgaacaaatatatcatctcttcataaagaaataaataaaatttaatgtttttgccctgggtattgcctggattgtaaaatgcttctcccacctccttaccccaaccttcttccttgtagattagaattacttgttattggtaaatagccactatggagactaaggaccagaagaaacaaagaaagaaaaatagtggacccaaagctgcaaagaaaaagaagcggcatctgcaggatctccagctaggagacgaagaagatgcctggaagagaaatcccaaagcttttgcatttcagtctgctgtgtggatggctcgatcctttcacaggtatgtttagctacagtctgatgcttcttccattgattctttttaaatagtaggagcctctcacaggtgacatttggattcacaagtctagtccagctccaaaggacatggagatgcatgctgtgtggcttttaccaaaacatgagaggctttgctatagaagctgccttgcctccagcatctgcacactggttggtgtttcttgcccaagatacaagaatttatagaatttgtttcctcctaaactttaaactgtttctatggtgataagtgtgctttttccctctggatacgttttacaaagttgtaatataaaatacaaaaattacaatatttattactaacatagctttatttagtgagtccttgtgatattcttagcagtgtactttaaacgttattcaactaaatccttccagcagccttaccagagtaggaatcattcttgccctcattttatggacaagaaaactgaggtcaagaaaacaagttacctccaataatataaccagtaagtaggagagccaaatttaactccagagcctctgctcttatccattatgatgcactgccttggtatttaccttttggtttttaaaaaactattcaaatcacccataaaacagtcagatttaaggwgtgttcagttttcaactctatatactattgaagtcgtcttgttacatctttatccaacagcaattatttggatgggggtgagaagttaagttaataattgacaagttcattatatttatatattgtctgttgtactctataaaatatactaaagtactcatatctataagtatactaagaaaattctacttataaggttgatacctttttctctattttgaaagtgagtttacttttttcttttttttaatgaataggactcaggatttgaagacaaaaaagcatcatattccagtggttgatcgaactccactagagcccccaccaatagtggtagtggtgatggggcctccaaagttggaaagagcactttgatacaatgcctcattcggaacttcacccggcagaagttgaccragatcagaggccctgtgatgatcgtgtcaggtaggagatgctgccacagacacagagttggcgtggctattgtcatctgagggacatgcatgtgtttgttgctttcttgagtggaacatgttaaattttgtcatatcatgttacctctcttatacttttactaagttagctataacttcagaaaagggtaagttcccagagataaggatgtgatacatatcttatcctgagtgctctatggctttgccaagcatgttccttggaagggggtagcaggcctggtcactgtgaacatatcatttaacagacagcacgtacctcctatgtgccaggtgcatgcacatccttgcccttatgaagccacatgctagtggaagtgcgcgttttctctttttcctgtgagaatttgtctgctttgggagatggtgacctttccaagtttgaggaaagatgaaacaaacttccagtggtagaatgccaatgtacactcaagtctcttgttattgcaataatatagttggattgaggcttttctttatctttggagcatccatattttcttttttgagacagtcttactctgtggcacaggctggaatgcactggcgtgattacagctcactgtagcstcaaccacccaggctcaagcaatccgcctactttagcctcctgagtagtggatgccaccacgcctggctaatttttcttttttttttcctttcttttttgtttttgtagagatggggtttccccatgtggccaggctggtctcaaaactcctgggctcaagggatccacctgccttggcctcccaaggtgctgggactacaggcgtgagccactgtgccctgcccatattttcttgactgttttctttttaccttaatttagaaatgattatcgttatgaatattctgttggataatgtttgaggatgtttttagtgatagtgggaatatgggaagttttgatagaggcaaagacattggcctacagctgaacagcaggatcatggttatcatggagcctgtccagtcagaattttccctgtttaagcacttgtattcatctgggtagactttggatattatttaaatttagaacacagcaagaaaaacaggatggaatttattttattttaccggtaaatgtgaacttctcgtacactcctgtaaacgtatatggtgttttactggatacaggtaaaaaatgaaagttagagttgatgcttagagttttttcagggtctttttaaagtaaaattttcatcttttcacttataggtaaaaagctccgactcaccattattgaatgtgggtgtgacattaacatgatgattgatctggctgaagtagcagatctggtaagtgagcaggggcagcctggggtgctgatggagacttacagcattgtgataggttatttaccccgtgatgaagggaatagagttttatgattattaaaggaatcatggtcatcatcaaggatacaatagatgtgattgaattgatgataataataatagtaataaatgttgttatattaataatacaaatggaatgtgtacaataaaatgtattccaaaatctaaaagcaaatcacaggatagagaaaacctttaatgaacacagctaataagaactcattaacatgcatacatatatacctacaaatatatcatagtaagtaccatttcttcttggacccttcctggcactgtgctaactgctttctacaaatttagcttacataaacccttgwtacacccttgaggtgagtaggtattatctgtagtttacataagatgaaatagagcctcccagcagttaagtaacttgtgtgaagatgggacccttgttcctratggttctagaacctttatccttagtgataataagtaagtacatgaattgcctgaagaagtggtcagagtttatcatagaaaatctagatagtactcagtgtgtggaaaaatgtacacgctcttgcatttatggaaatgataatgttcactatttctgatattctattaactatcttttttttaaactatcttttaaattaactaaaataaaatacaaattaccaaaaaaaaaaaagaaagaaagaaaaaggccagacgcagtggctcatgcctgtaatcccagcactttaggaggctgaagtgggcagatcacctgaggttgggagtttgagaccagcctgaccaacatgcagaaaccccgtctctactaaaaatgcaaaattagctgggtgaggtggctcatgcctataacctcagctacttaggaggctgagacaggagaattgcttcaacccgggaggcggaggttgtggtgagtcgagatcccgccattgcactccagcctgggcaacaagagcgaaattccatctcaaaaaaaaaaaaaaaaaaaagcaaaaaataagccatattgattaggaagtgtrggatgacagataccttggttttttcatttttatttagttttttctagagctacagatttcatactttggcccaggaagactcctaaaatataaagtaaaaggtaatacagattttaaagtcgtgccattgtaatgtctgtaatgtcagaaaactaaataacattcaaattttgaacatgtaatgctactattagtaaaaataagtgttattaatgtaaagttgtgtaamgattactaaatcttgtatacttgaaatgattgaatagttcatagaagtcatttgtttctcttttatttaagatgtagcaagtttctaattttaaayacatattaagagatgcctttacttttttttakttttagttattatggatacataatagttgtacatatttatggggtacatgtagtattttgatagaagcatacaatgtgtgatgatcaaatsaaggtaattcagatgtccgtcacttcaaacatttatcatttrtttgtgttgggaacatttcaatttcattcttttagttctgaattatataataaattatagtcaccctattgtgctgttggacactagaatttattctaactgtatttttgtrcctgttaacctttccctctttttccctscctccctgctccccttcccagtctcttaaccatcattgagagagatgcctatgtaaatctttttaagattttcaaaaggagcacacacatttggtaaagcactctaactgtaatgcagggtatacacaatgcacattttctttttccttgctctaaggctggtctctcaggtccctgcagagcagtatccttccagatacatataaacacacatgccaccctttaaaaacacaaatggtagcttattttacacgctgttctatgctttgcttttttcatgtaatatatcttggaggtatataatcagtaagtactgtagctctgcctccttctttttaatataatattccattctgtggacgcaccataatttatttagcttagcttatgttgattgctctgctctgggttktcaaagcctcctgagtacagcaaaggcacaaacgatatgtggatttgggtgtgtacgtgtgtgtgtgtgtggattatgggagtaacactggcttagatgacaaagattggcagctgagggactgtttgctccctgttcttcctgatcctacaaccagctgcttgccccttggcactctgtggcatcagatgtggtgtgaggatattccacttattctttgagctgatccactgttgctggagagctctgcttgctgcctcrgtttccagaggcatctgtgctttcctacaagcccaacttcatatattctgtggtttcgggttttgaatgtttcctagtttaatcaaagatgggcatttctgtttccattttttgttagttttagttatccatggaaagataaaaacagaactatctttaatattaaaactagaagtttccaggaatcaattctgaaatttgcatctttgaagtgtcttaattttaaaaattggtcttatctgcttatattttcttatagactaccattcatcgtaatcttactgttttttgacttaattctaaactggtagctatttaaagaaattcctgagcaattgagttatacaaattaacatacaagatagaggtgtacactgcatacttcccagcaaaaaaagttttttttttgtgaggacattgaaagaagaggttggttttctgtacatattaaatatatttcattgattatcactttcttcccattctttggatgtcagagacctgttatttggcttaaaaatacattatagaaaacttcatttctttaaattaggatttcttaggtacgggcctggttagatccagccttttctgagttacttctcatgcattagaattcttaaaatggatgtttatatcctagtggccttgtcttatggttgccttttagagcaagtcagagggtggtggtttctctgggtgatgcctgtgtagtcatttgatttagtctggagtgggacttttctgtcgagggccagatagtagatattttcagctttgtggatcatatcttttgcagctacttagctctgcagttgtagtgcacaggcggccatagacgatatgtaaakgaattaatgtggctatgttccaataaaactttagttacaaacacaggtgatgggctggattgggtcgatgggccagttgccaacccctagtgtaggtggtctgttttggtagtttctttgagaaataatgtgttctgcttgtaggtactgatgcttatagatgccagctttgggtttgaaatggaaacgtttgagtttctaaacatctgtcaagtacatggctttcctaaaattatgggagttctcacccacctcgacttcttcaaacacaataagcaactgaagaagacaaagaagcgattaaaacacaggttctggacagaagtttacctggtaggaagagaaataattgttagamgctaacagtataatccttttaaamtagactgaagaggctgggcacagtggctcatgcctgtaatcccagcactttgggaggtagaggtgggtggatcgcttgaggccaggagtttcgagctcagggcaatgtggctaaaccccrtctctactaaagatgcaaaaattagtcatatgtggtggcgcgcacctgtaatcccagctactctggaggctgagacgtgagaattgcttgaagctgggaggcagagggtgcagtgagctgagattgcaccactgcacttcagcctgggtgacagagtgagactccgtctcaaacaaacaaacaaacagactgaagagacattactaaacgtctgtctaggatttgcctcctgaattccctttgcgtatgtgttcccagtctctggaaggtttccctcaagagtggttattctgggcctcttggtgtatctcatttgtctctgtacctgctgcaccaggcagtgtctgggtgtttgggggttgggacttaatggagtacgtcagaagtttctcccagttacaggaccaggcactgccccttcctttccatactgctctggtccatcagccacagaatcgtttctgtgctcagaggcctcacctccctctcctcaccatacttagayggatgcccctgctcggctgcagagcagtctgcctctgtgtggttctaataagtcctgaaagaagccagcaaggctctgcaagcctcaggacagtggctttgctggaagtctcccttcttaggattgcttcttgtttagagcttttattttgttgcagtattgacaagaatttagttgaaatttaatttttaattttcctttaatgtttaggttgccaagctgttctgcctttctggaatggtgcatggagaatatcaaaaccaagaaatgcacaatctgggccattttattacagttatgaagtttaggcctctcacatggcagacttctcatccttatatcctggcagacaggtaaaaagtgattgtaaacttttaattcctggaccatatatttcaaagctaaaaaggctagaaaaagaacagtgacaggatttattttgtgcctatttgaatagtgggggtagaagtgyagtggatggaaaatgtctactgatatcattgctcaaagatgctgtgcctttgggagtaaattaactatgagatgtttaggaaagtgggaggacttggaagcatttaaggccacaggatgtggccccatcctatgttcagcctcagatttcagtgatgctgccttcgtgcctgggtgcttgagtcctttgtgtgtgccttcagtttccttcctttgtgctgtggttttctcagcctggaataccctttttccacctgccagaatccaagccacagtacaaatcccagagcacaggctcaccctcttccagaaagggattttctgaatatgttctttactcttctctgaccccaggtggacgtcatctccctgtctggtgtcttacggaatgaatgtcactttcagcctagagacacagttgtgtgcctgccccttttcctctggtgcttccttatttctgtattttctagttttctaaacaatgtgcttagtggacaagagtgtgatgagtcactgacacatgaaaggaggtataggaacttttggcattcatttctgctgtatgattgagtttatttttctagggtggaagatttgacaaacccagaggatatccaaacaaacatcagatgtgaccagcagatgttactttacggttatttaagaggagcgcacttgaaaaataaaagccaaattcacatgccaggtattctcttgttgtagaacatactagaatcacacataggattcttgggatggcttcatttctcaggaaaartgaaaaatgaccaaacaagggaagatggccttggtggaggttttaaaagtaagccagctatgtgtaggcctgcaaaggtgttaccgaatgcctcttctctgacctcttgtcttgtagctagagggycactgttccagtgtggcacaatgcccttctttagggtcatggtttaakcccttggagtgtgcatcgtttttaaccccccagtcaacagtagatacttactgacttcttgtcagttgaagctggctttttgggtccygtcttccaggggtagaagattttgccatgagtgacatcrgtttcttcccagacccttgtgctcttactgaacaacaaaagaagtgctgtttaaataagaaggagcagctggtttatgygcctgtttttggagttgggggtgtgctgtatgacaaagacgctgtctatgttgaccttggtggcagccacggttttcaggcatcagtgaggcaggagtcattgctctgaactctcattattctttccgaatctatttyttaattaaaaaaagtaatatactcagcttttatttattgaagatttttctctcgtacttataatagaggcccaaatgcatattgtcaatatgtagaataaaaakaataccattttttcattgtaccaagcagaagagtcctgtcctccatgcctccttgatccrtggccccagcatgggcactgctgccagtgtggcacctgcccggcttatctcygtttctacaaaatcagtgtgctttccagctctcattggtctttttctttttctcattcacaatggtctcctcattrtttattttaaagtggatttccagtatttttagttctgaagtggaattttattgggttaaaatcagggttaytttaaaatgttagaaaagctagcattgttgtaggattggaactgagatttttctagcgaggtgtttaggttatcaggttgtatactcactgaggtttggamaagtttaatggagatggggatccatttcaagctttgttataaggattttcttctctggtttttgyggcattaagaaargwtctcaggaaatgtgtctaagataattttgagaactgrgtgaaaccagtgtctctccaggatctttgtgctttcctcacrtgccctttcttggtggtcttgacaggacgaggtggggcccacccatgagctggtccagagtctcatctccacccactccaccattgatgccaagatggcttcaagtcgagtgatgttgttttctgattccaagccacttgggtcagaggctatagataatcaagggtaagtctgctttttttctatttttaataaaaatatatattacagaagatyrtatcacccataattctgccatcataacacattttggtgggaytcattctatgttgttttgtttttctttgtgtgtgcatgtgtctctgagggctcttcacttacctgacattatgagggagtcttttcttgaaataaaatacaggatgcatttttcaagagaccccaaatattcctcaaataccacgccatcttccataggttgcttttttgttttttaagagacctgaggccacttggctttcttttggtggccraaacactagagcagaaacagggagtttgtggctgtccagaagccacatgccttgtctctgaaagttttatttagattatgttgtattatctcctatgggtaggtttccactgatgtgtggcttatgtgaattatttttcagcctttcttgggaatttgtatacctttatgcttagtggatgtttgcaaaacaytggttttgttgtattagtttatgactyccagtaaaatttatctgaaaatyttgagatartctagtatgtaatttgttacaatgtgcacaaactacgtactaaagttcctgacataatgagtgttattagctattttcatttttgcatatccttctggtcatccttgtctacaagaatactctcttctaatatagttacaggtaaaatacataatttatttctatattctgagcgttttgttttctatacagtctttaggtagttgtcattttgttgttcctggtgtttttttttgttactgtggtttttttgttttgttttgagataagatctcactttgtctcccaggctggagtgcagtggcgtgatcttggctcactgcagccttgaactcccaggctcaagtggatcctccctcttcagccccgcaagtagctgggactacaggagtgcaccaccacccccatctaatatttttttgttgttattctagggacgagttctcactatgttgcccaggctggcctcgaactcctgggctcaagcaatcctcctgcgttggcctcccaaagtcctgggattacaggtgtaagccactacggctggcctattattgctgtattctaacttattcatctcctatggtacgatttttcattttttctaatttatgttttcatacttttatatatcgtgctatgttaaatagcttcatatagttttcttttatgcagtgattttagcctcttgatgatcttctttatcagttatggcactggtgacttaaaatggatgttcttcctctgtcattcctccgacgtttgttagctggcatttttaacaaagagctttcacttctcctttttatttcggtatctctgctgactaatgcacttgcattttattccatgggttattttccatcactgtcattgttctttctgatgcctatgctgtcccagattcgaccgtgggagccttcagcctgtgtcctgtgtcctttcaactgtctctattaatctttgagcatttcttactttctcacagaacaaaagtatccaggcttatgttgccctctttctgccttgggcctggactcagccatttctcttaaggatcatcttaagcatcatttagcttagaaattaatcagctttccaaaagatgtacaaaatgctaactttccttttgagcaatttttttctaaaattagattttttttagaggattattcctttattctttctataagttcatttgaagtgtggtgttaggaaaccatgcctgagtttaactcttccagtgtttatcagatcattttttccctgtgctgtatcatcttaaacatcttaaacaattccttgacatttttatatttctttgtattttcattgactgtattgccatttctagattagctggttaatgtacaaattggattattttgcatttccttggtaatataggctgttgatgctaaaggaggaaaaacaaatggacttgaaaactggtcgaatgcatcggaaagccatttttggagatgattctatgctaacatcctctctcctttcttgatctcttaattttttttttcttacccaagtatatacaggttgattttgtctttctggaagatccaagatctttggtttagagatatattctcttaatgttaactggtattagaatactcttttctgtattttatttcratacacttgagaatagaaatgattgtattttcttttaacttgtgcagtagagtgtggcatacaaatgttgkattctcagtatttcaaaaaattaccttcttactgtrcaagttgtattcagcatataaagtctattccagctttgttgtagatgcagtgtgattattacatgccgataaggtatgaattggagatgggatccaaaattactgtacttagtgtaatttttaagctaattacagggttggtggtgaatattttacttctgcaaaatgaaaacagcatttcatcagaagttgttttatggtctttcagacattttattgtatatctttgrtgctttttgcccatgaagtatctcttttgtgtgtttgtgtgtatgtgtattgatctgctgtaaatttcacagcactcattgtcagggatcagcagaatcaggcctaggcagagagctgagcagtactctcagtacgtctctgtgtccttgttgccacattatctctgttgtttatttataagttggagaactctctgacctgtaacaaaggttggataggtcagagacaattgggagaggaatcctctgctctattgtcacctgtgcctcactccaaaatatgctctgaaatcaatatttaaatattaaatttgtatggtgaatgtattcttttttaatgttaattaaatgattggtcagcccacttaatatttacaatgcaggacttactttgcgtattctctgtcttgtatttttgctttatttaagctaggctagcctccaagctggaagctgaattgacagttgaaaaataatgacatgtatacaaggtatgtttgaaggattgcagatgcaggggcaccatatgctaaaggagtgttggaagctcactgcagaagatgacaaaagcagactgatatgtattatttgctgaaatataagctggaggcacaggtgaagattgccaaacctaatgaacagtttggcaaataagacaggctgtcaggccatggcagttcagcagtgggcgtgctgcctgtgaaccaagtcatttgttccagaggactacacttaaataccacaaataaaatcttccttgtcactgatatcacagtgaaatagatgttgtctttcagatttctggttgaattaccagccattaacatctggtgatttgggttgtaaaattatttttagttttgcctgttcatatttcatccagaaagcccaaacaagatatattttcccacataagaatgtaagcagtataatgccccgtccgggagggaggcggggggcagcccccacctggccagccgccccttccaggagggaggtggggggcgcctctgcccggctgccccgtctgggatgtggggggggcccctctgcccggccgccaccccgtctgggaggtgtacccagcagctcattgagaacgggccatgatgacgatggcggttttgtcgagtggaaggaggggaagtgtggggaaaggaaaaagaaatcagattgttgctgtgtctgtgtagaaagaagtagacatgggagactccattttgttctgtactaagaaaaattcttctgccttgggatgctgttaatctatggccttacccccaaccccttgctctctgaaacgtgctgtgtccactcagggttaagtggattaagggcggtgcaagatgtgctttgttaaacagatgcttgaaggcagcatgctccttgagagtcatcaccactccctaatctcaaatacccagggacacaaaaactgcggaaggccgcagggtcctctgcctaggaaaaccagagacccttgttcacatgtttatctgctgaccttccctccactattgtcctatgaccctgccaaatccccctctccgagaaacacccaagaatgatcaataaatactaaaaaaaaaaaaaaaaaaaaaaaagaacactgcaagaacatctgccccagaactgcctgtccaacctggactgacatcatccttgttattgatctttgtagccaaatataattattttaaaacaaacaaaaaagaagaatgtaagcagtataagactttaaaacacacaaatgaaaaatatacatgactacatgcttcagtgaactaaaactttcatctgtratctttattttgcaacgttctgaagtaacattacagtcttttcagtgtgctgtgtcatttatatcccttactttatcctgggaatcctgtattgccattgagcatatgcarattgagacatgtgcatagcttctccccgttgagcccatcagtggggaggagctatgtaccggggacatttggcaaagattttcaygagtctgttggatgtaacagctccttaagaaaacctcagtttaccttccctattttttaccatttgtaaaactaaggctcagtgatgtaaaatataacacattctgtrctgtggcataactgcagcttaggtttttatattcaagacaagcagaggtatagttgaaaaggtatgaacacttattatgcttcaagatccctttgttggtttagttgtggcattttagaacagcggacttgggactaaagcatctttctatctgggatcagtatttctaagttgcctttaagctgaataaacatttggtttttatatttarttgcttcgatgtgaaacactgcaatttaaaaaattacacatatgtaatayagtattttacactaaataatagtgactggcagtccaytggccgaagaagtattatttttcagatattctgctctgtcatcagctrtagacactgacmtggtatttatctggaaaggcttgctgtcaggggttcacagtgctgcttgtgggttatctccagaccctttacatayagcactttaggacagcgtgagtcacaggttgcactagaakttgcctttgaaattagacctaaactatgtggaactggaacccttgtacacaaagctctctatcatccaaatcctgctgaactstcttaggaaagaacagttttacagattcattctttccacacacaagatttccccactgcccagttactctcacctttttattttcttgactgttatgttttacttgackctggaatcttaccttgtactctcacatttacatggaagtatagcttatttcaccaattatactgtctatcaaaagcagaagtagttacttacacctgaaaatttgtactgagaatgtarctgtgaatatgtttaagaaagtatacttaaagcasaaatccaaggaagtatatttaaatcaaagcaagaaatcccatttccaaatggcaataaagcatgtgttacatagaatcagtgcatgaaagtgttttagtagcccagattagattgtaccctggcraataagcaagagttctttttcattttcatcttgcaattcaactgggtatttgggttctttttctattcactcatgtcagatagagacatrcatgttgtaaattattttgtcagaatgaaagcctggcagattaaatgctttcttctcttcttgctttacttgatatcaatctcttgttcatttcttgataatatgtttggttatttttgttttcattgcttttagtgtcagagatggctttggattccccrttctgtgtgctgttgtctggctcctgaacccasctgtagaggtgtgtcaatcccarctggtgaagtactgagaggaagctacacaaaaggcakcaaagtattagtaagtgtacctctgacattttaaccacctctgacttttccatggaatggacaagtagtagtctctgtcagagctacattttaaaggagaaaaagaaacgtgaagtcatgaactyyyaatttatgctgttatttttgtgtttactcacctcatttatattgacttgtaaattagtaatttgtgaactattayttatcaattcattgcctacatgtcaggaaacaaattttcttcttaataaagaatmcggttgctgggcacaatggttcacacctgtaatctcagcacgtttggagggcaaggcaggaggattccttgaggcyaggagttcaagaccartctgggsaatatagcaagatttcatctctacaawaaaatgaaaayattggctgggcatrgtggctcattcctatagttcaggctactgaggagcctgatgtaggaggatcatgtgaccccagtagtttgaggctgcagtgagctatgatcctaacactsctctccagcctgggtgacacaccaagttgccctctcttcaaaaaaggaatctagagacatcagtgtgtgcacaagcatggtttgtgaatttggaagtgcgtatgtgcrtagttktgctcaagaatgtgttgatgattataccttctcagaatgaaggtaattttttttctttttttttttttgagatggagtcttgctctgttgccaggctggagtgcagtggtgctctcagctcactgcaacctttgcctcccgggttcaagcaattctcctgcctcagcctcccaagtagctgggactacaggcacacaccaccactcccggctaattttttgtgttttagtagagatggggttttaccatgttggccaggatggtctcgatcccccgaccttgtgatccatccaccttggcctcccaaagtgttgggattacaggtgtgagccaccgtgcctggcctgaaggtcatttttataaagatctctccatgtcttagatttgattcttcctttgaatatttttctcattgacatttgaaagcacctgaccttatataaaatgaacaaytttcataactccataaaaggagaattatggcatcatctactatttctttctcttgtctcataaatctaaaccatcaacctgcttatttttgtatactgtcacactgtgtattccctgcattgaatgcmtttctattgacattrtctrtaaaaattgtgggaagttktctgcaccctgaaatttctgttatgsggattaratatccastatccgtgtttttccgagtcttacagcagaaagggtaaatrcagccctcacagcagcctgttgttygtcctgcarwtgtgtttccatcacattacacaaagcctctttgtcttcrtggttstaccctrctaataagtttttwwaaaaattatgtaatrtgtgtatatacaaatacctatatgtttgtgtgtacacatacagctaatatctrctgagattatgtatgcatgaactatagaattaacttgyaattttaagaaaataaattattttgtaaagataaatctcatgtttaagaagrggaattacarttgaatcatttagggatgcctcarcctaarcataatatggaaaaagccataaccaaaagtcattttagagtactgctaggttrctcaacctatcatcacatttaattaaaatgtcagtttgaaccatggccagtctattttggttaatatgttatttaaatcaacttgtgaagtcttcattttaaatatagaatttgtgttaatgaactggaaaataacattctattcttggaagatgtgttaaagtctaaagatttatgactttgtaaaagaagaaaaccagctggtgatcagttggcattagtatatgaggatgtactcatatttggtaatagccatttttttctaactagagyaagggagttgggaatgggaggcagaaacaaggacacagacatgtaaaaaatcatagaacaaaactgtattgagttctgcgtatgggtctgtgatccatggttcagtttgagaggttcatgtgtcccttatgagaagggacaggaaagccaggaggacaggagtatgtttgggcctgtgyctstgcttccrccacaraagtcagcagctctacctttctcttttctcctctttatctaataattgtctcctcttcaaatttgggaaatgaacttaatcaaakatttgttgtgtttttttgtttgtttgttttcgaaatgtggcctcagtgtgtttgcccaggctgatcttaaactcctgggctcacatgatcctccctctcagcctcctgagtagctgggactacaggcatgtgccactacacccagctaagttaatgctaatgtgtagtttatctgcttcaattttgaagggtaggatatatatagttatgtgtgtgtgtgtgtgtktgtgtgtgtgtggtgggggggtagtgtttgtgtgtgtgtgtatrtatatttatatattcctagtccattgctgctacaacaaactaccactatgtcagggcataaaacaaatttattacactcctgtaggtcagagtatgatgtggatctcactgggctaaaatctaggtggtggaaaggctaccttcatctctagaggttctaggggatcttttttctcgccttttccacattctggagtctgcctgcattttttggcwttgggctcttctccactgtcaccattagcaaccttgcatcccatggacytgtcttctatggccacatgtctctgtggctctttccttcccccttctcttccactgttaaggactcatgtgcttacttagtcctgaatggasacaccgtcatcatccacatagcccactgtcgkaatccrtacaggctgctacaaggaaatgcattagaccrggtagcttataaacaatagaacttygtttctcacagtcctggaggctgagaartgcaagatcaaggtgcyggcagtcttggtgtctggtgaaggcctgctttctcatagaggcttcctycttgctgtgtcttcacatgkggagaggaacaaacaagctcccttgtgcctktaataaggtrctaatcccagtcatgagggcagagtctcatgtaaggcttaacctcctaatacatcaccttgagggttaggattttaacacatgaacaktgayggaacacaacrttcaytccatagcaccagggtagtctcctcatgtgaaggtctttacctgagtcacatgcatgatgtaccattttcatgtaaggttctaggaatctgtggacatctttggggggcgccgttattttgctgatcacatattacatatwttttaatattctagactagtatgaaaacaatgcyacttycattgctttatatatgyatmtatatatatacacattgtctaatgctataattaaaaaaaagttgtagacacaaatatacccatttaaaaaaaaacccattttttkctattttacttyatactgccaactcctttttcctgaaactgcttcaactctggaattcttttttgctgttagttttattttattgaaatattcatgaacgagcatacacttgtatatggatktaaaattcacagtaaagttctcatgaattcatctgtgaataacattttatagacaaaatgtctgcactaggacaagagaaagatgtataattmccttgttctaaggtaccgccattcattgttattattttaaaatacgagtgttgactgatgttaaaacacaaaatggggccgggagtggtggctcccgcctgtaatcccaacactttgggagatcgaggtgggtggatcacctgaggtcaggagtttgagaccagcytggccaacatggtgaaaccccgtctctactaaaaatacaaaaattagctgggcatgtgttgcacgcccgtaatcttagctacccgggaaactgagtcaggagaattgctggaacctgggaggcggaggctgcagtgagccgagatcacaccagtgcactccagcctgggtgacagagcgagactctgttcttcccccchccccccaaaaaaaaaaaaaaaacacagaaagggataattggcygggcacagtggctcacgcctgtaatcccagcactttgggaggccaaggtggacagatcacctgagaccgggagttcaagaccagcctgaccaacatggagaaaccctgcctctactaaaaatgcaaaaattagcctggcatggtggcacatgcctgtaatcccagcttctcaggaggctgaggcaggagaattgcttgactctgggaggtggaggttgctgtgaaccaagattgcaccattgcactccagcctgggcaacaacagcaaaactctgtctcaaaaaaaaaaaaaaaaaaaaaaraaagatttataactgggcagtggaattgaaaatsatttttaaaaatatccaaaatacctaaggaacttgtataaataaataggaaaaaaraaagagaaaaacgtcaagaagcccacaaaaaagcagatttgtaaatgggcaatggattygaatagacatttagccamagaagacatccagttggtgaaaaggcatatggaaaggtgctyagcatcactgattatcaggaaaatgaaaatcaaaaccaccacaagtgctttagaccatagcggcatgcatgaaagttttcaggcctccagttgttgggagtggctgaggagattggggagcttctgtctgagctggaagagtggagtctcaacaagaaccagygtattctggacatgtgtgggccctggagtgtgcatggctggatgccttgtctacctgtgccttacagagtgacaccattgtggtgtggtcgatcagagggccaagtggctttcagagggagtgggaagtggtgggggttggtttgtttgcccatggatgaaagcaaaagtgagttggcttcycaagaacttttcccagtagcctgttttgctacaattctagacccagactggggtcccaaggcatgatagcccacagcttcttagcaagtgcatgttcagttggatcccccagctcagcctgggtcatccccacrttytgcctcttgggccatagctcagctctgcacactgagccatcatcctatggtgagcaagaccccattcttgggcttcagtctctttccttgyagcaggcaatcaaggtggtggctggaaagggccaaggagccacatctcacagtgccctgctgcctgaacaaggaccagaggcctgtggaacacatggctctcagatttctcccatttgatgactcatcagctgcccccacatggctttctagctcacagcagatctagccttctctgagcagtgaagatgggatgttttgtggtccttttccctggtgygsagagcycaagtggagttcttcagcacaycctagwccatcccctcactaacacscccacctgtccagtcttacctgccttcatatcaaaagcacwcagttaacccagagggcttctgccctgccctgcctgactttctgggaarcccccctctccacccaccctaatcaggacactgtctgaaggttccccctcatcattttaaaaggaagagaaattttctgccacagaggttctggtgaagtggcytgctcccacatcacagggtgatggyggtttgggctggaccaggatcagacagtgctgtcctgaggctggccgtctgataaggggctccagaaagggcagtggtggagccctgggaggctttctgctctcctgatcrcaggtttttggtgagaggacctattggccactagggtgtctgkgtgtrtgygtgtgtgtgtgtgtgtgtgtgtgtgtgtgwwatgtgtgtttacttggartgacttctttcagcatgaagcccactgttttgctgaaygtatctcactgtttcctgaaactcagtacattcagctggcttaagggtcctggggcctcgctgcgtcatatttgcacaagcctagtgtctgtgcagactgtacactggagttcagttgtaagacccttttgawcccttattctgttcctgtaatagaaaagccatttcactcaatggaatagaaacccagatccgatggagagatrttctaatctgccatacactggggcagtggcyagtgatttggacttkgtggcatagatggaaatttccaggttgtctaggtggtagacagaggcctcacttcttaacaaactcccccactccacccctgccaatgargatrttgcttagaggtatttctatcagtgttgagtagaagagatcatttcttgatgttgaacttcaggtaaggatgccagcttctgcrtatcagggtgrtgatgcttgggctgagacaggtctagacagcactgtctgaaagggggctcaaggaagtagctgtgaaaggcccctgggatgttttctgctcccctttctgcaaattccctggagggagatcctgttagtcactacrgggtgtgtgtgtgggtgtgtgtgtgtgtgtgtgtgtgtgtgtgtgtgttcatcacttgttgcttgggkgtgggaagagacaacaaaagcctacagaatctakagttctcagttcatctcccatcctagtccaatcatggcctaacatccttagctactgatcgcagaggagactcygcgcatttgtgttcatgtggccttggatgttggcagattcagattggtgccccagrcatctgtgcctgtaactgcagtttcagcgggctcaggaccaggctgaagggcctccaagcttcctccagtttcctggtgcatgcatgtgcaatatrctcccctggccttggtctttcctaaygcttcttgccagttgggtcagaactagcttattaaccagttttttctgagctttaatcgaactggctccaaccagttggagacttgaaaagggctacgtgmtagttatagatttttaaagatatattattattttagagtagtwttgagtgyacagcaaaatggagtrcagrgtccagagatctcatatgscctcrattcctgtayactctcrggtcactccaccaayaacctcctacaccagagccactttgaaacattagaaaatatayttgagcattcagaaatgtataaactaggcagctccagactgcaagcagctcagagttccaacagagaggcttagggagggtgggggaagaattttatatggtgaatgtggaagaaaaaatacttgattgggtraagtggagcagtggcctcatttggaacattacagtggaaagtctctagttagatattagttggtggtttctgactggttaagcttaartttccttttattatttacactgagtcaagttttggtttatttaaggaggaattgagtgcactgcagccacctcagcctcatggccacctgtttattkgattatttttaaaagagaagagcctttwaaaaatatctgttgccstggctggagtgcagtgacgtgatcatggctcactgcagccacaaccttccagctyaggtgatcctcccacctcagtgctccccaccctgagtagctgggactayaagcatgtgccagcacaccaccatgctaggctaatggtttgtatttgtttgagagatgcagtttccctaagttgcttaggcttcttttgaactcttagactcaaataatctgcctgcattggcctccccaagtgctggaattacaggccatctaaatcttttatctcagrtttgccttgtgrcaaatggwggggtactttttctgacatgatgaggcagagaaagrtgaggtgggcgcatcctgtgcatatgattttctcaggtgatgggaatatggtsggctcttgcctaatgggatatattttctctttgaatgatttggcaagatatcagatgagagaarttgaataaatgttagaagaacatagaaaaaayaggttatacacrttgggtttctgaagaaatgatgtstttggagaaacaaaacttttattgatttctggaaacatttagggccaattttttatgtaaataatttgaatttatgatgatatctctgaccactttttgatwtttttttctggttcaggtgagtrgtgtcattgagcaaacacgaagtcgggctcatccaaggatgagattttgccagagaaaggaygagcagcaagtcagggagcttaaggtaattatgggaaagtgactatctacaattgcttaggtagaaggagacagattggatttttgtgtgtttggtatttgggataagagggatgtgggtgtgtacttgasatgggttgttctctctctctctttttttttttttttttttgagagggagtctcactctgtcacccaggctggagttctgtggcacagtcttggctcactgcaacctccgcctgccgggttcaagggattctcctgcctcagcctcccaagtagctggggttacaggtgcctgccaccacgccctgctaatttttgtgattttttttttagtagagacgaggtttcactatgtaggcaaagctggtctcgaactcctgacctcagatgatccacccgcctcagcctcccaaagtgctgggattacaggcgtgagccaccgcacctggcctgtttattctcttaagagagaaaatgaggggattartggactgtagttctggacaaggtggaaaactcttaaagtggaagtaytggggcaagtgctctgacaggstaggatggtgcagtcagtcmcttcacccagaaatcagtagaatgttarcagttcagactcaaaccttgtgaaaaacaggtkgtggaaaggaaatccctcacagcaactggcaccataatcaagacagaatktttrcagratwaatrgagttacctgctttcagccccaggttrtagctattstctgccctgatgatatgtgataataatttgtgatcmtattgtcttaaaatggggtcactcatctccagtagaattaagtccacagtgaagttgtccccccatccccaaagagataaacatatatgaatgaactyacatgataacaactactgctgcctgggatcatgagagacctgaactgaactgataggawgtgaaaggtggctgagataatgagaatagacccatctgcagaggatcataaaaccagcaaagacaagatcttgtctaagatgccttcacaarctttgtccatgagaactstaaggwyttcwccagacctgttggctgctgctgtgatctctgcccaagaggagcytctgaccaacatccaaagggcttctggacccactggactcctctggaggtaccttrgtctcccgatccatggctgtgkttttttactccstttatcrctgcctgtgtgtagaatgataattgcacaattgatagtgtgaagacctcttgataaatggtraatctgagcatatgtatttggctgacatgtcattgtgaaacctcacagcttcagtcagtgtcagcacagctagggagcatgtacctaatgcacatatcactgggcatagtctacaggcacctaataacycaggtaccttaacagtcactaatgmgtgtctctccaaggtcwaaacaatggaagactgtagaagatgctattcattaagatatckcaagaatrtggaagactattattcgcttctcatgggacaggactttatagggcacctgaaaaaactcccatgaaaaatcacttttacaaaatgtcaagttatgatatccaagatgaaaccaatgagtcacaacattcacataatacactgtacaaccctgatctcttgactgtcatcaaatgtttcttacctctaaaccaaagtttcattttataatttaatttttctcattttttctgttctcttagcttaagaaaagatcattacaaactttttgtatgtttttcatatatgcttgcaaagggtygtaaaactttattgtgattattcttgctttaagctgaaacwtccctaatctttctttagagattgtggcatagcatgwtagtttcttttccatatccaattgttktctgtwatgaatacagaaatatrggcactrtyttgtaactttaaatagacatcatctcaagtctacaagaattatccaaaayggtatttaatgacatttctaggtcttcagacactattaatgtagattgtascctctaggtcctgaggatttttactggatactggttactgaaactgagctttcttgaattctttttccttccactgtggtttcccgcatttcaacacatcacctatttttgtcctcaaacgttacttaaatkttttccacagaattaaattaaatatgaatcatccctcctctgatttttgaaatgaccctttgcttcctatgataatgattcttctggtccrttttgtagttatatgttagagtttgtaaatattcacacattttgcaactgcatrtaattttctcattttttcctcttcctctaaagctgctgttatttcttttaactttttgtgggaaaaattaaacccatctttcactttgttgatatrtataattgaactccttgatttttgcttgaattgcttttcaagttacccacttttagggaagacattatttgggttttgtttagtgtatcaggctttttttagttagttgtatcaagaagtgtagacttttctatacataatatcctttttcccacagtagttttttttttttaaagtctagccgggtgcagtggctcacgcctgtaatcccagactttgggaggccgaggtgggcagatcacgaagtcaagagaccgagaacatcctggctaacacagtgaaaccccgtctctactaaaaatacaaaaaattagccggacatggtaacgggtgcctgtagtcccagctaatcaggaggctgaggcaggagaatgacatgaacccaggaggcagaggttgcagtgagccgagatcgtgccactgcactccagcctgggtgacagagcaagactccatctcaaaaaaaaaaaaaaaaaaaaagtctgttaaaataaaggtcatcaaaagatcttttcctaaacctttcctttaccagaaatatctctagagtcacatggtcctttctcccttcttgcttttgtaggagtccaaagctaatctgtccctgatccggattgcatgcacctgtgccttttggggcccttctgcattagttcttccttctcttctaacctcaaaaatgtgttttctctgttggctctttccctttaacatagaagtatactcacgcttttgttgaatcttggaataaaagtcttcctttaccacatatctccctttaatactacatctctcttctcagccaaatacttgggaagacaagccctgagtttgtgtgattgttttctcacctccagttcactactttgaacaggcactgtgctaggtgctgctgttatagatatgaaaagaaggcatcatctcctttctaacaactcataggagcagccattcctgattcatacgcaggtctcttgattctcagtgctcacttttgcaagcttcacttaatgccgtgtaaatcaccctattctccaggtcttctttcttcccagttctccttactatacacaacttctcaaggcagtcacctccacgcccatggcttcaattgctttctccattctctgagaacaatagaattttaaatgtttttttttcatgtattagttttattttatacagggtgtctcacttgctgtaaccatagattcaaagttgctccatgaaactaataaatgaaaaatggtgattttttagcatgtaaattttaggaaatttccccagttacacttaatggcttgatttagtatgttatttttgaaaacatatgttgggatgtcacaaatggacttagcctacagagatttatattcaacttttgaccagagagttccattttaatgtgacactgagagtaaaaaactatcttttcctccttacctatttctcttcctacattctcggccaggaggaaggcactgctacatacccagtcttccccagcagagcctgagcagctctgttttccttctacttcccctcttctttcacatctcatgaccaagcacttcctattctgtctcccaaatgatcacagattttttcctccacttttgtcactgccactgcccttagcattactctgcctttagagaaagtctcttaattggtttggttgcttccttcagtccttattatacagaccactacacacacatctgacagagacttttcacctttttatggttcaatgactgaaattcccagaataaaattaaaaccaccccagcatcaaatttgaggtcaaatagaggtggatttgtatcccaggttcatatactatccagcagtatggtctcagaaaactgacctccttaagcctttgtttgtgtatctgcctacactcattgagagttgggactatttcacacatacagtgcctggcatgtagaagggacttaatcaatgttgaaagaaggggaggcattttaaaatccacatcaaaaaaatgttgttctgttcgggagtggtggctcatgcctgcaatcccagcactttgggaggccaaggcaggtggatcacctgaggtcaggagttcgagatcaacctgagcaacatggtgaaaccccatctctactaaaaatacaaacattagctgagcatgggggcgggatcctgtaatctcagctacttgggaggcttaggcacttgaatgagaatcacttggacccaggaggtggaggttgcagtgggcaatgattgtgccactgcctgggcaacagagtgagactctgtctcaaaaaaaaaaaaaaaaaagtaaaaaaaattcttttaaaaatatacgaatctggctgggcacggtggctcatgcctgtagtcctagcactttgggaggctgaggcaggcctgaccaacatggagaaaccccgtctctactaaaaatacaaaattagccgggcatggtgacgcatgcctgcaatcccagctacttgggaggctgacgcaggagaatcgcttgagcccgggaggcggaggttgcagtgagccaagatcacgccattgcactccagcctgggcaacaggagcgaaactccgtctcaaaaaaaaaaaaaaaaaaaatagtgttcagcaaggttgaagcataaaacgttaatagccagaatcatttatcaattgtatttctatacatctacaagacacaatctgaaaatgaaattagagaaacaatttcactgggcaacaagagcaaaacttcatctcaaaataataataataataataataatctacaatgtcatttcccatccaagcttgacttctacctttactttctgatgtggttttgccatgtccccacccaaatctcatcatgaattataatccccataatcctgatgtgttgagggaggggcctagggggaggtgatcagatcacgggggcagttatcctcatgctgttcttgtgatattcagtaagtcctcatgagatcttatagggttttgttttgttttgttttttaggatggagtcttgctctgttgtccaggcaggagtgccatggcacgatcttggctcactgcagtctctgcctcttgagttccagtaattctcctgcctcagcctcctgagtagctgggattacaggcatgcaccaccacacccagctaatttttgtatttttagtagagacaggatttcactacattagctaggctggtctcaaactcctgacctcagttgatccacctgccttggcctcccaaagtactagggttacaagtgtgagccaccatgcccagctgagatctgatggttttatacatgtttgacagttgctccttcacatgttgccactctctgtgcggccaccatgtaagtcggacctgcccttctgccatgattgtaagtttcctgaggcctccccagccatgtgaaactgagtcaattaaacctcttccctttaaaaattacccaacctcaggtatttctttatatcagtgtgaaaacagattgctatactttctgataatcatgcttaagcaattggggaattcagactacctgggatcaaaccagggccccacccttagcagtcatgtgaccttggggaggttacttaccttctccgtctcaacaacttctgtaaaatctgtaacatgagattgtttctgagggttaaatgagcatagcacagtggggacactgtcaggcacacactacttgccagatgtcaagtattcatctttattgaaataggactgtggtaagccactttatggctctcgattctgtatgagaaaatcatgcttagtgccttgttagtaaaagaaagaaaatctgaaagtccctgccatggaaggaagaaatagcggggagaaaagggagttggtaagtttcagcatttcagagcttggagggacaagttaggtttctattttatggagaaggaggtggaggcaggatgggtcctaaggtgtcattcaaaacacacagccataactctttattgagagtagagctagggccgcagggattgctgtggtcacgttgcggacaaaaatgaccactcgttggaagacaggagaggagtgtttatcaaagcagtcaacaattcaggtgtatctatattcagtcagcaaataaaagttgttcaacttggttgctaatgggacccactctactgaggctttgtatagaactcatagaggaagatggcttcaagcaatgaactaccctgtgctttcttaggactaaaatctcaggaagttggtgatgaatgaaaaccttagtcccactggcactgcacgaggggccaggagagcagcagcatcataagccacagggtggggcagccaaggcaggggcattctgagctgttggggaggggtggcaggcagggtggggcactgtgaggtgtcggggagggcattgtgaagtgtggggtggggcattctgtgccacatgcctgggctcccacctggggccagtgggcttcagtctgtaggtgactacagaaggaggaggagctccgtctgttctctcttcaggcagttgttgtgtctctcagcgcttgttgggttcacaacctattaaataagccagctggtcttcaccctcccagacaagtcaactcaggggaggcagcagggtgtgggccttgacccgcagccctagccggggccggggccggggccagggatggtgcccggggccgcgctgtgaggtgggcaggcgaggagcgggaagaccatctctgcaagtgcagcatagcctcggcctaggacagtgggagtgtgtggccaaagctgtgagcagaggcacaggtggtggcagacagtagaggcgccccatggggaacatactgacctgttgtgtgcaccctagcgtcagcctcgagtttgaccagcaacaggggtcggtgtgtccctctgaatctgagatctatgaggcaggagctggggacaggatggcaggagcgcccatggctgctgctgtgcagcctgctgaggtgaccgttgaagttggtgaggacctccacatgcaccacattcgtgaccaggagatgcctgaaggtaaggaggtgataggtgccatctaccctcggtttgcctctggctgctgctgtccccaaggttccctttacggcatcccccactttgagctcctttctgcttgtagccagctttcccgggggctggccaggaacaaaagctggctctgccttgaattcccaccccttagtctttcctcaccgagtccagtcagtttcttttcgcctcccctcccaatcgcccagttcttgctctctcatctcattctcccaggctggcatgggaccatttatttatggctcttgtcgaataagcagcagttgaataaatgagttgataaatttttataaatgattacatcttttttcttttctccctctatacatatagctttggagtttaacctttctgccaatccagaggcaagcacaatattccagaggaactctcaaacagatggtgagacaacagtgtctgtagctctgtttattatcctgtgggactttgtttaggcttctttgagctattctcttccttttctcaataaaaactcaaatatcccaacttttcagtacccatcttattttttctttgtacctatccagatggtacctaagtgaaggaaccaggtaagtgcctaattgtttcctttgttaaagtagccaaatctcaggacagttcctattcaaatatttggggatttcttatttaaaatcagaatggaggttgccacgggagaggctatatggtattcttaatgggctgctttaagtcaccttgatagaagctgcttagtttcttctaactgtaatttgaacacagaaggaaaaagaaaaaaggagagtgcttaaaataattgtgaaaggtgtgaaatgtcacagccggggctgcagaaaaatggttgtgtgtgtgtgtttggggtttctcaaaggagtttacctatgaggctctgattactttaaaattcttactttaacagaaaatg

SEQ ID NO: 97259 - DNA, 20582 bp, Homo sapiens
ggcaggtttgtgtcagagggcagggctggggctccaggcctgggtgctggcccacagcaggcatggcccaagcccccggtgctgctggtccccccacagggtacctgcacacactggtgcagaacctggtcaacaatggctacgtgcgggacgagactgtgcgcgccgccccctatgactggcggctggagcccggtgagtgtctctgcggatgaccggcttggggtggggcaggtgccccagaccccagctgccctgaccccttccacccgctgcaggccagcaggaggagtactaccgcaagctcgcagggctggtggaggagatgcacgctgcctatgggaagcctgtcttcctcattggccacagcctcggctgtctacacttgctctatttcctgctgcgccagccccaggcctggaaggaccgctttattgatggcttcatctctcttggggctccctggggtggctccatcaagcccatgctggtcttggcctcaggtgagaaggcctcgaacacttaggtccagcgatgggtgagaccaagctgatcctgggcctgccttcattgcggctcctgctcacagtggcctctaggggtgctatctaccactcctgggctggcatgcttgctgtcactggcccccagagcagtgaccctggcctgagcaattagggtggctccttccagagtctgtgtcagtgatggcaaaggggcagtgaacacagaaagtgaatcccagctatctgctcccagggtttgttcttgtagccccagagcctgcctgcccagcccttgcctgccttccacttgctcgcaggagtgcctttgcccagggatgtgcttcactgaggatggatctgccagagctagggccagaccccccgaggccccacctgctcttccctagggagtggcaccagggcccagcactgacacagctaccacctactccccaccccctgtaccctgggagctggtctggagagagaaacacagtctggacaagagaaacgctcatcagacaccaccaataaacatcaaacagacaccatcttgtttccccctttctggagcacaactctgtggcccccattgctgcataagccacacaaggagcagaaagacacatgcccgagggaggacagccagcaccgcccccaccatccccacacatcctgggcctcacccaccatccccacacaccctggtcctcaggaagccccgcctacttttttttttctttttcagacagggtcattctgtcgcccaggctggagtgcagtggcgtgatcatagccgcagtctcaatctccctggcccaagcaatcctcctgcctcagcctcctggttagctgagactataggcacacaacaccacacctaatttatttttgttttttagtagagatgaggtcttgctatgttgcccaggctggtctcaaactcttcaccttaagtgatcttcctgcctcagcctcccgaagtgctgggattacaggcgtgagctactgtgctgggccttttaaaaaatgtttatttgtttatttatgtattttgagatggagtctcgctctgtttcccaggctggagtgcagtagtgcaatctccactcactgcaacctccatctccccagttcaagtgattcttctgcctcagcctccctagtagctaggatcacaggcatgtgccaccacgcctggctaatttttatatttttagtagagattaggtttccccatgttggccaggctggtctcgaactcctgaccttaagtcatctgcctgcctcggcctcccaaagtgctaggattacaggtgtgagccaccgtacccggccctatttatttattttttaagctggaatctcactgtgtcacccaggctacagtgcagtggtgcgatcatagtttactgtaacctcaaattcctaggctcaagcaatcttcctgcctttgcctcctgagtagctaggactagaggtgcactccactaagcccagctgattttttttttttttttttttgtagagacagggtctcactgcattgcctagtctggtcacggactcctggcctcaagtgatcctcctgcctcagcctcccaaagtgttgggattacaggggtgagccatggtgcctgtccctgccatccttttgaagccctacagctccacccaacagaggtcttatcagggcttctcattgagtaagctgacactgagcatcattgaatatcaggcctgctcaagcctgtggcttagagtctgtgtctagattgggcagggacaagattgagcatctggctgagcctacactcagcaggttgtgggccaggggtagccaggcctggctccctgtcccaccttgctccatatccacaggtgacaaccagggcatccccatcatgtccagcatcaagctgaaagaggagcagcgcataaccaccacctccccctggatgtttccctctcgcatggcgtggcctgaggaccacgtgttcatttccacacccagcttcaactacacaggccgtgacttccaacgcttctttgcagacctgcactttgaggaaggctggtacatgtggctgcagtcacgtgacctcctggcaggactcccagcacctggtgtggaagtatactgtctttacggcgtgggcctgcccacgccccgcacctacatctacgaccacggcttcccctacacggaccctgtgggtgtgctctatgaggatggtgatgacacggtggcgacccgcagcaccgagctctgtggcctgtggcagggccgccagccacagcctgtgcacctgctgcccctgcacgggatacagcatctcaacatggtcttcagcaacctgaccctggagcacatcaatgccatcctgctgggtgcctaccgccagggtccccctgcatccccgactgccagcccagagcccccgcctcctgaataaagaccttcctttgctaccgtaagccctgatggctatgtttcaggttgaagggaggcactagagtcccacactaggtttcactcctcaccagccacaggctcagtgctgtgtgcagtgaggcaagatgggctctgctgaggcctgggactgagctgggcaccctagatgtacagctgcccactctcctggtcgagctgttgaggcagtgtgcaccgtgcctgcctctgtgctgggcgcggggactggagctggctccacccacagccctgtcagaggagcacggggcggtgggggggcggtgacaatttgagctgtctctcccagctcccaaaagggcaggtgagacgaccttttgagtgctgggtgaatgacagggccacaagtgtttagaggccgggcacggtggctcacgcctgtaatcctggcactttgggagaccgaggcaggcggatcacctgaactcaggagtttgagaccagccaggccaacatggcagaaacccccgtctctactaaaatacaaaatatttgccaggcgtggtggcatgcatctgtcgtcccagctactcaggaggctgaggcacgagaatcatttgaacctgggaggtggaggtcactgtgagccgagatcacgtcgttgcactccagactgggcggcagaatgagactgtctcaaaaaaaaagagactgggtctcaaaaaaaaaaaaaaaaaaaaaagttagaattaaaatctgggagtgacaaccattaatcagatcatttcactaatggaagtttaattactaatgaagctaaatgctctgagaaaagcttaggaagcacaagaggctgagcctttcaggtcagcaaagacttcccagaggaggcagtgcctacactgaggtcagagtgacaagaagagtaatggaccactgtaaagacttgggttcggccgggcgcggtggctcacgcctgtaatcccagcactttgggaggccgaggcgggtggatcatgaggtcaggagatcgagaccatcctggctaacaaggtgaaaccccgtctctactaaaaatacagaaaattagccgggcgcggtggcgggcgcctgtggtcccagctactcgggaggctgaggcaggagaatggcgtgaacccgggaagcggagcttgcagtgagccgagattgcgccactgcagtccgcagtccggcctgggcgacagagcgagactccgtctcaaaaaaaaaaaaagacttgggtttgacttgattgagcccaggagttcgagacaagcctgggcaatatagtgagacctcatctctacaaaaattttaaaaattagcctggtgcggtggctcatgcctgtaatcccagcactctgggaggccgaggtgggcggatcacttgaggtcagaagtttgagaccaccctgaccaacatggagaaaccccgtctctactaaaaatacaaaattagccgggcatggtggcgcatgcctgtaatcccagctactcgggaggctgaggcaggagaattgtttgaacctgggaggtggacgttgcggtgagccaagatcacactattgcactccagcctgggcaacaagagcaaaactccgtctcaaaaaaaaaaatttatttttaaattagccaggtgtagccacagctgtagtcaaatctactaggcaggctgaggtgggaggattgcttgaacctgggaggcagaggttgcagtgagccaagatggtgccacggcattccagcctgagcaacagcaagaccctgtgtccaaaaaaaaaaaaaaaaaaaaccgtaaaataggccaggcacagtggttcatggttataagcctagcactttggaaggctgaggagggtggatcgcctgagctcaggagttcaagaccagcctgggcaacacggtgaaaccccatctctaccaaaaaaaaaaaaaaaaaaaaaaattagccaggcatggtggtgtgtgcctgtggtcccagctactcaggaggctgaggtggaagagtgcttgtgcctgggaggcagaggttccagtgaaccgagatcacaccattgtactccagcctgggcaacagagtaagaccccatctcaaaaaaaaaaaaaaaaaattaagataaaccctttggcagctgcgtgctgctcttagcctcaaacccaagtcttttttttccccctttgagacggggtctattgcccaggctggagtgcaatggtatgatccatactcactgcagccccgaactcctgggcttccaaagtgctgggattacaggtgtgagccaccaggcccagactgctgaagggtttaaaccagagaaagaatgtgaccagatttccaatttagaaagacccgctctctgcagggtaaggagtagcctgggggtcggggggcggggggcaagaattgcaaggtaaccagggaggccagtgcaatgtccaggtgggagaggatgctagctgagactagaagtgctaggaaaaggatgtgtgcagacaagaggtcactggggaggtgaaataacaaggcttggccatgagtggaacccaacacccatggtgccctcttgagagagggaagatggcacctgagatggaagatggaaagaccagggtccctgtgactgaggactgagcctctgtttgaggtttttgcagaggagtaaaggcaacaaaagaggcaagagttggaagaaaggtgacaaggaacaaaagtcagctatgcctgatgctactgggtggccagcaacaatgctgacttggccaaggctctgagagctttactatgctgggactggaggtcagagttgaggctagggtaagagcaaggggctcagatggagggggaggaggacctgaacaagtccagaagggaagagatttgtccctctatccaacagagtacccagtgagcagcacagagggcacagcaagggacatcacccggttccccaaatgctcagagccacaagtgaagccaaaagtgaaagacaagatgcagaaaaccgccacgggcctttgaggaagggtaaaggcgaaagcgaaagcaggaagtacagacgtgaagcctagcagaggactttttagctgctcactggccccgcttgtctgrccgactcatccgcccgcgacccctaatcccctctgcctgccccaagatgctgaagccagccctggagccccgagggggcttctccttcgagaactgccaaaggtgaagcgggggcgcggggggcggtcactcctgagccgcctctgcttgctcgtggccttttttcctggctgggggtgggggagggtgtgttggtcgacttgggttccaggcttaccccggaagaygagggagacggggaccaggttaggggaagcaacaggggtcttgaaagcagagccgaaacatgggygccctcctccgtttccagaaatgcatcattggaacgcgtcctcccggggctcaaggtccctcacgcacgcaagaccgggaccaccatcgcgggcctggtgttccaagtgagcagcggggagggacggggagctggaggggagccgagagtatcgagcaggcactgaagctgcggtccctccctctcctcaggacggggtcattctgggcgccgatacgcgagccactaacgattcggtcgtggcggacaagagctgcgagaagatccacttcatcgcccccaaaatctagtgagactcccgagcccagttcccgtacgcaaaaaagaacggccccctcgttcccactccggtccccgcacgtcccagccctgcccacaccgatcctcccttttgcctcagctgctgtggggctggagtagccgcggacgccgagatgaccacacggatggtggcgtccaagatggagctacacgcgytatctacgggccgcgagccccgcgtggccacggtcactcgcatcctgcgccagacgctcttcaggtgcrggggcagggctaacaggaccccggcaggggtagttacggggttggggccattggaaggcgggacagaaagmagggcgggaccgcgacgggccaggtgaccggaagaggccggcccaagagaacctgggctacaggaaaaggcgatgtcagtcatcgggcgccagcccacaggaaggrgcggggatagcacctaggagctgggcatagagaggtggggcctaggccccagcttgtggccgaccccgcccatcctcgagcaggtaccagggccacgtgggtgcatcgctgatcgtgggcggcgtagacctgactggaccgcagctctacggygtgcatccccatggctcctacagccgtctgcccttcacagccctgggtgagcgcttctgtcccttctcctcgaactctgcccctgtgaccttggcctcactccaaacggcgtcgcagcggttgacttcagatgcttctcctgccttcaggctctggtcaggacgcggccctggcggtgctagaagaccggttccagccgaacatgacggtgagcggcctctgtccccgactttgtggtcgctggtgggatgtgcacccgggagctgggggagcacaggaccctggcccagtgcgggtggctaaggcttgtcggaggaggtgaccactgaagggtgagtggagtaagggcagagaagtgcggtcccgacataacaccgtccaataccaaagcctgcacggctgggagaagtcgaagctcacagaggatctttaggagccgagggcggagagaaggaccagtagggtcctacttatatcaacgtctggagcctagattttgtttggggtgggatggaagcaggtgatgttgcctcagaggtggctaaggctcagagggagaaacacagtgggggtttggagggcaagaccagattgggtaagtggacaggcaagtccccaggctgtagcctaagttaacagcagagagagcccgttaggtctcacacacccatcaccgcagctggaggctgctcaggggctgctggtggaagccgtcaccgccgggatcttgggtgacctgggctccgggggcaatgtggacgcatgtgtgatcacaaagactggcgccaagctgctgcggacactgagctcacccacagagcccgtgaagaggtgagagctggagatcggggaccacagggatgtgtggggctatagcaggggagatagggggctgcaaaaaggggatgggccacatgacaggcccatgttcagaggctgtccctcctccctcccaggtctggccgctaccactttgtgcctggaaccacagctgtcctgacccagacagtgaagccactaaccctggagctagtggaggaaactgtgcaggctatggaggtggagtaagctgaggcttagagcttggaacaagggggaataaacccagaaaatacagttaaacagatggctgtgtcattcttgagtggaatggggtgggcaggcagccagcagggctctgtagctaaggcgtccctgcaggggccattacctaccatagctctagtgtctggcctaagagatgcccttcacccataacctcaggcacctacaactccagaaccccagccctggccagcattgcaggcttggtctccacccaaaccttccttctgactccacacttgaaggctcccccaccactccactgtcttgctcttgccctctagtccactggagacttgtaaattatgaaataccccatgtactaccccctcctagagactttccatggctcctcagtggcccaggacaaagctcatacctttcaatcaggcccccacaggccccactgagggctaaagtgctgacaagaggagccgctccctgactccaaggcaagttctcaccaagcactcctcaacctcgcaacatctttacctgtgacaccccttagatgacgaggcatgcctgcactgctcacgtgaagctcgtcttctgtctgcacatgctgggcttgtgactccaagttttccaggctaataagggtcacaggactcacatggggagagatgacacgtttctccaacaaacctttgctgggcccctgctgagtctcaggcctggctgctgggtgccagcaagagcatcctgtcctcagcgagaacggctgaactccgctggagcttcagaaatgtcagggagagtctacccagggcccagggagggtctatgccgggctgcacatccccaggcygctgagtgtgctccctgcaccccaacattctattaatgaacatttgtaaatgtaacagaaaagtagaaagagttgtatattgaatacccttatactgtcaggtcaccacagacctgacagtattttgttatatttgttttatcatctattcatccctctatccattaattcatcgctcctttttttttttttttttttttttttgagacggcgtctcgctctgtcacccaggctctggagtgcaaatattttgttatatttgttttatcatctattcatccctctatccattaattcatcgctccttttttttttttttttttttgagacggagtctcgctctgtcacccaggctctggagtgcagtggcgcaatctcagctcactggaagctccgcctcccaggttcacgccattctcctgcctcagcctcccgagtagctgggactacaggtgcccgccaccacgcscggctaattttttttttttttgtatttttagtagagacgaggtttctactgaacctgttagccaggatggtcttgatctcctgacctcatgatccgcccgcgtcggcctcccaaagtgctgggattacaggcgtgagccaccgtgcccagccaattcatctcattttttggctgatgctgtttctttgagatggggtctagctccatcgcccaggccggaatgcagtggtgcactcatggctcactgcagccttgaacttaagggctcaagtgatccctcctgcctcagccttctgagttgctgggactacaggtgtgtaccatcatacccagcwcatttcttaatttaaaaaaattttttttgtagagacagggtttcatgatgttgctcaggctggtctcgaactcctggaatcaagcctcctacgtctgcctcccaaagttttgggattacaggtgtgagccaccacacccagccctgatctgttcttgaatcagttaaagccctcacactcccagaaggccgccagccaatgcacctgttggaactttgcacacagggtgtcttctcccttcaagcttggtctgcagctcagtaacaaatgggctacagacaccaggggcttgcccatgggagccccaaggcctaaagagggtggcagagatttgatgtctgtcactctccacctgcagcctcagtccacggtcggccaggcaccaagagctcacactttgccctcctaaatgccaggcccttcataagtatcatctcattgttaagagcggaggcttcagcgccagacaaatgcgagtttgygtacaactcaaccacgtgctggtgggagagtcaccatctctgagcagacctgtgactcctgttccaaatggacgaggaaccactgcgatgatgtgttaggactcccagcctgccagaacctcacagcccctggcccttcacagcaaagttgaccgcagtgagcattccatccaccagtcagaacaccctggacgctgagcggccttctctgaaagcctggtgcctttgttagccctgggtgactcctgtgatcccagccaccaggttgtcactatagacctaatttaaccatctgtcctcagtacsgagggctcaacatttggaatgggaggtggttctgggagccaattagaggccaggctttgggaggtggcagaggtgagtctcacacctgggctctgtctgataagtctaggtctcggtcaggggaccttggcctaaagggcctgtcttgcctggagcgtgggagggggctgagtctacacagctggcctggcctcaggcctggagctttagctcaaggacgagaagacccataaagccagacccagctcccaacctcacatctgccacgatgttgctgctcagcctgaccctaagcctggttctcctcggctcctcctggggtgagtgggccaggaccagccctgattcagccctgggagcaactcagctcccagcaacagcccagggaaggagctaggctggctggaagggacgaaggtggacagagtgggyaaaagaaacaggatatgccagggcagtggagcagggaacagkcctgcagggctgggagggggcaagaggtggggtggtctcacaaataggaccagagattgagccaggccctggagcccgggagggtttaggaagctgagacaggaagacctgtccatgtcttttagaaagaaccttctggctgcatgaagggtatgaactgttcaggtcgggagggggcagagagaccaggggtagagatggggaacagcggggactaggctggagacagatgtaggagaacagcagggctgggggactgggtggatagggataaccaagatagctgtggggcccgaaggtgcttgcatgtaccctgttggggaaggggtagtgctgtaccctctcgacagacctctctggggtgcacagcctggggcacccaaaaggaggtggggaaagatgggctgaggcatgggaagcaggtcctcattagcccaatggccaggctgcggcattcctgccatcaaaccggcactgagcttcagccagaggattgtcaacggggagaatgcagtgttgggctcctggccctggcaggtgtccctgcaggtacaccaccagaggggtgggcagggtcctgggtacgtcatgcctaggggcagcctcagcagcccayccccactctgacctctgagccctgaccacaggacagcagcggcttccacttctgcggtggttctctcatcagccagtcctgggtggtcactgctgcccactgcaatgtcaggtgagtgcctgcattccacctgccccgcccctcgcctcttcctgcctcctcccctggctgtccccctctcgcgctggcctccctgcagctgcctaatcccacccccttgcagccctggccgccattttgttgtcctgggcgagtatgaccgatcatcaaacgcagagcccttgcaggttctgtccgtctctcgggtgagtgcctgggctgcagacacggaggaaaagtgggcagtgcaggtgggtgggtgctgggaacgaggaattcaggacatgccctggcctaccctgctcagcacccatcagaacatggactgtttctgaccccacaggccattacacaccctagctggaactctaccaccatgaacaatgacgtgacgctgctgaagctcgcctcgccagcccagtacacaacacgcatctcgccagtttgcctggcatcctcaaacgaggctctgactgaaggcctcacgtgtgtcaccaccggctggggtcgcctcagtggcgtgggtagggactcaggccaaagctcagggtgggaggactggggtggggaccagtgttctgggccccatgtgaccacccctcctggcccacaggcaatgtgacaccagcacatctgcagcaggtggctttgcccctggtcactgtgaatcagtgccggcagtactggggctcaagtatcactgactccatgatctgtgcaggtggcgcaggtgcctcctcgtgccaggtaagccccagcacccgctcctctgcgctgtcctgtggtatacctccccaaccccccctactcaattctccctccctcttccctctcagggtgactccggaggccctcttgtctgccagaagggaaacacatgggtgcttattggtattgtctcctggggcaccaaaaactgcaatgtgcgcgcacctgctgtgtatactcgagttagcaagttcagcacctggatcaaccaggtcatagcctacaactgagctcaccacaggccctccccagctcaacccattaaagacccaggccctgtcccatcatgcattcatgtctgtcttcctggctcaggagaaagaagaggctgttgagggtccgactccctacttggacttctggcacagaaggggctgagtgactccttgagtagcagtggctcttcctagagtagccatgccgaggccggggcccccacccctcctccagggcaaccccttggtcctacagcaagaagccagaactgttggaatgaatggcagccctccctggagaggcagcctgtttactgaatacagaggatacgtttacaaactgaatacgcataataaataactgcacattctccatccacaggccatggcatgaaggcccaagtgggtctatcaaaggcccacatctccaaaccccctgtcctgccctcaggaccaggcccaccctgggcaagagagaacgtaagccccagggcttcaggtccccagagacacttggggaactggggggaaattctgaggccatggggcttggttctccactgcctcctgcccagggggcattggggacggtaggaggatgtgtctaaggcatagtcgacttggcacagagtggtctctttagttttgtttcccactggaggtggcacatgcaggaaaagggcctggcccaggctgccgaccggcagaagctgagtgggaaccaaaccctcctgcaatggcaggggccctgccgtcaagctaaggccaaagctgggccctggccccattctacccactgaaggcagctgtggaggaaggggcttgggttccagcctggtttgtggtagggggagataccacaaaagaaatggggatggttctggctcaggcctctgggaaagcagccacccaaccccacccacctcccgcaggggctccttccagcttgaggctcagtgggacccagactggaaggttaatgctgtgaagggaagcagcacagggtggacggggcaaggccagctgtgagaaggcagtgcccctggcaccctggtttcagaggcaggtcacacagtatggctaagttccagggaggggtgcgcagaagctcagcagaaggggagaggtgagcagcccgggaccctcccccagggcggcaactcctaccttcccatgtcctcatggaggactacaggtgtgcaccatgggtgggtgtgcacgatgggcaggtgtgcacgatgggcgtgcagtgatcactcccaggctgccaacacccatgcagacaccagatggcgccttcgtgcagctgcagaggagggagcaacagagcctgaagggaaaaggcaatggggctgcaccaaaggatagaacccaggctgacactcgaccctaatcgggaggacccccttccctctgccttggcccccaggtgccccattccccaggtagcagcagtggggctccctttaaccacccccagttgggaaggaggcacctggggaatggaatggacatccaacggggagagggaggtagcggtgggctctacaaagaaggcaccaagggcggtgggctgagacccctcagaatctggagaggctggagcctgggcaagccgatgaccagcatggccacacagtccagaagggtgaaggtccacgccatggccctccaccagaggtcctgggaccaggaaggctccctggaggcaccatgaaggaagacagatcttggctgggaggtggagggctgtttcgacctagccaggggctacgggtccagtcaaggcacaagctttgtgcctaccagggtctcccactggagcataatcttaaggatcaggatgcatgggaatgtgtgaaaccagggagaagggctctgtggaggaaagggggtcccagaagtaactgtcccaaagggtcctgaggccacaggacactccacccagcactgcagttccctttgattggggaaaagtcaaagggcaagggagacagtgaaggccaggtcctatcccttcccaactccaccagagcagctgcccaccaagaggggtatcagtgccaggccaggctcccagttcagggggagtcacagccccctgtgctacctctactctgtcacacctggcccaggcccatggtgaggacaggggctgctgaaggcacagagaaagggctggagccagacattcttcacctactgtgggccacataggcctatctccagagagggcatcggacccagatggcaccacagtgtgtggccaggctgggtcgtgctgcatgtgtgcacagccaggcggctcagccattgtattgctgctggtagcgcaggttgagctcccgcagctcccgttcccgcacacggcgtgacttattggagcgtgtggagcggctggaacgcgtggactgggcagatttggtgctctggcagcgcgaggaggcacgtttaaggaggttctgggatatggagcggtgcaggttcttcatggatgaagaggcagccatgctcaccacccacgggtgcctcagggcctgcagtgcagtcatacgggctccagggtccactgtcagcaggcggtcaatgaagtccttggccaggttggacacactaggccagggctagagaccaaggacaagcattagagtgagagcatctgacactgcccaccccatctggatgaggccactactcagcaaccctcccctttccagagagaggtgctgcccctcctctcatgtagcacttggggcctccccgcccaacgctggctcaggctgaacaagggctgctctccaggtgatggagtctggcaaggaaggaaaggacctgtgcactctcccagggagcaaattctatggtgcactggacccaaagcctggctcagggagatggcctctgccaagacccccccgaacttgtcccaggagtatcataactcaggggactgttagagaatgattcaaactttcccaccacatcctaagtcagattgaagctccaatctctggatgaccaggatcaggctacttaaaggggaacttcctagtccttacagagaagatccaacctctctccaactgccgaagcagtggcagaagaccactgctccctgcctctgcctcccggcatggggaggaaaggaaacaattcaaggcaactagatttcccagtcggctgagggcaggcgatcccgggaccaggaaggaaccaggacccttctcagtggcaccctctggcccgcattacttctctaagccacaaagggctcctggcagtgctgtgcgccagcctcattttagtacattctgtcccctgggaggaactccataaagcccactctgccacatgcaccccgggctgcctcatctcagccccgaacccagcagctgtctgtctcagggcctcaggttgtacggctgtcttcacctgactggatcctcaggttctcagggtaaaggacacttgctcagactccctcttagcccccagtgcttccagcaattattccagctgtaacgtgagactgcaatttcatgttcgtttagtattcccatgagatcatgctgagctggatgagcccgtgcctggtgctgcgcatacaggaagcactcagtaggcacaggctcagacagtaaacaacccacggtgctgccggatgggtgccctttcctggagctgcttccaggccttggggctcagccaggtgagtccttgcgtccctgcatctcctaggaacacttctggcacgggctctgaggctcccccaaggataggcagctaggacctttcctgagcctgctgcagatgactcaacagggatgctaacgatcccctcactttccttcctgccaggtgaggtctgcctgttccacccatggtacccttcaccacccatggtacccttcaccttgaggaacccctgaacatgccctccagggggttcaggaggatctgagagaccaccttcagggcaggtgcacagccatctagcagacacacacactcactgactactgctactcccagtctggctcgcctgacctccaactctttccctacccccttccccactgccacagagggatgaggcagggagaacacgcttccaccgtcctgaggaaggcctggggctacctgcagctgctgtcttcacccactctttggaaggttattccaagttttactgagctgaagtgggagcaacaggggaaccatattcccaaacacacctaacagggtcatcctcatcagtgggccagcagcacccagtgactcctggggagatgctggcccccaggaggaggaaagtcagggtccaggagcatgcagccaacgaaggcccatagatgccttactatccaagggctgtgggtgggcgcagagagcaacagccctccccgacaggcaggtaagtctcctgggggcttgtgtagttcaagattcatattgagggccaggcgtggtggctcatgcctgtaatcccagcactttgggaggctgaggcaggtggatcacaaggtcatgagatcaagaccatcctggccaacatggtgaaaccccgtctctactaaaaatacaaaaattagtcgggcgtggtggcgtgcctgtagtcccagctactcaggaagctgaggcaggagaattgcttgaacctgagaggcggaggttgcagtgagccaagatcgcaccactgcactccagcctggcaacagagcgagactccgtctcaaaaaaaaaaaaaaaatattcatattgaggtattaaggccaatatgcagggcaactggactagacagctgccacaatagcttttggatcacagctcaagaaaaccccaaaagccaggagcagtggcttccgcctataatcccaacactctgggagtctgaggcaggaggactgcttgagcccaagagttcaagatcaccctgggaaagatggtaagactccgcctcaaagaaaaaaaaaaattaataaatttttttttaaaaaagaaagctccatggttgcctcctgaacacaaggaaccactactgggggcagccagtccagaccacagacattcactgtagcccccatcacccaccggagagacagaaagaagcttgatggagacagcacacacacagctgaacagagtgggtcaggggacacctctgctgcctgctggccttctacagtctccaggaagaggaggactcactaggaagcaggctgcagctcagtctggcctgttgctggaacagccccaagacagggctgacagcccagggtgtcccaacagggctgggaaatggattctgcccctgccccttggtccagccaagacaaaagaggggcaactcccctacagaggccaggagcctgaacatggatggactggaggtttcaccacttcacatccacacccagcgaaaccgtggacctgaaactccaaaccagtcaccagtgcagtcttggaggggcctctccccagaccagccctatggtcttaagtgtctccatcttcagagtggcacaggctcacaccagcaggcatcaacccctgctgctcatggagcggccggcctgttagtgccaaagcgagccagattgatccctctccccgctgctccccaagattctcgcctcaccaattactgtgggcatgtggctgtgcgcagaatgcagatggactcatttgtctgagggctggcctggcctctctggcaggtcccagctcttcccatctttgaagagctgtgagcagctaggccaggtgggtcccccaagccaaagtgactcaagtcgtcctgaactggtccccagcctaacccttgtacacagaggaaagtcaggctgaacacaagaaggtggtcctcatccagctgacagtgaggcaggggcttagggtgaccttcagaatagcagcctctggaagccctgctgaggcctcccacagggcttagaaaagtaaggctttccacactcgcccacagccaggcttcaggcctcacatcaactcagcacctcctaagaaagcactcaacgccagcagcccaacccacctgcttcccctggagccacgtaagtatgtgtgtcagccaagggctgactggctgggaagcattctaagcaggagaaaagggaaaatgatgaatagtcatgctcttcagtctccacaactctgtttgttctaggtgaagaactgaactcgtgcctcagtatacttatttgagccataccagggacacacatggcctcagttggctgacagatggcacaggtgccaagacccacctgggcagtctctgaggcttccacctgcttctgggccgacgtggagcacgaggcacagagggaaacactaagatgtcagctggctctacgcccagactctcaggtcttcccttgctctgggatcagagaacagcttccatacccagggtgacagcctccactctctcctttccacagtctctgggcaagtcagtggctcacacctctaatcccagcacttcgagacactgctgcgtgagtgagggctgggtcctgcttcaagaggaagacaagcaggggctgtaggaggagggcatcacctctgctctgattctgaccatcaagctggctgccttcctcctgagtccatggccctcaaaagagtccttttccccttgcagttagggtacctgctcctgatgttggaacagcaaagatgccaataatgggtatgggaagcgacctcttccgtgagcacctccttaccaactagccttcctcatccccctacccatgctgggccaaagccactcctaggcagtggagtcctactccccctggagagggagaggcagcacagcaggaagggctttccgctcccgcctgaggaccccccgcaccaacccttttcgtttgctctagctctaatgtctggcacaagggcctggcatgaacactacccaagccactgccagcggtctcacctggagcctaagggctaatgaaacaaagaacagcgccagctctctagcagaggctgcagacagaggaggaagctgcttctttctggcagcaaacacagcttacagggcggccctagacttcctctggcaggcagggctgcctactggcaagtgaggctgggagagaaaggccccttggtgtgtcttctgagtggcatctgggatacgttaaagggttagattgcaagcccagcaacctgagttctagttctaccttctctgtcggccttagagaaatcacaccgccttcacttttaacacgaggaaggggctgaatgtcatgaactctaagtcccttccagtttataaactcctggattcctttttctccaccttttccttcacgtggccacatgtgaagcgcagagtttagcatttaagctgacctcttgagccctgggttccttatctaaccaatgatgattctggggcaggctggctgacagaggaggtggccccaccacagtgcttctagagaagggatgggaagggaggaagaagcctgggctttgctaccatgactcagttcttccctcagctctatttcaagatgtattttcagacccactattcccaccttcaaaggcctcctttctgtacttacgtgggcctgaatgagagcagagaaaagggcacagaggaaattctggaaacagagc

SEQ ID NO: 97260 - DNA, 36805 bp, Homo sapiens
  misc_feature (1)...(36805): n = A,T,C or G
gagaacggtgaataggagtatgactagacagaagatagtagggatgacaagttttttggggcacaatctaagttggtctggtgtctggaatgagactggggcctaataaaaaggagtgtctacacaggagcttaaatgggctgtatcttgtagcattccaaggacaggcctgaattctggaagcgaaaatggtaaaagtattgtccagtcctttttaagttggtggctgagcttggtgaggtgtgtttttaatagaccattagtctgtcactgaatactaagagcctgaaaaaatgcttggctgatttgactaataaaggctggtctgttagcagactgtatagaggtgggaaggctgaactgaggaattttgtctgacagaagggaatgacaaggctaaactgaagaattatgtctgacagaagggaagaaatgactgcggtggccttctcagaccctgtaggaaaggactgtacttacccagtgaaagtgtctacctagactaagaggtattttagttatcttactcggggcatgttgagtaaagctaatttgccagtcctgggcgggggcaaatccttgagcttgatgtgtagggaagggagggggcctgaataatccatgaggagtagtagaatagctgatgcaacactgagaagtgatttctttgaggatagatttccacaatggaaaggaaatgagaggttctaagaggctggctagtggcttgtaccatagcatagcctgcctttgctggtgtgtggcgattaggcctggtggaaccgccatcaataaactaagtgtgatcagggtgagaaacagggaagaaggaaatgtggggaaatggggtgaacgtcaggtggatcagagagatgcagtcatgggggtcaggtgtggtatctggaataatgtgggaggccagattgaagtccgggccaggaacaatggtaattgtgggacttaacaaagagtgagtacagctgaaggagccagggagcagaaagtatatgcatcaggtgtgagtaagaaaatagattttggaaattatgagagctgtagagagtgagttgagcatagtttgtgattttgagggcctctaaaagtattaaagcagcggcagccacagcacgcagatatgagggctaggctaaaacagtaaggtcaagttgtttggacagaaaggctacagggtgtggtcctggctcttgtgtaagagttctgaccgcgctaaccatgcctaggaaggaaaggagttgttgttttgtagaaggtgctggggcttgagagatcagtcagacacgatcagcagggagagcacgtgtgtttttatgagaattatgccaagataggtaacagatgaggatgaactttgggcttgactgcagtaatgggggctgtctgtgaaaccttgcagcagtacagcccaggtaatttgctgagcctaatgggtgtcagggtcagtccaagtgaaagcgaagagaggctgggacgaggggtgcaggggaatagtgaaaaaagcatctttaagatcaagcatgggaatagtgagttgtggaggaaggtattgaggacaaaagagtgtaggggttgggcaccacagggtgcataggcaaaacaatttggttgataaggcgcagatcctgaactaatctgtaagacttgtccggtttttggacaggtaaaatgggggaattgtaaggagagtttataggttttagaagcccatgctatagcaggcgagtgataacaggctttaatccttttaaagcgtgctgtgggatgggatactggcgttgagcagggtaagggtgattaggttttaatgggatggtaatgggcatgtgatcggttgccagggaaggagtagagatgtcccatacttgtgggttaaggtgggggaataggagaggaagacgcgaaggaggctttgggttgaggagaagggtggcaatgagatgcggctgtagtccaggaatagtcagggaagcagataatttggttaaaatatctcggcctaataagggaactgggcaggtgaggataactaaaaaagagtgcataaaagagtgttgtccaagttggcaccagagtgggggagttttcaggggtttagaagcctggccgtcaatacccacaacagttatggaggcaagagaaacaggcccttgaaaagaaggtaatgtggagtgggtagcctccgtattgactaaggcaacggacttaccttccaccgtgagtgttacccgaagctcggcatccgtgatggtctacagagcttccgaggcgatcgggcagcatcagtcttcagccgctaagctgagaaggagtcagagagccttgggccagagttccaggggctctgggagtggctgccaggtgagttcaacagtccgatttccagtggggtcctacacagatgggacacagcttaggaggaatcctgggctgcaggcattccttggcccggtggtcagatttctggcacttgtagcaagctcctgggggaggaggttctggaggaacgcctggccgccgtggttcaggtgtttggaagttcttgtgtgctggagatgtggctggggtttgtctcacagtggaggcaaggaattgcaacttttttctattattgtacaccttgaaggtgaggttaattaaatcctgttgtggggtttgagggctggaatttaatttttggagttttatttaatgtcgggagcagattgggtaataaaatgtgtattaagaataagacggccttttgacttttaagggtctagggctgtaaagcttctcagggttgctggcgaacgagccatgaattgggctggatttttatatttgatgaaaaagagcctaaacactatctgatttgggataaagaaaaaggagcattaaccttgactatgcctttagctccagccacctttctaagagtaaattgctgggcaggtggaagagggctagtcactgaacgaaactgtaagctggaccaggtgtggggaggggaggtgataaaaagataatacggtggaggagcggaggctgaggaagaattgggacctagctcagcctggggaggagggagaggtcagacgggtctgtagaaaaggaagattagaaagactcagcgacgcttggggttgagactgaggggacaggcaggagggaaagaaggaagatttgggacgagttgcactgggcacagagactaggaagggactgatgtgtaaaagaatgcctggacgtcaggcacctcagaccgtttgcccattttacgacaagaattatttagatcttgcaggatggaaaaattgaaagtgctgttttctggctatttggaactgctgtccagtttgtattggggtcaagcggcattgcagaagaaaataaggcatttaggttttaggtcaggtgtgagttgaagaggttttaagtttttgagaacacaggccaagggagagaggaggaggaatggagggtggaaggttgcccatagtgaaggaggcaagcctagagaaaagagagagtagagacacggagggaaggggttcgggagttcttaccttccagaaaagcgggaaaggggttggggcatggatataaggggttggggcacagagataagaggttggggcatggaaataagggatcagggtgcagagataagaggttggggcatggaaataagggatcagggtgcagagatacgaggttggggtacttgcccctctagaaaagcgggacttgccgctaagagtgaaggagaaggggttgggggtttcttgccccccagaaaggtggagaaggggtagagacatggagaggaggggttggggaacttgccccttccccagaaaagtgggacttgccactaagggtgaaggaccaaggcaggcgtccctgcgtgatctgacacctctgaaacgtgggtatataatcagagaggcgtccctgcaatgattaaacgccaagggaaggctgccttccctagtccgtgaccggcgccggagttttgggtccacagataaaacgtgtctcctttgtctctactagaaaatgaaaggaattgaaattaagagaagggagagattgaagagtggaaaggagaaagtggttgagggacagtgagagaggttggagaagagagtaagaagaggtcgcttacccaatttaaacttggtgagatgttccttgggctggtgggtctgaggacctgaggtcgtaggtggatctttttcacagagcaaagagcaagacaggggattgatctcccaagggaggtcccccgatccaagtcacggcaccaaatttcatgtgcgtccatgtgaagagaccaccaaacaggctttgtgtgagcaataaagcttttaatcacctgggtgcaggtgggctgagtccgacaagagagtcagcgaagggggatggggtggggccgttttataggatttgggtaggtaaaggaaaattacagtcaaagcggggttgttctctggcgggcagagtgggggtcacaaggtgctctgtaggggagcttttgagccaggatgagccaggagaaggaatttcacaagacaatgtcatcagttaaggcagtaacaggccattttcacttcttttgtggtggaatgtcatcagttaaggcaggaaccagccatatggatgtgtacgtgcaggtcacaggggatatgatggcttagcttgggctcagaggcctgacagcacctacctaaaaaattccaatagcactaaaagggtgtgtacaaaatgcagtggctgactaaccatctcctccattgctccgcctaagagacacccacttttagctgttttctttaggaacttgttaatattaggtttctaaaaacatgtaaccatgtgaatgagcttagacttactggattcctatcataataggcggggccttagttattctacagcgttgttcttactgttttttctcttccaatgtttatctctatgtctgcatatcaacattcagtatcacattttttttttttgagacagagtctcactctgtcacccaggctggagtgcagtggcgcaatctcagctcactgcagcctcagtctcctgagtagctgggactacaggcgtgtgccaccacgactggctaatttttgtatttttagtagagacagggtttcaccatgttggctgagctggtctcgatctcctgacctcgtgatctgcccacctcagcctcccgaagtgctgggattacaggcatgagccaccacgcccggccagtatcacatgtttatacccacagatattcgcagccgagaattttcgggtaatataacttgcttcttttatttttgttgttgttattgttcccctaaagtttacatttgttttttatttttattttcttttgaggcagggtctcactctgtcacccaggtttgacagcagtggtgcaatcatggctcactgcagcctcaacctccccgggctcaggtgatccccaacctcagcctcctgagtacctgagagtaggcatgtggtaccacacccagctaattttttatattttttgtatatgagacaaggtttcaccatgttgcccaggctggtctcgaactcttaggctcaagcgatcccgcctcagcctcccaaagtgctgggattacaggtgtgagccactgtgcctaggctatactggtctttttaaaatctacttagtttacttgacctctaaaattatttttcctctgtcttctgatagcatctcagtatgattttccactatgttaagacgaggaattgacccattcttacatttggaggcttctctaagcaactttcccattcccccttcacccaagctgtgtgctcactagccctgattcacagccgtcgtcctggaacttcttggtgccatccttctgtcttttcccaagtgactcacctccctcaacctcccacagtgccgggattacaggcatgagccactgtggccagccattcttttccttttttaaaacaatttttatcttctttattttaagtagagatggggtctcactatgttgcccaggctggtcttgaactcctgggctcaagcgatcctcctgccttggcctcccacagtgctaggattacagacatgatccactgcacttggcccagtggtacagttttacactcattagatggtcaagaaatgcctaaacgctataataaatatagaactttaccttgagaagacctaacatttccttcagaaagtaaatatgagaggggtggagacggtgcattatcttatttttatgattttaaaaatgtatacakaattgtacatatttatggggtggacagcaatattgcagtacatgtatacaacgtgctatgatcaaatcagggtaattgacatattcatccctgtattttttgagacaargtcaggcttcrtcacccgagctagagtgcagtggtgtgatctcagctcactgcaacctctgcctcccaggctcaagccattctcccacctcagcccccygagttgctgggagtatagggatgcaccaccacacctggctaatttttgtgtttttttgttttgttggtagagatgaggtttcaccatgttgcacaggctgatcttgttttctaatgtgaagggaagcgggcaacgtgctagttttacactaaggaaaatgaatgacatacccaaactgcctgcaagacccgttctgagagacgaaaggagatttgttagaccgcagtgggagatggagtgagggtgagagtttctggggaaaaccagacaagagcacagagggccaaagggaagcacrggaggattttgcacagaggatggaacagagtcaaccctgagagctgggaaccttagagatccgtctggagcccatattagagaggttgaagaaagaggccagtatgtggtccagccagggtaccatgtcatccacagtgtgcagggaggaggatggggtctccacagattccttccatcccaaatggagggtgccctcagacagagaggcagacagacagacagacactggccgaacggctccctgatggaacaccaggaggaggcagcatggcctcgtttccacagctgtagcctctgccctcctgcttccacgctccacacacgccagtctttgagtcgcctcccatgccatgatccctcccttggatacgaccgtgcctggggttcagcggtcatgaacataacccgcggctgtgaacatcctgtcggcctccatcctgacccccgtdtgatttccgggtcwgcgggaggggcggsaggggcggaagcggcctctgcacagccctgcccctgtgccgcaggcgcttcctccggctgtgccagtcctctgccagaaaccccgccaggattattaggatcacagcyccgaggcatatccggaccaggttgcccttggtgtagtactggcgggcaggacctggaggaatgaggagaggcaggagcaggtgaaagagcccacctccaggaccccctccaagccacatctgggcttctcagagatcctattattctctactagctaggggatgccgctcactttcctggagggtccctcccttcccgagtaggggtcagggccagatgaccccaattctctaagtagcacctctccctcctgtgctctcacagggctctgagacaactcctccccagacacagatgctgcctcgttatctgatgcattgcaaaagagaggacagttataagggstggggragagatggaatctctctttctctgaccctttttaaaatctcaaccttcccacctgatcttaatgcccaattctgaaccccatacgctgatattctgcctttactctacacactggaacccaagatctgagagctgcagcccctgcgtagacaaaggagttggctttggtgaagagacgggtgagaaggaagggggtctggagaggatgacttactcaccagctggagagtctgactcctttggactggyggtgatactcctagaagtctctgggaaccaaacaaaggctaagtgtgaaatgaaaccatattcccgccccctgtcactgtgcctactccgaacacacacacacatggkgaggcacaattccacagcatttaagaaaagcatgggccgggcayggtgcctcatgcctataatcccagcactttgggaggctgaggyaggaggctggcttgagtccaggagttcaagaccaacctgagcaacatagaaaaaccctatctctacaaaaaaatacaaaaattagccaggcgtggtggcacgtgccagtaatcccagctactcagtggaggctgaggcaggaagatcacctgagccctgggaggttgaggctgcagtgagccaggattgtaccactgcactctagcctgggaaacagagcgagaccctgtccaaaaaaaaaaaagcaagaactgtagagtcaggctgtcctccagatttgaaccccaactctatcacctattagatgtcagttatctggcaagtgactcagcatctgtgagccagttccccatgtgtccaataaaattaacaagatcccttataggttgatgtgaaagtcaagataataataatggtagaaatataaagcaccgtgcttgacatatgagcacctcatacgtgccagctttttttttttttttttgagacagagtctggctctgtctcccaggctggagtgcagtggcccgatgtcggctcacttcaacctccgcctcctgggctcaagcgattctcctgcctcagcctcccgagtagctgggactacaggcgtccgccaccacgcccagctaagttttgtatttttagtagagatgggatttcaccatattggccaggttggttttgaactcctgaccttgtgatccgcccgcctaggcctcccaaagtgctgggattacaggcgtgagccactgcacccggcctccagctctcttattcctcaagtatctcctgagactcgccaggtactcagccatgtgctgggccatgggaacccaaatattaataagacattgtcaggccaggcatgacactggctgaatgcctgtaatcccagcactttgggaggccaaggtgggcggatcacstgaggtcaagagatcgagaccatcctggccaacatggtgaaaccccgtctttactaaaaatacaaaaaatagctgggcatggtggcacacacctgtagtcccagctactcaggagccggagattgcagtgagctgagatcgcagagtgagccgaaatcacagatcacagagtgagsagagtgagackccgtctcaaaaacaacaacaaaaaacaaaaaaaccataagacattgtccatctgcggttcccagactattgcaggagaccaaaaagtaaagcgatttttttttttttttaatacggagtctcactctgttgcccaggctggagtgctgtggtgtgatctcaggtcactgcaacctccaactcgtgagttcaagcgattctcctgcctcagcctcccaagtagctggaattacaggtgcccaccaccacgcccggctaatttttgtattttcagtagagacggggtttcagcatgttggccaggctggtctcctgacctcaggtgatccactcaccttggcctcccaaagtgctgggattacagacaaagcgataattttaatatactgtaaaaattgctgtaataggcagcccacaagacactgagcgagagcagaggaaaccatcgatccagcctggacggtcaaggctttcttgaggaattgatgccatggggaaatggaagaaaaggcagagtgagtgggttgggtgcagagtcaggagaggttaggaagcctccaggagagcttcaagtgactgtgtgtggctgagaacagcatgggaatgcgtggaaggtatgcagacaaaattggagggatcaacaggggctggatatctaagctcacagaatagcaagctgaggaattggaactgcatsctgagggtgattgggaggttccgaactgaagatagggaaggcttccatcacagaactccctgggatatgccgggcgcggtggctcatgcctccaatcccagcactttgggaggccgagacaggtggatcatgaggtcaggagttcaagaccagccttcccaagatgctgaaaccccgtctctactaaaatacaaaaattagccaggtgtggtggcatgcacctataatcccagctactcgggaggctgaggcaggagaatcgcttgaacccgggcagcagaggttacagtgagccgagatcgcaccactgcactccagcctgggcgacagagcaagactccacctcaaaaaaataaaaaataaaaatagaactacgtgggatcaggtgcctcatgaaagccagagtcatgtgggcccagtggaagtatctaacctattatcagggaatctgtgaaggtgtttagtctggaaggaaatggagattttccaggacaggcaaggggaaagagactgaggaaagcgtatctgcagaggcctggagcggttagaagatgtgctrtgtccaggtgcctacagtctgtgtgcgtccgagcatgggctctacctggacacagtgaggagcgagattaaatacctggatcacagccgagtccaaagcctaggacttcatcctgggagcagtgcgtagggatggcggtcgtcccgccacagccttggctccgccatctttgaaatggccccatcacccaaaaygctcctccttctgaaccccagagctccactctgcacccatgctctagcctcacaccaaggactttcttggtaagagacggacagttcggtgaagtgrttraaagcctacaggcttagataatggaagagagagctccgtcctcacactcctttctgctgagcatgaaatgcctggttactcaccagttgtgaagacttygtttgtgaatgagacggtcagttcagcggtggcttctgagaattctaagaaagcaaaacaatgttaggtcttccccgtggttccctatatcctctagatatctccattccccttttgagatatctaggctccctgaaacccctttctctgacacactgcacagacactgaagacagacaaattcgaaaggtgtaagacttatcttccatgaccggcttagtaagaagcagatccgttcagcaattgatagacacttggttttttttccacgttttgctgttatgaatattgctgctgtgaacattgacgtacaggtttttgtgtgaacataagttttctgttctcttgggtacacacccaggggtggtggaatcactgggtcatacagtaactctgtgttttactttttgaagaactaccagacttctttcttttttttcttttttttttttttttgagacagagtctcattctgttgcccaggctggagtgcagtggcgcgatctcagctcactgcaacctccacctcctgggttcaagcgattctcctccctcagcctcccgagtagctgggattacaggcacctgccatcacgcctggccaacttttttttttgtactttagtagaggcrgggtttcaccatgttggccaggatggtctcgatctcctgacctcgtgatccaccctccttggcctctcaaagtgctgggattacaggctgcgcctggccacagactgtttttcaaagcagctgcaccattttatattcccaccagcaatataagaaggttcttccaaatcctcaccaatacttcttgtccgtttgttttgttttaaaaatcatagtcatcctagttggcatggtgaattttatggtatgtgaattatatctcagtttgaataataagatgtggatccatgtcttcgtgagcctagaggaagaatgagctcgtgttagcctcagaacacgggatctccaccttccaacttaggccattttctttttttctttttttttttttttttgagacagagtcttactctgtcgtccaggctggagtgcagtggtgcaatctcggctcactgcaagctctgcctcccgggttcacaccattatcctgcctcagcctcccgagtagctgggactacaggcacccgccaccacgcctggctaatttttttgtattttcagtagagatggggtttcaccgtgttagccaggatggtctcgatctcctgaccttgtgatccacccgcctcagcctcccaaagtgctgggaatacaggcgtgagccaccgcgcccggccaggccattttcttaaccaggggcctcctgaggccaccaaaatattcctgaactgcctcagctgataaatacgaagctcttgttgcagtgggtactatcctgggagtctttttatggtggaaccagcttggaaaaaactagtttatgctcagctctcggtggcataatgagagtgtgggtattatttggtctttgttatttctcttcgtgtgagatgcattaataaacctttttttttttcaattaaaatttcagttccagaatccatgtgcaggacgtgcaggtttgttacataggtaaacgtgtgccatggtggtttgctgcacccatcaacccatcacctaggtattaagccccacacgcatcagctatttatcctgatcctctccctcccccaattccccctacaggccccagtgtgtggtgttcccctccctgtgtccatgtgatctcattgttcagctgccacttacaagtgagaacatgcagtgtttggttttcagttcctgtgttagtttgctgaggataatgttttccagctccatccatgtccctgcaaaggacatgatctcattcctttttatggctgcatagtattccatggtgtatatgtactgtatttgctttatcctttctatcattgatgggcatttgggttgattccttgtctttgctattgtgaatagtgctgcaatgaacatatgtgtgcatgtatctttataatacaatgatttatattcctttgggtatataaccagtaatgggattgctgggtcaaatggtatttctggccaggcgcagtggctcacacatgtaatcccagcactttgggaggccgaggtgggcagatcacctgaggtcaggagctcaagaccaccctggccaacatggtgaaactcccgtctctagcaaaaatccaaaaattagccaggcgttgtggcatgcacctgcagtcccagctactcgggaggctgaggcaggagaatcacttgaaccctggaggcagaggctgcagtgagccgagatcatgcccctgcaatccagcctgggtgacagagtgagactctgtttaaaaaaaaaaaaaaaaaaaaaaggtggccctggtgcggtggctcacgcctgtaatcccagcactttgggaggccgaggcaggtggatcacctgaggtcagaagtttgagaccagcatgaccaacaaggtaaaaccccatctctactaaaagaaaaaaaaaaaaaaaagccaggcatggtggcaggcgcctgtagtcccagttacttaggaggctgagacaggataattgcttgaacctgggaggtggaggttgcagtgagccgagatcgcaccactgcactccagcatgggctattgagcaatactacatctcaaaaaaaaaaaaaggaaaaaggatttctggttctgggtctttgaggaatcaccacactgtcttccacaatgaactaatttacattcccaacagtgtaaaagcattcctatttctccacagcctcgccagcacttgttgtttcttgacttttgttggtttttttttttttttttttgagatggagtctcgctctgtcgcccaggctggagtgcagtggcacaatcttggctcactgcaacctccgcctcccgggttcacgccattctcctgcctcagcctcccgaatagctgggactacaggcgcccgccaccacgcccggctaattttttgtatttttaatagagacggggtttcaccgtgttagccaggatggtctcgatctcctgaccttgtgatccgcctgcctcggcctcccaaagtgctgggattaccggcgtgagccaccgcgcccggcgtttcttgactttttaataatcgccattttgactggtgtgagatggtgtctaaatgtggttttgatttgcatttctctaatgattggtgatgttgagcttttttttgtatgtttactggctgcataaacgtcttcttttgagaagtgactgttcatgtcctttacccactttttaatggttttttttttcttgtaaatttgtttaacttccttgtagattctggatattagacttttgtgaattgatagattgcaaacattttctcccattctgtaggttgtctgttcactsygatgatactttcttttgctgagcagaagctctttagtttagttagatcccatttgtcagtttttgcttttgttacaattgcttttgacgtttttgtcatgaaatctttgcccatgcctgtgtcctgaatggtattacctagattttcttctagggtttttatagttttcgggttttgcatccaagtctttcatccatcttgagttaatttttgtacaaggtgtaaggaacgggtccagtttctattttctgcatatggctagccaattctcccagcaccatttattaacccacagccaatttcatactaaatgggcatttcccttgaaaaccagcacaagacaaggatgccctctttcaccactcstattcaacatagtattggaagttctggccaggataatcaggcaagagaaagaaataaaggatactcaaataggaagagaggaaatcaaactatctctgtttgcagatgacatgatcctatatctagaaaaccccatcatctcagcccaaaagtttcttaagctgataagcaacttcagcaaagtctcaggatacaaaatcaatgtgcaaaaatcacaagcattcctatacaccaacaatagacaggcagagagccaaatcatgaaggaactcccattcacaattgctacaaagagaataaaatacctaggaatacagctaacaaggaaagtgaaggacatcttcaaggagaactacaattcactgctcaagaaaatcagagcggacacaaacaaatggaaaaacattccatgctcatggataggatgaatcaatatcgtgaaaatggccatactgcccaaagtaatttatagattcattgctattcccattgaactatcattgacattcctcacacaattagaaaaaactataaaattcatatggaaccaaaaaagggcccatatagccaagacaatactaagcaaaaagaacaaagctggaggcctcaggctcagacttcagactatattacaaggtgatagtaaccaaaacagcatggtactggtacaaaaacagacacatagaccaatggaacagaatagagatctcagaaataagaccacacatctacaaccatctgatcttcaacaaacctgacaaaaacaagcaatggggaaaggattccctatttaatacaccttgttttgattttgatttcaacacagcgtgtggtatttgcatgccatgtgatacagtttgaatatgtgttcccaccaaatctcatactggattatgatccccaatgttggaggtgggggcctggtgggaggtgtttggatcataggggtggatccctcattgcttggtgctttccttgcaatagtaagtgaattctcacaagatctggctattgcaaagtgtggcatgtcccccagtcccaactctctctctctcttgctcctgctcccaccacatgagacagctaccccctctttgccttctgccatgactgtaagcttcctgaggcctccccaaaagcagaagccagccttctgcttcctatacggccttcagaaccatgaaccaattaaacctcttttcttatcaatgatccagtctcagrtatttatagcagcacaaaatcggcctaatatagcatgaaataytgctcagcaatcaaaaggaacacatcattgatacatacagcagcttggatgggcctcaggggcattgcactgagtgacaaaaggatatctcaaacggttgcatactggatgatcccatttacatcagattctagaaatggaagattatagagatggagaacaaattaatggataccaggagttagggatggcaagggaaggagaagggtgtaggtgtgaatataaaagggtagcccaagggaggcccttgtgagacggaagagttctgtacagtgactgcggtgatggtgacgcgaatctacaactgtgacaaattggcatagaactagacacctactttatgccaatgtcaaattcctggtttttatgttgtactctaattacgtaagatgtaaccattagaggaaactggaaaaagagcacatgggattcttctgttctatcattgtagacttcctgtgactctagaaccatttcaaaagagaaagttcaaaaattcagtcagaagcacacgcacacatatgcacgcatgcacacacacacatatgcacgcatgcacacacatatgcacgcacacacacatatgcacgcacacacgcacatgcacgcacacacrcayatgcacgcacacagtatgtgaccatcttccatgtccctgcccactaggcataatagccctcactctgccctcaaccccgcaaatctcatccttatcaacctcggctctttccagcatgtttctcctgccttggtgcttcactctgagacrcagggaatgttagacacgcccagcctccagcctagcgtatgatattcttaaagtgcaggccgtagtctggtacaccgtattcagctgagaygtttgtgaaagtggaggggataacacgcctcacacaaaacttaccgcagtggttctcaaagcagcattctggagccatagcatcagcatcacctgggaacttactaggaatgaaaatgactggattcaccccagacctactgaagcagaagccctgggggctcagaaatctattctttaagcctccaggtgattcttatgctcatggaagtttgagaaccgctgatcaatgcawtcagtgactcagaaacagagtcccggactctacaggtttgttggttggttggttggttggttggttggttagtttgtttgtttttgtcacccatattcaaccagctggactccacagtatagcaagccactccgattattcttctgcatgttatatgtgataaaccatccacctagagtaggattgggggcagcatcttaacatctaactacttaggacacccaccctgtttacaggcagaaataaaggatttttaaaacaaagcaaatctgtgaaagaaccaactgaattaaatcgagaagtctaggcagagaggagagagagaaggggtccgtgtacctcatacgctgtgcaccagaatggaccctgcagaacctacctgctaccgrggaaggtggttctgttggtaaccggctgggggtcacagaggttcctgggaaatcagaaaatgagataaatctgtgctctgtcgctgtgggtcctgaacaaataacgaaacatctccgtgactgagtttcctcaccggaaaaatgagcctaaagtagcttacatcactggactgttgtggatgttaataagcatttgagctgggtgcagtgcctcatgcctgtaatcccagcactttgggaggctgaggagggcagatcacttgaggtcaggagttcaagcccagcctgrccagtatggtgaaaccccgtctccactaaaaatacaaaaattagccaggcgtggtggtgtgcacctgtaatcccagctgctcgggaggctgaggcaggagaatcacttgaacctaggaggcagaggttgcagtgatctgagatcgcaccactgcactccagcctgggtgacgcagtaagactccatctgaaaaaaamaggcttagccrggcgtggtggctcacacctgtaatcccagcactttgagaggccgaggcaggcagatcacctgaggtcaagagttcaagaccagcctggccaacatggtgaaaccctgtctctacgaaaaatacaaaaattagctgggcatgatggcaggtgcctgtaatcccatctactcaggaggctgaggcaggagaatcgcttaaacccaggaggtggaggttgcagtgaactgagatcactccactgcactccagcctgggtgacaaagtgagactcycymmaaaaaaaaaaaaaaaaaagcagcagcatttgtaaagcacacctggcacattctgggctattaacaaggaaatgcatgcagctcccgtccrcctttttcaacctcagttctatttcttctggattcctgtgtcctacccctcactgtgaccctgggggcaaaacagatttttctaccaaaaactaaatgatgtattttgtttgatttaatatgacattgttaaatgtactgatcagtggcgttgggtatgttcacattgtggtacaatatgttgacctctagaacttatttttcttgcaaaactgaaattctgtgcccattaaacactaattccttctctctcctctttctggcccttaacaaccaccattgtactttgtgtttctacagtgttgacattagatacctcctttgastagaatcatacagtagttgtccttttgtgactgactgacttagcataatgtcctcaaggtatatccatgttgtagtatgtgtcagaatttccttcttttttaaggctgcataatattccattgcatgtatataaccacattatgaggtatgctgctctyttttgaaagaaaccccctttaagaatggtagtcaagtccgacgcggtggctcacgcctgtaatcccagcactttgggaggccgaggcgggcagatcatgaggtcagttcaagaccagcctgaccaacatagtgaaaccccgtctctactaaaaatacaaaaattggccaggcatcgtggcaggcacctgtaattccagctactcgagaggctgaggcagcagaatcgcttgaacccggaaggcggaagttgcagtgagctgagatcgcgccactgcactccagcctgggtgacagagtgagacttcgtcaaaaaaaaaaaaaagaaacctccattctcccagctgcctgtagcccagggcttcctgccctcccacttccttcccacctctggccccgcccctgcagcccagggcttcctgccctcccacttccttcccacctacggccccgcccctgcagcccagggcttcctgccctcccacttccttcccacctayggckscgcccctrcagcccagggcttcctgccctcccacttcyttcccacctacggccccgcccctgcagcccagggcttcctgccctcccacttccttcccacctacggccccgcccctgcagcccagggcttcctgccctcccacttccttcccacctacggccccgcccctgcagcccagggcttcctgccctcccacttccttcccacctacggccccgcccctgcagcccagggcttcctgccctcccacttccttcccacctacggccccgcccctgcagcccagggcttcctgccctcccacttccttcccacctacggccccgcccctgcagcccagggcttcctgccctcccacttccttcccacctacggccccgcccctgcagcccagggcttcctgccctcccacttccttcccacttatggcccctcccttggaatggccatcaggacctataaaggctgaggaagaaaggtttggtctgcactacccctacctgtgaccacaagctccagggggtcgctgggggcygaccacaggtatgggtccctgctggagaagctgtagcatcggtaggttccgctgtgggcggcggtcacygtgatgatgggnaaactagccckgtaccatctctcgggattcttgtagggcgcagggtccccttccttgtacagagcaaattggtcaaagccataccgagtctgacactgtagggttacgtcccctcctgacgacaccgccgggccgggctgggctgagagcgagggtttggcaaaaactcctgggagaaaaagaaagtctgatgttgaaggcaggagccagcatctcagctgagactggggaggtccccacacctgcctaagagctggggagctttttggctgtatccctcccagagagcgcactcccccacccaagctcacagagaggtcgagtcacccagtggttgaggaaggaggctgtgctcacgtcctagtgcttgggtgcaaatcctagttctgccttcaggggcctggtggccctggagacaaatctccctctgtatctgagcctcactgccttgttctgttaaaatggggatgactgaatgagacagtayacagtaatttgcagagtgcctgttgcctagcaagcgctggagtaagtaaatagcttaagcttatactgtgctgtaagcttgtattgccacatacaattgttacgttgtaaatgtggctgacagtgctagcttccgggtgccttccaaacttatgatgtrtatcagttcagtgaatcctcagagacctatggagtcctcactcttaatgtccctattttataaatgaaactaaggcacatggcattaaataatttgtccaactctaggtaacaatactgcagtgtayagctgaaatttgctaagagggtagattataagtrttctcacacacaaaaaagttaactgtgtcaggtgatgtatgttaattagcttgctagtagtaactgtctcacagtggattcgtatatcaaaacatcaacttgtacaccttggatatattccatttttgtttttcaattatacctcaacaaagctggacatattttaatttaaaaataaataaaaaacttgtccaagatcataagtggcagagttgaaatctgcactcacagagtttgattccagggtctccgctcctaaacacgaacctacactactctgatgtgaggttgttgtcatagaccggtgtggtgatgcatgcctgcacacaggagtcagaaaaacaaaggttgaggctgggtgcggcggctcacaccggtcatcccagcactttgggaggccaaggtgggaggatcgcttgagcccaggaaggcgaggctgcagtgagctatgatcactgtacactagcctgggtgacagagtgagaccttgtctcaaaaaaagacagagagagaaagcaaaagaaaggaagtaaggaagataaaaatataagctgcctaataattatggcattcactcaacaagaagaaaaagaaagaaagaggaaggaagggagggagggaggaaggaaggaaggaaatatataagctgcctgataactgtaacattcactcagcaatattttctcttaattttcacttaagcaactattatgtgtctgtctgtattctttttttgttgtttcatttgttttgttttgttttgttttgttttgagacggagtctcgctctgtcacccaggctggagtgcaatggcatatatatatatatatatatatatatatatatatatatatatatatatatatatatatattttttttttttttttttttttttttttttttgggaaacagaatctcactctgttgcccaggctggagtgcagtggcatgatcccagctcactgcaacctccacctcctgggttcaagcgattctcctgcctcagcctcccgagtagctgggactacaggcatgcaccaccatgcccagttaattttgtatgtttagtagagacagggtttcaccatgttagccaggctgatctcgaactcctgacctcaggtgatccgtccacctcggcctcccaaagtgctggcattacaggcgtgagccaccgtgcccgaccaggaattaaaaatagacaaccaccaccaagataaaaaaaggtatacttcacataccagatagtgaggagggccactttgactagggtggtgggggatatacttagcgagaagagagtatttgagtctgaccctgaaagaagtaatgaggcagccaggctggtccattctagtagcagagaggaggccagtgatgctgtggaggggagtgaggcagggaagaggggagggaggcaggatttataacgcggaatagaccacagtgcagctggccaggaattagggtggcgtgagtgaggcactctcctgggatgtaaaatttaattattcccaaacaattaacrtatttgaaaaaattattgaaaatttgaagagtaggtcgttaaaactcacattattctgtttgaatactttattcccctgaaagatttattagaattttacattctaggcttttgtggatgcaagcgcatcagtgctatttccaaaacctacttctagaaaataaccatttaaaagtgcactaactgggtgcacctatagtcccagctactagggaggaccacttgagcccagggatttgaggctaaagtgagctatgatcatgcctgtgaatacagcgagtgtactaaagcctgggcaacatagtaagacctcttctcttttttkttttttcccaagayggagtcttgctctgtcgcccaggctggactgcagtggtgcaatctcggctcaccgcctcccaggtttaagcgattctcctgcctcagcctccggagtagctgggattacaggagtgcgccaccgcgcccagctaattattattattttttttagtagagacggggtttcaccatgttggccaggctggtctcaaactcctgaccttaagtgatccacccacctcagcctcccaaagtactgggattacaggcgtgagccgccgcgcccggcccaacctcttctcttaaaaaaaawaaawaaataagaaaagaaattagaatatttgcaccaatcaagagtctaaggagacataaatactaaatgcactgtggggccctggacggggtctgggaacagaaataggatattagtggaaagactggtgaaattcaaatagcctggagtttacttgatataayatagttgtgtctatggttagttttttgtttgttttttgatacagggtctcactctgtcacccaggctggagtgcagtggcgtgatcacagctccctgcagcctyggcctccctggctcaagcgatcctcctgcctcagcctcctgagtagctgggactataggtgtatgccaccatgccccactaatttttaattttgtttaaagatgaggtctcactatgttgcccaggctggtcttgaactcctgagctcaagcaatcctcccgcctcagcctcccaaagtgctgggattacaggtgtaaaccactgggaccagtgctacgtttattttttggttgtaacaaatgtaagatgttaacatgaggggatcctgggtgaaatatttccattaatattatctttggaacttttctgtcagtctaaaaattaytccaaaacaaagttttaaaaagaatcccgagccaagcacggtggcccrtgacygtagtccctgctactcatgaggctgaggcaggaggattgctcaaggcaaggagctccaggctgcagtgagctatgactgctcctatgaacagccactgcactccrgcctgggcagtgtagcaagaccccatcgctaatttttttaagtgcattaaaacacagataaagggktgcctgtttttcrttttggcacagactctggtatgacttgacacaggcactggctgattctgcctttatttgaaattctggtttttttcattgtggatgtttttgcaatttattttgattttttwaaaaattgcatgaaaatgttattcacagccagatgcagtggctcacgcctgaaatcccaacactttgggaagccaaggtggaaggatagcttgagcccacaggagttcgagaccagcctgagcaacatagcgagaccctatctctctctcttttgtattttaatgccttttgtgaaaactgtcaagagaccccatctctataaaaacataaaaaatgagctgggcgtggtggtgcacacctgtaatcctagctacttggagggctgaggcgggagaatcgcttgagccctggaggtggaggctgcagtgagccaagatcgcgccactgctctccaccctgggtgacgcagcaagaccctgtgtccaaaaaacaaaatattattcacattgatccataaatgtcgtggcaccaccacccgctaggccaktgcctcgtttgcctcaccctaatccctgccctcaatgtcccccgtatttgtgtcctgaacggaggaccacgcagtcccaggctyygatcccccttcctttacccgtggcaacgagctccagctggtcgctgggcagggaccagaggcttccgttctggtaggagcagcggtagcgtccagccagacttctcttcatggccgggatgaagaggactgcctgatcctggtacctgctggaactcagcttctccaggcggtacaggtccacgcccggaggtccctggcaccggagggtcactggcttctccaggggcaccagggagctgggcagagcctggagggagggcttggggagcggtcctggaagaggagcagggctgggtcagcctccccgcagaccccgcctggaccccgctgcycccgcgctggyrgatcccgcaggagggaaggggtctggggaaggactcaccactctgcgctggcacacgccccagacacagccctgaggaaagaagaaagggaccagatgccaggactcgcttttatggacattcctgcctgctgggcgcggtgataagacrtttgcatgcatatgctttactctgtcctaatwatttcttcaaaagacacacaggaatgtaatttaagtgagagaaaccggtcagaaaaagccacatagtttatgaggtcatttacatgaaatatccagaataggtaaatctataggagatggagaagaaagcagatccatggctgggggtggtgggagaggagggcaaggcatggtggcgtactgctatctgtggacttgttcgtgttagacacggtgggctcgttcgtgttagacacggtggactcgttcgtgttagacgcggtgggttcgttcgtgttagacacggagggctcgttcgtgttagacacagtgggctcgttcgtgttagacacggtggactcgttcgtgttagacgcggtgggttcgttcgtgttagacacggagggctcgttcgtgttagacacggtggactcgttcgtgttagacacggtgggttcgttcgtgttagacacggtgggttcgttcgtgttagacacggagggctcgttcgtgttagacacggagggctcgttcgtgttagacgcggtgggctcgttcgtgttagacgcggtgggctcgttcgtgttagacgcggagggttcgttcgtgttagacgcggtgggctcgttggtgttagacgcggtgggctcgttcgtgttagacgcggtgggctcgttcgtgttagacgcggtgggctcgttcgtgttagacgcggtgggctcgttcgtgttagacgcggtggactcgttcgtgttgtgttagacacggtggactcgttcgtgttagacgcggtggactcgttcgtgttgtgttagacacggtggactcgttcgtgttagacacggtggactcgttcgtgttagacacggtgggttcgttcgtgttagacacggtgggttcgttcgtgttagacgcggtggrctccttcgtgttgtgttagacacggtggactcgttcgtgttgtgttagacacggtggactcgttcgtgttgtgttagacacggtggactcgtttgtgttgtgttagacacggtgggctcgttcgtgttagacgcggtgggctcgttcgtgttagacgcggtgggcttgttcgtgttgtgttagacacggctcgttcgtgttgtgttagacacrgtggactcgtttgtgttgtgttagacacggtgggctcgttcgtgttagacattgcccattgacttcctcagtggatgtgaggaatgggacctgagacattgctgttccttcgtttcctcccttcagtctcccaatattaaataatatccaagtacattacaatagtatgcaattgtgtagacaagtattgtaaatactattgcatattgtatattattgtattttattgtctatgtaatatatgcgataaaaccccacactaatgggatgcattgggctccaaggatggagcaggatggagcctcagcgtgtaagtcaggacgtctcagcatgtgctggccatgggtttcccggtatttacaacatttggttgaatcagtattccatgattacatgataggatgtaatatatataataatcgtttcaaatagcctgaaggaggatggggaaagttcccaacacagaaaggatgcatgtttgagaagatgggtgtgctacttaccctgatctgattactatatgtatatacacatatagtacatatatgtaaacctacatctatacatacatgtgtatgtacatatacgtgtgtacatacacatatgtgtatatgtatgtatacgtatatatgtatgcatgtgtgtgtgtgtatatatatacatatgtatacaaatacatgtgcataagcgatcccctcctggaattgcttgagcccaggaggtcaagtctgctgtgaggtaagattgcaccactggccgggcacggtggctcatgcctataatcccagcactttgggaggccagggtgggcggatcacaaggtcaggagttcaagaccagcctggtcaacatggtgaaacaccatctctactaaaaataccagaaattagctgggcatggtggcacgtgcctgtaatcctagctactggggaggctgagtcaggagaatcacttgaacccgggaggcggaggttgcagtgagccaagatcacgccactacactccagcctgggcaacagagcaagactccatctcgaggaaaaaaaaaaatgatattgccccattgcactccagactgacaacagagcaagaccctgtctcagaaaacgaagaggaggaggaaaaaaaaagtactaattatctgaaattccaatttaaccaggcatccagtgttttatctggtaaccctcattcttacacacacacacacacacacacacacacacacaaaggcgggatagttgtcattcccactgtaaacataaggaaactgggcagaggccaagcaaccttgtgtagctcacatagcaagaagtgggtgaacccagmtcatgtcttgactctgagctcagagagtgacaacttgtcaccagcgcccccatagccaccaccctttgtccaccccaggctccctctgcaccccaacscaagctccggccgcttctctgtccccctcctcctgccgcatcacagcccacctcagcctctttgtaggtttccatgcgacgctgtaccatggctgggagtcttccaggcgccgtgctgagcgccttctgtgcatggactccaagtcgccataatcgtacgggttacccaccattatcagtcccctcttatacatcaggctagtgagacagtatcttatccacagtcctacagctggcaggagtagattcaaaccctagcagcaccaattagtggtaaagagtgtggacttgggaacttacaggagtagagagcacagtggtggttaccggggcggtggggtaaggtttggggagatgttggtcagaggaggacagtttcagttggacaagaggagtatgtcttggagatctactgcacatcatggtgactgtagttaataacaacatattgtacacttgcatatcaccgatagtagattttaaatgttctcaccggccgggcgcgctggctcacacctgtaatcccattttgggaggccaaggtgggcggatcacctgaagtcaggagttcgagagcagcctgaccaacatggtgaaaccctgtctctactaaaaatacaaaaattagcggggcgtagtggcaggagcctgtaatcccagctacttgggaggctgaggcaggagaatcgcttgaacctgggaggtggaggttgcagtgagccaacgtcatgccactgcgctccagtctgggcaacagagtgagactccatgtcaaaaaataaaaataaataaaaataaatgagcgtggaatactactcagccattaaaaggagtgaaataatgtcttttggccaggcacagtggctcacatctgtaatgccagcactctgggaggccgaggtgggtggatcacgaggtcaagagatcaagaccatcctgcccaacatggtgaaaccccatctctactaaaaatacaaaaattagccgggcatggtggcgggtgcctgtagtcccagctactcgggaggctgaggcaggagaatcacttaaacccgggaggtggagtttgcagtaagccgagatcacaccactgcactccagccttggtgagagagcgarattccgtctttaaaaaaaaaaaaaaaaagtcttttgcagcaacttggatggagctggaaggcattattctaagtaaagtaatacaggagtggaaaacaaaaatctgtatattctcacttataagtgagagctaagctgtgggtatgcaaaggcatgcagagtgatgtaatggacttcagagactcagaagggaagggcagaagtggggcagggatgaaaaactacacattaggtacaaggtacactagtcaggtgacaggtgcactaaaatctcagaattcaccagaatataattcatccatgtaaccaagaaccacttgtatcccaaaagctactgaagcaacaagccagatgcagtaacctgtacaggccacacctgtaaccccaacactttgggaggccgaggtgggtggatcgcttgagcccaggagttcaagaccagcctgggcaacatagcggacccccgtaactaaaaaaattacaaaaacaagccaggcatgatggtgtacaactgtagttccagatactcaggaggctgatggggaggcactggttgagcctgggaggttgaggctgcagtgagccatgatcatgccactgccctccagcctgggtgacagaagtgaggccctatctcaaataaaattaaataaataaaagttaaaacaggctgggtgcggtggctcacgcctgtaatcccagcactttgggaggccgaggcgggtggaacctgaagtaaggagcttgagaccagcctggccaacatggtgaaaccccgcccctactaaaaatacaataattagccagacctggtggcagatgcctgtaatcccaactactcgggaggctgaggcaggagaatcmcttggacccgggaggcagagtttgcagtgagctgagatcatgccattgcattccagcctgagcgaccgactgagcgagactccatctcaaaaaacaaacaaaaagaaaaaaagaatacatccatggatggataatgaatgagaggttgtttatattcacagttaaccctctcatctccagtaatgcaaccatcttcttcctgcttagccttttggagatgctgtccctttagtggtcaaattctgaagaaatcaggaaataatkcattcgacatgcccagcacaagtgaagatcaggcagcagaaatgcattcgacctgccacccatccatcaggagactatttactccactactgtaggggatactgacaaattaaatccatacctagtccagatatcaattccacaattttttttttttttttgagacggagtttcgctcttgttgcccaggccagagtgcaatggtgtgatcttggctcaccgcaacctccacctcccaggttcaagcgattctcctgccttagcctccagagtagctgggattacaggcatgtgccaccacacccggctaattttgtatttttagtagagatggggtttctccatgttggtcaggctggtctcaaactcccgacctcagatggcccacccgcctcggcctcccaaagtgtgtaagccatggcactcagcctttttttttttttttttttttttttttgagatggaggctctctctgttgcccaggctggagtgcaatgcctgacctcagctcactgcaacttctgcctcccagtttcaagcaattctcccacctcagcctcccacgtagctgggattasaagcacccgccatcacgcccggctaatttttgtagagatggggtttcaccatgttgaccaggctggtcttgaactcctgacctcaggtgatccacccacctcggcctcccaaggttgagattacaggcgtgagccactgtgcctggcccacattttttaaaaaaggggcaactgcagtgtagtagaacaaagttgtgaccaatgctaggatactctgttcatttcctgacccagccatgaatacactggaataactcatgcaaaatgccagctcgctggccccccgtttccccacccaacaaatgaaggggctcttacaggttcctttttgtcctgaaattcatcaccaatgcaaawttcttaaaaatcctttgtctggcagtccatgcctgtccttcagcatttcccagatctgaccctcaggactcaccaagacagaagagggcggtcggggatggagacatggttcctcagccctgtcctgagctctgtggccagggagggaagtggtgggagcctggggcacaggctcaggatgtgatgaggatgaagaatgctctcctcccttcctccaccagccccggcctttcctaattgagactcatcgagccgtagccggctcctcagtacagtgacttgcacacaagctccaaggagccgcgcttatctcctctggccagcctggcgttgcaccgtttgtccgcctgctggggcctggtctgtgttcccgtgctcccataaactccctgatgtcactaggaaaatacgcatcaaaaccacagtgagatatgacttcacaccttctggaatggctgtattttttttttttcttttgagacaaagtctcgttctttttgcccaggttggagtgcagtggcgccatctcggcccactacaacctccacctcccaggttcaagcgattctcctgcctcagcctcccaagtggctgggattataggtatgtaccacaccaggctaatttttgtatttttagtagagatggggtttcactgtgttggccaggctggtcttgaactcctgacctcagttgatccacctgcctcggtctcccaaagtgctgggattacaggcatgagccactgcacccgaccggctataattttttttaatggaaaatagcagatattggtgagtatgcagagaaattggactgcgcgtgcattgctggcagggacgtaacatggcgcccctgctgtggaaaacagttccagcagctcctccagaagttaaacgtgggattgccataaaatccagcaattccacttcggggtacacacctaaaagaactgaaaacagggtctctaacatatttgtacacagtgttcatagcagctttattcacaatagccaaaaggtgaaaccacccacatgtccatcaacaacaatggataaacaacatgtggtatatacacacaaggtaatatcaaccagccttaactaaaagaataaaaatcagccaggcacagtggctcacgcctgtaatcccagcactttgggaggccgaggcgggcggatcacctgaggtcaggagtccgagaccagcctggttaacatggtgaaaccccatctctactaaaaatacaaaaattagctgggcgttaaattagccgggcatggtggcaggtgcctgtaatcccagctacttgggagacggaggcatgagaatcgcttgaacctgggaggcagagattgcggtaagccgagatcgcaccactgcactccagcctgggcggcagagtgagactgtctcaaaaataaaaataaggccgggcgtggtggcccatgcctgtaatcctagtactttaggaggctgaggcaggcagattgcctgagctcagcagttcaagaccagcctgggcaacacagtaaaacccccaaaaaatacaaaaaaaaaatagccgggcatggcggcaggcacctgtagtcccagctactccggaggctgagacaggagaatggcttgaacccgggacgcggaagttgcggtgagccgagatcacgccactgcactccagcctgggtgacagagcgagattctgtctccaaaaaataaaaaatattataaaagaataaattcagatacatgctacaacgtgatggaccttgaagacattatgctaaaggaaatattccggacttgacagataaatactgcattgtgccgcttatctgaggtatcgagaggagtcaaattcatagagacagggattagaatggtggttgccaaggcctgggaaaagtggggagttactatttaatagggagcgcttaggttgaagatgatgacaaagtctgggggatccatagtggtgatggttacacaacactgtaaatgtatttatatttaatgccattgactgttttttgttttttggttttttgagacggagtctcactctgtcgccgaggctggagtgcagtggcgcgatcttggctcaccgcaacctccgcctcccgggttcaagcgattctcctgcctcagcctcctgagtagctgggactacaggtgcgtgccaccatgcctagttgattttttgtatttttagtagagacggggtttcaccgtgttagccaggatggtctcgatctcctgaccttgtgatttggcctcccaaagtgctgggaatacaggcatgagccaccgcgcccggccagtgccgttgacttgtatgtgcacttacaggtggttaaaatgagaactatcagggtgttgatatctaaaaacctccctgccatcatcttccctacatctctcattcagtgaccatggttgaatgcctgccacctttcaaatattatgtcaggcactcagtattggcagttttatccattataaatgctttaagctgcatagaattttaaacgtgttaataaaagtagttataaatctttaatacataagctggctttaaaattattggtaaaataagattagaaatgtcttaagaattgttggcgtttttgtttgcacttattgaacaagtggtttcatgcttatccctgcagaatactatgagatttgtcataagggttataaaactataaacccggctaggcgtggtggctcacgcctgtaatcccaacactctgggaggccgaggcaggcagatcacctgaggtcgggagtttgagaccagcctgaccaacatggagaaacgccatctctactaaaaatacaaaattagctgggtgtggtggcgcatgcctgtaatcccagatactcaggaggctgaggcaggagaatcgcttgaacccgggaggcagaagttgcaatgagccgagattgcgccactgcactccagcctgggcaacaagagtgaaactccatctaaaataaataaaaataaaacatttgttttttgtagagttggggtttcactatgttgcccaggctggtcttgaactcctcctgggctcaagcaatccaccgacctcagcctcccaaagtgctgggattacaagtgtgagccactgtgcctggccctattgggtccttttaaaagatacataaaaaatcaaatgcaacagtgaagtcaatcacccgatggcagaaattggggtgctcctggcatgtggtcggtcgaagccaaggacactgctcagcattctgcagtgcacaggacggccccgcccaggcggagaatgatccggtgacacatgtaggtgggaaggatgcacgaatgatggcgtttaggaagaatattatcacttctttcccgtaagagcaacttagagcaagaaaatggtattcttagggccttctctcttatggaggctccaagccagggttgccatggcagaagatgctgggcttgctttttccttgagagaactgtactcaagatgatgtaaatgtcaccccgggtgccacttgggtgctttggagaagcgctcagacgcgacacgccgtgacgactccgcggcaggcagccggacctgtcctctggcgtgcggttcacgggctgtgtttatccccctggttccttcacagccaccttgggaaatacgttgcctctgaatcacgccaggcaggctctcactgtgtgtgctgcggggctggaaatcagggtgacactccgctaccgaacagcctgactaggaagccagaaagacgctgccggctttagtttgtcctttgactttccttgatatgaatgaagatagagcacttccacactgcacaacaggaaaagcccagaacgcttcctggagatagcgagggggtgatgcagcggacagctatggctgatgaccccctcacctctgactccccctccctccctgctttctgaacgcacatccatcaccaaccataggttcctgtttggggtttgctggctggaaaaaaaaaaaaaaaaaaaggaaagctggctttctagtaaaaaccacttcctttgctcatttatcaaactcaaacgctaggagggccacctaacatcctccgtcccacgcaatggggtgtttctggagcactccggtgtatcagggaccctgtcagttgccatcgcacatgtatatggggccagcccctgtgccaccgaagaggggggatattgaaaacatgttacagccaggagcggtgcccccttggttcaagcagttcttctgcctcagcctccctaatagctgggattacaggcgtgcaccatcacgcctggccactgttatgtagtttttaccacaatttaaaaaaggaaagagtgcctgggtgagtcctacgcacctattcggagaaccaaaggctttgaggttatcctcggcccacccatctgatgggagtgtttctcaaacttgcttttccgtgatctcccagtaagaaatacctactacacacacacagtctccggtcggcatgcttagggtagtcttccaattccccctcctggtatttacaccctggagtggtccgctcctcttgggctgaacctgtaacttgctcccaagcaagagcacacagcaagctcacgcacgtggttgttggtgtgattctgtttctccagattgtctccattcctccctggcttctccacagggccgctcaccatggcagccggctccatcaccgccagccagcgagagggcaagacaagagggctgacgagggacgctaccatcacagaggtcagttttgtaacctaaccacaagactaacctactgtcacttctgccctatcctactgctagaagccagtcgctacatctcccccacactcaaagggaggtggtcgcactgtggggtccactggaagttgcctaccagactcaggtcatcccaaacacaccctctagccatttggtgtggcatcggaaagaaaactaaggccaggtacggtggctcatgcctgtaatcccaacaatttgggaggccatggcggaagggtcacttgagcccaggagtttgagaccagcctgggcaacatagcaaatgttatgttgccacctctacaaataattagccaagtgtggtggcatgcacctgtagtcccagatactcaggaggctgaggcaggagaatcacaggtcgaggttgtagtgagctgtgatggcactgcactccagccttggcaacacagtaagacctcgtctctaaaaaagcaaaaagggctgggtgcactggctcacacctataatcccagcactttgggaggccaagacgggtggatcacctgaggtcaggagttcaagataagcctggccaacatggtgataccctgtctttaattagccaggtgtggtggtgggcgcctgtaatcccagctactcgggaggctgaggcatgagaatcgcttgaacatgggagacacaggttgcagtgagctgagatcatgccattgcactccagcctgggcaacagagcgagactaggtggctgttctgtgtactgtgggatattgagtagcatccctggcctccccagtatctcaaatatgaaaacatgttttctatctcgattactgagcttttcggtgcctccttcggttctgcacctaagctaagagccccttcatctcaccctgatctctatccagtttctaacacagcagtcttgtaagatgcccggacttaaacggttatttcctgtgaaacaggtgaaaggggctttcatctctaaaaagtcggaactttttttttttttttgagacggaatcttgctctgtcacccaggctggagggcagtggcatgatctcggctcactgcaagctccgcctcccgggttcacaccattctcctgcctcagcctcccgagtagctgggactacaggcgcccaccaccatgcccagctaattttttgtatttttttagtagaaacagggtttcattgtgttagccaggatggtctcgatctcctgacctcgtgatccaccgcgcccggccaagtctgaacttttgcatggcctgttgccctggtgataaactgatgccttgtttcctaaaaggaataaagccatgagttgcctttgttcagct

SEQ ID NO: 97261 - DNA, 12756 bp, Homo sapiens
gaggagtagggaggatgtcatcaacagatattttctttcctaaaatctccttgctaaatcctgtttttgttatataactgaagactgacattcaaccttagagttcttgagaccctggctgttgattaacagactcctgtgagcagtctttttggtggcccagttttttgctgtgatagctaaatgacagcagcaacaatggcaacccagacacctgcaacaacactgccacccattgagccttgtaagaaacttgtggtgccccctgtggactggtgaataggctaattcccccactttgtcccataacgtgatgacttggggacattttcaaaggggataggccatcaagaccagtcctcccagtgtgttacctcactcttaagacatttcagcaagttattaagcaattktatttttttacaaggaaaatttcaattttccagtcctggactgttttatagatgttacttggagacataatttttcatttaggcttatgagtgccactacacttatgataggctgaactgagcaacagcctggaatgataatgcacaaatcaatccaactaaatttggcttcaaggtcctcagacatcactgacattgattacaagtgaagcaagtattcccattaatttaatatctgaaaagatttgtgtatcatcttctaatgttcttagattggccttggaggttgggaaggtgatgcagcttgtcacattgcatagaacatttatgttctcctttgacaaccaactcacctctgggctcctgggagcagtttccactggaatggagagcagagagaatcataattatgtctcagmcctggttcatcgcccagtggggacctgtatttctacatgtgcccttataaatattttagctaaatcagggtctcaaatgtaaaatctagttccctggggaactttttaatataaaccaaagtctggtttagggtgatttaaaaagaaaaaactttgtgaaatgtatttactcatgataattgcagatttaaaacaaagtcttatttattttacatgacactaaaaactaaaacaaaaaactccagatgagcaaaagtggaaacatacttcaaacaccttatgacacatgatcaaattccttataaacttaaatttatgaaaatatagtttggaagtggataggatattcagaggaagcacaatatttatgggcaatgctatcatcattgttttgcattctaatggaatgtttttactttcttgtaatatgcacccctgaagagataaagtagtggaaatatgacacacttacccattctgactgttcttgtgtcctgcgacaaccataaaatctgataatcagttaaccaactgactcagttgggatttagtccaggttaaagcctgggtaagtagcattctggagtaaatctcataagtaactatctgatgatgtcctgactatcctcaaaggaagagattctgtttgttcagcattttgggagccaaatattcttttaaaatctggattgtctgatgctcatgtcaaaatccagacagagtgataaattactcataaataaaaacagaggaaactattgcagtgatggtcactggctatgatcttggtaattccagttctatagctctacttttagatacaaatcattttcatatggaacatttgattcccaattagaacctctgaatttgaatggcagaagaagttgctggaagctgttagcaaaaactgtgctgcctacaaatgatccttggaatctcaagaatcctgcaaaaaaaaaaaaaaaaagaaaaaaaaaagaaaacctagggactggccgggcgcagtggctcacaccggtaatcccagcattttgggaggctgaggccagtggatcacgaggtcaggagatcgagagcatcctggctaacacggtgaaaccccatctctactaaaaatacaaaaaattagtcaggcgtgatggcaggtgcctgtagccccagctactcgggaggctgaggcaggagaattgcttgaacccgggaggcagaagttgcagtgagtggagatcacaccactgcactccagcctgggcaacagagactccatctcaaaaacaaaaaacaagaaacaaaaaacaaaaaacaacaatctagggaccaccaaaagccatgtgaactgcagagtacaaataacttgcattttctggagaatagatgactatatttatttaatcgtttcaattatgactctgcttattagctgcaaaccccagaatcacaaatttaataggaatctttaaaaaagacgtgttaaaattagggaataaagttacacatttgcagaattcaagatttattgggatgagtatctgtctcatatgttagatagagtcttcgtagggaatattggcttctggcacatactctcttgccttctgtgttctttctgcctgcacaaagtgctttttgttcctcaaaccagtagaaactatttaagccttaagtgattctccctccattcagcatcatgtaaaccataaacatacatgttctgtaaagatacaagaaagggtcctagcaagtaagtttgtagcgttagtaatacacttctatatgttagcacactacctattttggagtaatgtttttttggtctgagtgtttttgttagttcgctttgaatttataaattttaatttggttcaaaagtttattttctgtttttttttttttttttttcctcttttgagacaaggtcttgctgtgtcacctaggctggtcttgaactcctggctcaagtgatcctcttgccttggcctcccaaagtgttgggattacaggcgtgagccaccacacctggccttctgtgttcttttgtttgttcgtttggttttaggctcctaagtagctgggactacaggtgcatgccaccacacccagctaatttttttttggtgtttttggtagagaccgtggtctcaccgtgttgcccaggctggtgtcaaacttagactccaatgatccaccctctttggcctcccaaggtgctgggattacaggtgtgagccaccaccccggccttattttctatttttaatatgtgctaggatgctgtaaatgagtaagacagaagaaatataaatgaagaattagcacatagaaaaatttcaacctcaggagtcatcaaatgaatgtaatgaatgtgtattaaaatgagtcccccccaccatcagattaactaaggtttttaaaaaagcctgttggtgagactatgatgctagggacaatttgttgtactgctgttggagtgaatgtcataagagagatccaaataaaaatcccggggggaaagatcgagattggaaacagcagagaaaatttctggagggattagtgcttcaggaagatttgaaggaggaataaaattaaaacagatggaaggtaaaaatggcaaagcagagagcttgattaagggtagtactttttcactccagcatgttttggagatttatcccattcattttaatgtttttatagcattccattggatgaatatataataatttatttactcattccccttctggtagacaattatgttgcttccaaatttttattgcaaacaaagctgttttgtgaacatctttgtatttgtcttcttgtgcacatttgagagatttttttttcctggatgtacgctgaggaatagaagtgctgagctatggggcatgcactaaagtgcctgtgccaattaaaactaccactggcagtgtttgagagttcttattttcccacatccttatacttggtatcggcagacacacacatttttatcaatttcataggtgtgaatgaatatcataatcgttttttcagttccctcattacaggtgagatttgcaatatttttcacatatttatggctcattcaatttcttcttgagcacattgtttttctctattttctattttttgtcattttctttattgatttgtaggtctttataaattcttgatgtcatgtttttaaaaatacatattcttgatgtcatggtttttagaaatctattaagtgaatacaaatatctccacttcttcttagtcttgttttaaaaaatgttattatggtcttttctctcatccagaagtaattrtaatttagataaaattatcaatctttttctttatagtttatgctttgtatgacttgcttaagaaattctttcctaacgtattttctaaagagaatgttctaccattctttgcagaatttttgctttttcataatcaaatctttacttggcttggaattgatttttgtctatggtgtgaggaagggttgtagcatttttttcccaaaagattggccaactctccaagctcataaataattctttttctattttatttttgttatgtatgcatcacatgcctggcaagttatacaggttccagtgagcaaaactatggaaatcctctcaacggcaaagagtgtgtgcatatccctgtagtctgggtgttccagaagcagctagagatgaggaatacagatctgattgagtttgagttccaactctctcatttacaaaccaagcagggtaaaaaggatattaacagaatgaattgatttgcaaaagttggaactgaaataaatattattgggcaaaagtttgggatagaaatatagcgtatccacatcaatttcaaatagttggaaggggtggaatatgaggttcttcactgggttctgaaagtatgggaatgaaatgaagagaacctttaataatactaactccgagagcctaaataaaaacactgaattaaatcagttgaatgaaacaatattaatggagtgcaagatggtatgtatgtgaaaaccatttgttattggaaaaagagctgtttgcatatagcatcaggacatggcttactcagctccattcccaactgacttttcccttgccttccccttttgtaaaggctaaaagtgaaacactccattttcttaggcacctcctgcctgaggtgaccacttggctcagctctagccagtgatgcaaatggacaacattcctttccayacaaaaagacaaaagctgcctgggaaaaggtctttagccctctcaccttcttccttcctgaaaattggatgtggggtctggaagtgcagaggccatcttgagatactaaggacggtgacttgtggaattctgagctattctgacagccctcgtgtttctaccttagacttcttgttgccagaaacaaaataaacctgtatttttttaagttcttgcagtgaaggtttttattttttatagccaaacatatgcatacctgatatagctttgatacctcattccttcatttgttcaatattgttatcactgaaaacattacagtaatggatgtatgttagtgaagtgatggaggattgaacagaggaagggaaagaagaagatggaacatatacattgtgtatatggagtttaatttataataggaggaataagacatgaccacagtaagagatagtttatgtaccaacatttggccccaagttttatcagataatcttttacaagcatgtgggattcattgtggcagtttgggtattacatggacatctttgtgcatcactttgtcctgggaacacatgctatgtgctctgaaggttacatcaggactattttgtagtatgagatatcagtatgtagtatgagtgatagtatgagtgataaccaatattgacatactcatactacatactctggccacatggctcagctcagttacatcaggactattttgtagtatgagatgtctaaaggcatgttttctgctacaaagcaatccataaaaaatttcaacaaggaattccatctacctgttatagacacaggatgtccctcttccactgatgtggctttgaaagaaataaacagcctgctgtcattttgtgttaccatcctcagcaggcagcaagaatgcaggaaaaaaacctgcttacagccaagggtcaggattaggatgtaaactcctgggagtgtgtgtgtgttttatcctggtatctctcatggtgactaattccttgcttgtgcatttcaagagctcaaaatatttttgctctttgcaatggtctgaatgtattctcccaaaattcatatgttgagacttaattgccaatgtggtagtaatgcaataaatcagattatatctttgtaagctttaagagataattaagttatgagggtagagccttcatggaaggaattaaggctcttacaaatgggcttaagggagtgggttcattaccttctatcccttcctccacgtgaggacacggcatttactccctctggagcatgcagcaacaacataccatcttggaagcagaccacagtgcaatcaaattggaacacaagattaagaaactcactcaaaaccacacacctacatggaaattgaacaacctgctcctgaacgacttctgggtaaataatgaaattaaggtagaaatcaagaagttctttgaaaccagtgaggacaaagagacaatgtaccagaatctttgggatgcagttaaagcagtgttgagggaaatttatagcaccgagtacccacatcaaaaagttagaaagatctcaaatcaacaccataacatcacaactaaaagaactagagaaccaagagcaaacaaaccccaaagctagcagaagacaaaaaaaaaaacatcaagatcagagcagaactgaaggagatagagatatgaaaaacccttaaaaaatcaatgaatccaggagctttttttgaaaaaattaataaaatagaccactagctagactaatagagaagaaaagagagaagaaccagatagacaaaataaaaaatggttaagggtatatcaccacttagcccacagaaatacaaacagccatcagagaatactataaacatctttatgcaaataaactagaaaatctagaagaaatggacaaattcctgggcacatacaccctcccaagactaaatcaggaagaagctgaatccctgaatagatcaataacaagttctgaaattgaggcagtaataaatagtctaccaaccaaaaaaagcctggggccagacagatttacagctgaattctaccagaggtacaaagaggagctggtaccatttcttctgaaactgttccaaacaattgaaaaggagggatttctccataactcattttatgaggccagcatcatcctgataccaaaagctggcagagatacaacaaaaaaagaaaacttgtaggtcaatatccttaataaacatcaatgcaaaaattctcaataaaatactggcaaaccgaatccagcagaacatcaaaaagcttatctaccacgatcaagttggcttcatcaatgggatgcaaggctggttcaacatacacaaaacaatacatgcaattcatcacataaatagaactaaagacaaaaaccacatgattatctcaatagattcagaaaaggccttcgataaaattcaccatcccttcatattaaaaactctcaataaactaggtattgaaagaacatacctcaaaataataggcatttatgacaagcccacagccaatatcatacagaatgggcaaaagctggaaatattccccttgaaaaccagcacaaaacaaggatgccctctctcatcactcctattcaacatagtattggaagttctggccaggacagtcaggcaagagaaagaaataaaagctattcaaataggaagaggggaagtcaacctgcctctgtttgcagatggcatgatcctatatcaagaaaaccccatcatctcaggccaaagccttcttaagctgataaacaaattcaggaaagtctgaggatacaaaatcaatgttcaaaaatcacaagcattcctatataccagcaacagacaagcagagagccaaatcatgaatgaactcccattcacaattgctacagagagaataaaatacctaggaatacagctatcaagggaagtaaatgaccttttcaaggagaaccacaagccactgcttaaggaaatctgagaggaaacaaaaaaacggaaaaatattccatgctcctggataggaagaatcaaaatggccatactgcccaaagtaatttatagattcaatgctattcccattaaactaccattgacatttttcacagaattagaaaaaactactttaaaattaacatggaaccaaaaaagagcccatatagccaagacaatcttaagcaaaaagaacaaagctggaggcaccacactacctgacttcaaactatactccaaggctacagtaaccaaaacagcatggtactggtacaaaaacagacacaaagaccaatagaacagaatagagaactcagaaataagaccacacttgtacaacaatctgatcttcaaaaacctgacaaaaacaagcaatggggaaaggattccctatttaataaatggtgttgggagaactggctagccatatgcagaaaattgaaaccggactctttccttacaccttatataaaaattaactcaagatggattaaagacttaaatgtaaaacctgaaaccacagaaaccctagaagaaaatctaggcaacaccattcaggacataggcatgggcaaagatttcatgacgaaaacaccaaaagcaaaaattgagaaatgggacctaattaaactaaagagcttctgcacagcaaaataaactatcatcagagtgaacagaccatctgataataaaatatcaaagaaaaaccctatttttttttcctccaagacttgagtaaataggagaaaatttttgcaatctatccatctgacaaaggtctaatatccagaatctacaaggaacttaaacaaatttacacacaaaaaaaccaaacaactccagtaaaaagtgggcaaaagacatgaatagacactttttgaaagaagacatttatgtggccaaaaaacatatgaaaaaaagctcaacatcacggataattagagaaatgcaaatcacaacaacaagacaccatctcatgccagttaaaaagtcaagaaacaacagatgttggcaaggctgtggagaaataggaagacttttacactgttggtgggaatgtaaattagttcaatcattgtggaagacagtgtgacgattcctcaaagaccaagaaccagaaataccatttgacccagcaatcccattactgagtatgtacccaaaagaatataaatcattctattacagagatacatgcatgcatatgttcattgcagcaatattcgcaatagcaagacatgaaatcaacccaaatgcccatcaatgatagactggataaagaaaatgtggtacatatacaccacagaatactatgcagccataaaaacgaatgagatcaagttttttgcagggacatggttggagctggaagcctttatcttcagcaaactaatgcaggaacagaaaaccaaacgccacatgttctcacttgtaagtgggagctgaacaatgagaacacatagggaggggaacaacacacagtggggcctgttgtggggttgcgggagggagagcatcaggaaaaatagctaatgcatgctggccttaatagttagctgatgggttgataggtgcagtaaaccaccatggcacatgtttacctgtgcaacaaacctgcacatcctgcacaagtaccctggaactaaaaaaaaaaaaaaaaaaaaattgatgaatcccagtgttggttaacattagtattggcccacactgaaattcatattgacctcagagtggaaggctatctttttttttttttttttttgagacggagtcttgctttttttgtcgttgcccaggctggagtgcagtggcaccatctcggctcactgcaacctctgcctcctgcgttcaagtgattctcctgcctcagcctcccaagtagctgggattacaggcatgagctaccacacccagctaatttttgtagttttagtagagacggggtttcgccatgttggccacactggtcttgaactcctgacctcaggtgatccgcccacctcagcctcccaaagtgctgggattacaggggtgagccgccacgcctggcggaagtttatcttttgtggttgctttgactttgtgggaggatggatattggaacctcccatggggaatactgcttgcttgacttatttttcttctccatgatgttaggagaaaaatctttctgaccagaaggctaactcctcagccaaagtggcagtccgtctgccgtatcactggctttacaggggaaagaatcccaagaggtcagttgatccaggatccagtcctaggctgggaagacatttctgctgttttacaggtgaggtacctgaggccccaagaaggccaagcgacttagccaaatcactgagaatgatgctgatggtggagcggagatgcagtgggtgtagaggaagacaggggttgtagtagtgagggaatgagagtagatgctagaattcctggttcttctctgcattgctaatctattggagattggcatcatgccttcatctttgaatccctggcaccttcacagtgtgtggcaattaatgtgcccaattaatgttgttgaataaatgaaccataatggccccctctggtcaaaatcctctatgataaattctcgtaacattacgtatcattctttcacagtacttgttacagtaacaactttccatttttttggagtgtgattattaaatcaatgtatttccccttcactagacagaccataataagctctatgaagcttttagtaatcactgaatcatgcagtgcttggcacttaataggtgcttgggacatatttgtagaatgaataaatgatcttgggcaagaatggccttgggaggttcagtttgggcttaataatggcagcagcagcaaaaactagtattagtttaaggtgttttcataggtattattttcatttaataatttaaaaactcctactaaaaaggtattatttctatcatatagatgaaaaaaactgaggaagatcagagaggttaaacatcttaaagtctgatactctatgatcactgtattacaaatgtgggccctgggttatttgttgtccatacagccagacttgcagagatcagtaaatgttttatggcacatgaagtgaatgagagaatatgtgattcttttgtattttttgtgtattggtttagagcaaaggcatttttacatatgagaagagctcactggaattgataataagggctcacaccccctcactggccctgtagtaacacaaacactatcttcatttgtattccaggggccagccagaaacggttgatgtaagatgtcttataggtccagctgatgctaacaaccaatgagagaaaaattttcatgctttgaagactaaaatactttctctctatgaatttataatataaatgattgacaacctgaataagataagggaggcctaggtccatggttcttaagcttttgtggcacataggatcatttgatgggacacagattaatacagaccccttaatctggtcatttcttactactagaaacatggggataacaatgtcactcccactaatgtggaaatagtggaaaggatggatttgcatgtatgagtgccttatgggtaaattataaatatattcctgaaattgactagagacgtgagcaccttgtgaacttgaatgctataggagaccagcagaagctcctttgtggaacattggaattcccaggccgcagccaaatgccactggctaatcaccttagagttttaattcaggaatggtgggttgaatcttgaaaatacatgaatgtagaaaaggtgaaaaggggatgtcaaatgtatactaatgacctttagaagatgcattagaaatgggattggattcttatgaagtggacaattattactacctggtaatatgctttatttcaccatgccagttcaacgaaggcattcaacagttacttgttgaatgaaataggacctccattctatcatatgaatgcctagctagagaaaagccttcccagaccaagaaacttacctctatttcatgtaatatttgctgaggtgtatggaaatctatcctgtggtgacaccaaaagagtctatattctgtcatttcatgtattacataaaaaggatggcatcagagacatttcagatgacatgtggaattcctgtaaaacattcttgatgaggctgacaaagacaattccttaatgatgtttgtttcatttttgatataaatggaaagactgaagacaaatgtaaacgaaggaaagtgtttctaataataamaataatatgaatgtatgaggtatcaatctttgcgttactgatcattgatttatttcttggtgagatctttatcacaggatgaccttgttgccaaaaattaccaagtattgggaaaatgtatagctactgataggagcatgtgcagatttgctttttgtcagtgtgtgtttatgttacatgtagatattgtcactttatttagcaaggcgttctttcttcttgagtcaagaatataatgtaaactcaagtgaatttctctttagtgagaagagcattttattttgtcctttctggcccttatattcatacttttgaccacccacaggcgaatccaggagaaccagagataacttccatagactggaaaaccaggatg

SEQ ID NO: 97262 - DNA, 27954 bp, Homo sapiens
gtgggctgtccacgcctttaccattttcctggttgttaacatgttcctgatcagcactgggtgctgtcccaggtgctgagaggattctcccacaatgccctttgctttccccatcagagggtttatggcacccaattctcattcacattctgtctctcctttctcgttcttctctatctctcctctctctgtctccttttctcttcctctctccctctctgtcttctctccctctctcttcctctctctcttcctctgtcctcttttctctctctctctccctctcacatctctctttcccttcctttctctttcctctctcttcctctctctccctctccctccttctgtcttcctctatccctctcttcctcttttttcttcctctcttcttgtctctttctctcctctctctctccctctttctctttctctctctcttcctctcccttcctcttcctctctctcctcctttcttcctctctctcttcttgtgtgtgtctctctctctctgttctctctctccctctccccccaactctctctccctatacacatcttaagaggcctcagcagtgtaaggtaagtttagcgaccctgttgctgtgtagagataagcaaaggggggcaaggagctccagtggtcccagactccagccatttgagtctttgcagcccaagcactgccccagcttcttgacagccccagccatcaccaaagggcacacagataagctgcctccaccaaggcctgtgcagatggtaggtttttgagtaaaatagatacgatccttgtctgaagccactgagttttagaataatttgttatatggccatagtaaccggaatgattgctgtaggtttattttattttattcatccttgctgcatgcaacacatgcatggctcagtaactagaaggaaagaagagaagaagggagggagaggcagagggtggacaggagaggatggtaggaaggaaagacaggaaaggagggtgttggtggccttgcctgcaagctgagcagacaccacgcaaacaggtgacctcccagttaagatggaggggactcagggctcaggaggggcagaaggtccccgtgtcggaaagctgggcaagctttctgcaggaaatgatggggatcacggccatgtgagccggcaagatttccctcagccagggaggagactccgggctgtgggaacagcttaagcagaaggcatgggacaggaatgcatatgagagatattgtgggaggagggagggctgcctgggctggcatgcagggtatgggaggggtggaagggctgaggcgggagccatcagtaaaaggacccagagcgcggctccaatgccatggtaggaagcttggcgttgactcagagggcgctgggtaccgctgaagagtgttgagccaaggagggtcatgtcacgggcagatacatgttttagaatttcttcttttctggctgagatgtagagtatggactggagagaagcacaggggacataggaaaggtagttctagaaagaggggctgtcccaccagggaaagtcaaccaactgttccccagtatccattcctcccttccagctcatggcactaaagccactgattgattagctgggtgctatcaatctctctctcatctctctctccctctttctctccccctcatctgtgtcttttctctctctcatctctctgtctccctctttctgtccccctcctccgtgtctcctctctctctcttctctgtctcatatctctctcattgctctctccctctttctctccccctcctgtgtctccttctctctctctctttctcccccatctctctttctctcccccttcctctctttctcctctcactcttcctgtttctctctttctctttcttcctctctttctccctgtctctctcttcctcttttcctttgtctctctctctccccccaactctctctccctacacacatcttgagagacctcagcagtgtaagataagtttagctactccacggcctggcacggtagctcacgcctttaatcccagcactttgagaggccaaggcaggcagatcactggagattaggggtttgaaaccagcctggccaacatggtgaaaccctgtctctactacaagtaccaaaaaattagctgggcatggtggcacgcgcctgtagtcccagctactcggaaggctgaggcaggagaatcgcttgagcctgggaggcggaagttgcagtgagccgagaccacacctctgcactccagcctgggtgacagagtgagattctgtctcaaaaaaagaaagaggaggccgggcactgtggctcaggcctgtaatcccagcactttgggaggccgaggcatgcagatcacgaggtcaggagatcgagaccatcctggctaacacagtgaaaccccgtctctattaaaaatacaaaaaaattagccaggcacggtggcgggtgcctgtagtcccagctactcgggaggctgaggcaggagaatggcgtgaacccgggaggcggagcttgcagtgagccgagatcgcgccactgcactccagcctgggcgacagagcaagactctgtcaagaaagaaagaaaagaaaagaaaaaaagaaaagaataaagggagggagggaagggaaaggaagggaaggaaggaaggaaggaaggaaggaaggaaggaaggaaggaaggaaggggaggggaggggaggggaggggaggggaagggaagggaaggaaaggaaggaaggaaggagaagggaagggagggaagggaggggagggggaaggggagggggaggtgaggggaggagaggtggaggtgaggggaggggaggggagggcagggggacgggaggggagggcagggggaggggaggggaggggaggggaggggaggggaagggagggaagaaaggcaggccctgatgttcagggagctgagagtgaagtcaccggctccaacccaggatccaaactcaagtctgtctggggtcctatccccgtcaccaccccccgccccgacccatcccccagagacctgggaaggagccaggctcctccggtttcaggaaagggctgcacaaaccaccccgccacgatccctcccagagaacaaacagctcccggccaccggcagtctccctcctcctcctgccaggctggttcccagacccaccctccctgtgtcataagcgcctctccccgcactctcaccagggctggctgttctcagaggaacgcccaggaaaaacctacccgaacccctttcagctgggaaggggacccgcctgggcttcctcaccgccgatgagacctccctcgtcgtacacttagagctgcctgtgttttccttccttccttaagcgggctgggaactctagacactcagggatgggccagcccattagagtaagcattcggccacctctaggctgctacggtcactgctgctgtcaccatcaacgtgactgtctcacacctcacttcctccggccagccacacccctgcagatttaacccgccagcctccctaaggtttcctctgcctgaaatcctctctgcattcctggctcattctcgaaattgaggtcaaagctcagatgccgcctccttccctgaccaccctacctgaagcagccgcacctgcctgctcctagtcacgccgttccttcacctgtttcgtttcctccacagggtttaccacaatctgaaagtcttattcatgcaggtgtctacttgtttatctccccaccacacctactaggatgacaatatcacaagggctggggtttcatctgtctcctcctcctctgtatctccagcacatgaaacatgcttggcacactgtaggtgcttaagtatttgctactacatcactttgggattttgcataggacactcccaatgcttagaatgtcaatctttgcttcattgtccttggcaaactcctattcatcctttgaaaccccatccatttatcccttaaccaggaaaggcttctgtgcctcatacaaccacccataaagctggattagggctttctctggggacacccttgccctgtgccacacttccattagcgcacatatcccccatgaattgtgcacaccagcagggtctagagtacggcacacattttgtctcaggagctacgtattgaataaataaattaattactttttttgagacaaggtcttgctctgtcacccaggctggagtgcagtggtgcaatcgtggctcactgtaccttgacctcccaggttcaagcaatcctcccacctcagcctcccaagcagctaggaccacagatgcaggccactatgcctggctaatttttaattttttttttggtagggatggaatctccctatgttgcccaggctggtttcaaactcctaggctcaagggatcctcctgcctctgcttcccaaagtactgggactataggtgtgagacgccacactcagcctcattatttaatatgtaagtagctatatctctctgagacccagccccatctaatttataacctccctccttctcaagaacatgcctcagctcccattgccagggaatctgacctttctccttgtcataggattttttttttttttgagtcagaatctcagtcagtcacccagcctggagtgcatggcgcaatggctcgctgcaacctctgcctcccgggttcaagtgattctcctgcctcagtctccctagtagctgggactacaagcgcacgccaccacacccagctacttttgtagagatggggtttcaccatgttggctaagctggtctcgaactcctgatctcaagtgatggcctcccaaaatgctgggtaacaggtgtgaggcaccacatccggctgtcataggaatttgtcagcaaatcctacagactagaggatgtgtgttgggtggtgtgggggtggggataacggaggagatggggggtgagctcttcaagccccaggggagaattctgttccgttcctgggacatcccaggtgagagggaagaaaggccagccccccaagacagctatcccagactgggacagaggcaaaccctgaccacagagccctgtcactcacccaagaacaggtgccaatgacagaatagccaggccgaggggggagagaggtgcttcggtgatggatttccctggtgacttgccaagacagggctttactgcctccgccctggactggctgagtcagactgtgcaggggtggacactttgactggtatttgggaggcatttgctgtgggttacagagagggaggggcctcctttgcggccagagaaggaggaaagaggccctgggccctgggacttgggacttgggtggaggctcgggtttcggtctcacctgctgctccagaccatggcctggagggccgcctgcgccacccccaaagcaatgagatagcccctcctccctcagacccaggagtccaggcccccagcccctcctccctcagacccaagagtccagaccccagcccctcctccctcagacccaaaggcctcggacccataccaaatgcttctatgagatagttttctccccttgttcatgaagaaatgagcccaggcccagtcagatctgcatctgtgtcacagcccagggccactgtaaccttaggctactgacttccctctctgagcctctgttttctcctgtcaatggggcaaggggtctgctccttccctcaaaccccaactcaggtacagtcaagcacagaaaatacttgtggcatgaatgtgatgagaacacagaattgcagaagccaaagaaagagaagcgtaagggccctccttccacccctacctcccccacccgctgctacacgcaccaggaccacctgctgggtagccaggagctcacagtctagccccgctggccacccctgcagcccccatccttcactcaggcagttgcagggcccagaacacccctatcttctaggattgacactggctgtcaaactcatccttcaaggtgattcctrgcctgccctcctcctccaggcagcctgtcctcctcctccaggcagcctgtcctgaccctcagcagcctctcctggccttggcagagcccctcgtgtcctcccttgcagcacgcatgggaagaaaggccatcgtcctcgccattgctaacaccagccttgcgtttcctctttgccaggtactgtattgacaactctctataacctgactttatcctcccaataagctgggtgtggtgggtggctcatgcctgtcatcccagcacttcgggaggataaggcaggagtatcacatgagcccaggagttggagaccagcctgggcaacataaggagactctactatatatatgtgtatatatatttatatatagtctgagatgggaggatcaccccagtaggtcgagactgcagtgagctgtgattatgacactgcattctagcctgggccacagaactagaccttgtctcaattaagaaaaaaaatggggataataggacccattccataggatgtggtgaggattatgcatmcacacacacacacacacacacacacatttatgatgtactgagaagatataagcacacaataagtatctccaaaattatcaagtggcaaagccaggattcagacccacacctgcccgaggctctctgccatcagaccacactatatctctttctctctgttccttcatccccatcaatcgaaggcaaaaatgtgccttctctgatttccagsctcactcagcatagaccgtggaggcaacatatcttgaatgaagcaacaaagcagtaatgcacatgaatgcaccaaatgccaaaagctcgtttactcaacaagtatctctccaacactttctatgtgctagacccaattctgtgtgctgcagattaagtggaggactgatcacacaaaaatctttgcccttgtgaagcttgcattttttttttttttttttttgagatggagtcttgctctgtcacccaggctggagtgcagtggagcaatcttggctcactgcaatctccacctcccgggttcacgccattctcctgcctcagcctccggagtaggtgggactacaggcacccaccaccaagcctggttaattgttttgtatttttagtagagacggggtttcaccatgttagccaggatggtctcaatctcctgacctcgtgatccacacgcctcggcctcccaaagtgctgggattacaggcgtgagccaccacacccggccgctttttttttttttaagatggagtctcgctctgtcacccaggctggagtgcagtggcacgatcatctcggttcactgcaacctccacctcccaggttcaagtgactctcttgccttggtctcccaagaagctgggattacaggtgtgcaccaccaactctggctaatttttttttttttagtagaaatggggttttatcatgttggtgacatggtgtgatctcggctgactgcaacctccacctccggggttcaagcaattttcttgtctcagcctcccaagaagctgggattacaggtgtacaccaccacccccggctaattttcatattttcagtagagacgtgctttcaccatgttggccaggttggtctcgaactcccaacctcaagtgatcaatccgcctcagcctcccaaagtgctgggattacaggcatgtgccaccgtgcccagcctgtgaagcttgcattctaacggaggagacacagacaaaatgaaccaggaacacagtgggtaagaaggtgaaaagttctccacacaaaaatgaagtagggagagaggaaagagactacaaagaagttgggttgccgggggcggtggctcacacccataatcccagcactttgggaggccgaggcgggcagatcacgaggtcaagagatcgagaccatcctggccaacatggtgaaatgctgtctctactaaaagtacaaaattagccgggcgtggtggcgcgcgcctgtagtcccagctactcaggaggctgaggcaggagaatcacttgaacctgggggggcggaggttgcggtgagccaagattgcgccactgcactccagcctgggcaacaagagtgaaactctgtctcaaaaaaaacaaaagaagtcgagtaagggatgccgccatttgaaacagggtggtcagccagtcctctgagaaggtgacattcaggcaaagaccaaaggaggcaagaaagtgaggcatgagggtatctggtagaagagcattccaggcagaggaaacagcaagtgcaaaggccctgaggcaggaccgggtctggatgttccaagagcagcaaggaggccagtgtgctgacacacagaaggaagagatgagatcagaatcacgtcccttaaggccttgcaagatgtcagctttttttttttcttcttttttgagacagagtctcgctctgtcgcccaggctggagtgcaatggcgcaatctcggctcactgcaagctccgccttccaggttcacgccattctcctgcctcagcctcccgagtagctgggactacaggtgcccaccaccacgcccggctaattktttgtatttttagtagagacggggtttcaccgtgttagccaggatggtctcgatctcctgacctcgtgwtccacccgcctcggcctcccaaagtgctgggattacaggtgtgagccactgcgcccggcctgttttctgttttttgagrtggagcctcgctctcttgcctaggctggagtgcagtggtgcaattatcggctcgccgcaacctctgcctcccgggttcaagtgattttcctgcctcagcctcctgagtagctgggattacaggcacccgccaccacacctgkataatttttgtgtttttagtacagatggggtttcaccatgttggctgggctggtctcgaactcctgtcctcaggtgatctgcctgcctcggcctcccaaagtgctgggattagagatgtgagccactgtacccatgcaagtttcttaacccttctcttcctcattttctcatctgtgagacgaagacagcctcccacccagacacactcccctcacggggctctggggagaaatgatgtggaaagctttgctagtaacctctacagcatggagggagttctggaaaagtgatttcagaaaggtgtttatgcctggaaagcctgttcatttttgtgatgtccttggagctgggccaggcattatcgagctaaatcttagcttttgtcagaataggggggtcattgagggaaatttccaaaggaaggtggaacgggatgggtggggaggtaagggcatgagcagaggcagtgatcgtgggcaggaggtgtccatagaagacgggctgccactggccctggagacagaaggtcagccccgggttcaaatccctccttaaccaagtgctgaaatggacaagttgctcaacctctctggccttcagcttcctcatctgtcaagcaggaatcaaacctcgaacttcctcccgctgttagaatttcaagggagttttaaagacagagctttcaactctgacctgtgaacaagtgtgacatcaaatgtactgttcgttgctattattctgttgctacaaggcagacagttagtttcccagctcccctgcagtccccccagcccctcctagatctgtctgccagccccgccccggggtcactccagccaggctgtgccaggtgaatgctcaggtatgcggaggcggaggcaggacggccctgggagggagcaggaggaggggccggcagcctggaagggaaaggacagcggagagcagggcagagcctgagcaggcaggtaaggagatccgggtcaggagagaagggggctggggcttgaccaatgggtctgagggacggggggactggggtctggactccagggtctcatggaggaggggctgggggtctgaactcctgggtctgagggaggaggggctgggggtctgaactcctgggtctgagggaggaggggctgagggcctggattcctgggtctgagggagggactgggggcctggtctcctgagtctaagggaagaaggattgggggcctggactcctgggtctgagggaggaggagctggggcctggactcctgggtctgagggaggagtggactggggtctggactcctgggtctgagggaggaggggactggggtctggactcctgggtctagggaagagggactggggcctggacttctgggtctgagggaggaggggctgggggcctggactcctgggcctgagggaggaggggctggggcctggatgcctgcattgagggaggaggctggggtaggaattagaggctcctactggccaggccttcacatgtttgctggctcccagggcacctccaggtgggcaggagctaccactcagcaccatgagcaccgccacagggtaagcgcccccggaccccaggtcccagccccagcacgcctcccgcctcccctcgcctcctcacccacacccgcttgcggcagcccagactgtttgcggcggcccagactctggcccaagccccgacactcaggaggaagccagagcctctctcctccctgcccagcctggggttasgggcccccactgcagagcagacaggcctgagctccagttcggccctcacactcagtgctgatgtaaccctggtcagaggacatcacctcctggagcctcagcccctcctctgtgacacagggacaatgttgaaaaattggagggatagtgcattacaggacttagctgaccacctcactgacagcaggtgctcaactcataggagtcgctattgcgattgttatgttgttagtaaatattaaccctttgctagaaaatcagggctgtttataatgaagactcaagtcccccagagtaagcagggagaaaaacaatgagagatgagtcaaaatacctgcatggtaggtagtgagctctctggcccagaggtaatcaaattgtggtgacatcagactggcaggagcrggatgaggaacaggagtttgggaaaaagggtttttcagttcccctgacgccacctgatcgctgagcttctgttatgtgcrtgcaagtggggattcaagaattcttaggaaaggtaatcttaggaagaaattgaggacgggaggagacagagaaggatgtggttgggaagcacctggcccatgggagtgggaggggaagcagataattccctgtctacttcagataccactaatgctattrtaaccattcccatttattgagcaacttctgtgtgctaagccctggcagcatcttaagaatgataataacagttaytgaggcttcaaaatacttcacctgcatcatctgactgaatttgcccaacagccctaccagatggttactacgttacagaaagaaaaactgaggcaggagagattaaatcctcttctgaaggtcttatggcaaggaggcagtagacagagggtttgaatcccggactatgccatggtagagatcacactcccctaccacccagcaccaccgcctgacctgacctgtcttttttttttttttttttttttttgagatggrgtctcactctgctgccaggctggagtgcagtggcacgatctggactcactgcaacctccgcctcccaggttcaagtgattctcctgcctcagcctcccacgtagctggsactacaggcgcccrccaccacacccagctaatttttgtatttttagtagagacagggtttcaccatgttggccaagatggtctcaatctcttgactttgtgatccgcccacctctgcctcccaaagtgctgggattacaggcgtgagccaccgcgcccagcctacctgtcttcttaaagtccagctctggctctgagctctcctgctctaataataataataataataataataataataataataacccttccatcgctccccattaccttcgtcatgaagcccttgctgccctgcttggcatttccacaggatctgcccccagtcccacagtctctctcwttcctcttttcttcaccagcccagaagctgccccaaagccaagcgccaagtctatctatggtgagcggggggcaagggagccccaggcccatagaactgggtctaaagaaacaggacctggcatccagggtcttggaggaggaggggctgggggtctggactcctgagtcagagggaagaggtgctgggggtctggactcctgggtcagagggaagaggggctggggggctggactcctaggtttgagggargaggggctgggggyctggactcctgagtcagagggaagaggtgctgggggsctggactcctgggtcagagggaagaggggctggggggctggactcctgggtcagagggaagaggggctggggggctggactcctgggtcagagggaagaggggctggggggctggactcctgggtcagagggaagaggggctggggggctggactcctgggtcagagggaagaggggctggggggctggactcctgggtcagagggaagaggggctgggggtctggactcctgagtcagagggaagaggggctggggggctggactcctgggtcagagggaagaggggctgggggcctggactcctgggtcagagggaagaggggctgggggcctggactcctgggtcagagggaagaggggctgggggyctggactcctgggtcagagggargaggggctgggggsctggactcctgggtcagagggaagaggggctgggggcctggactcctgggtttgagggaggaggggctgggggcctggactcctgggtcagagggaagaggggctggggggctggactcctaggtttgagggaggaggggctgggggcctggactcctgggtctgatggaggaggggctgggcctggactcccaggctcattctctttctcccctggcagagcagaggaagcgttactccacagttgttatggctgatgtatcccagtacccagtcaatgtgagtctggggtctgtgttcccccaggacatcttctggggcaaaggtggcctcaggagatagggcttttgaaagcagctaggcccccaagcaggaagcatgtggaaagtcagtttgcccatccataaaatggacctccgttgcctcacctcagtcatggatatgaagycaggrgcctcgggtccacttaatctgccagcctttcctccaggccagctgttgtgctggacagtgggaccacggagrcaaatcaagacacagccctgcatgaggaaggggtagacaaggtccagaggaatccacagaggcgcctggtgctctaatggaggtggcagggggcatggcrggagacccgaggaggcatttagaaggagagagctatratccagactccttccctgcccgcaaggagcctccagtctgtgagaagccagactcaggtgctagtcactctgatgaaagggaaacaaagggcactgggaggaggagctgatttgtggaacaggtgatcaaggaaggcttcctggaggaggtgtggttagtctcaggctgaaagtctgattattctgggggattctgagcccacctggcatcatcttgggcctcactgctttctccatggtccgtaccagcacctggtgacgttctgcctgggtgaggacgatggcgtgcataccgtggaggatgcctccaggaagttggccgtcatggatagccagggccgagtctgggcacaggagatgctgctgcgagtgtctcccgaccatgtcacgctgctcgacccggcctccaaggtgccggggggcacgtgggtgggaggagtgtctggggcagggacttcagggggtctgggtgtgaatcttggctcctgcacgtccttcctctgggaactctggcgagggaccccagcccccttcttgagccttaatagcctcatctattaaacagggctgttatccctaaccccctaaccgcctgaggttgccctgacctgctggcccacactcccgtcgccatttagtagtaccatcatttcggggcctcagtttaccccgccatcccacccggcaggaggagctggagtcgtacccactgggcgccatcgtgcgctgtgacgcggtgatgccacccggcaggagccgctcgttgctgctgctcgtgtgccaggaacccgagcgcgcgcagcccgacgtgcacttcttccagggcctgcgcctcggggtgagcagatgggctggctctgggggtggagctggaactgggcggagcctggagccggggcggaaatgggtggggcctctaggtggggcggggcctggggctaaggcgggatcagagcaaggaagggcaggggacctgggaaggaagttctggaaggcagtggggtttgagattggacccagggtcaagatagaacatgaaggtgggatgaggacatgaacagaacatggccaagaaggatctgggggagcagccaggacgaggtgggggcgaggaaccacccggactgggtctccatgggcggggtcgtggcttagggcagggacaggtgtagggcgaggggtgagttcggggcgtggacgtgcgtgggttcacaggtgtgaacggtagccgcacgtgggctgggactgagctgaaaaatcgrccaggggcgaggcccgggtaggaagtgggtgcggcgtggggaggcgtggcctgacggtgtgattggcaggcggagctgatccgagaggacatccagggggctctgcacaattaccgctcgggccgcggggagcgcagggcggcggcgctcaggtgagagggaagaagttggcagggtctctgggaagccggtttcccctccttgtgcctcagtctacaacaccagcctggaacagaacaagagttttgcatggagtcaagcacaccctagtcgagtcttgtctgtacctcccagacgagctgaccccttctccagaactctgcttcttttctctgttccctgtccaggccctcagtttcactctagagaggtgctatccctccgtatatcggatttctccctacctcgttgaacttgttcactccctttgagccttttgagcctgtgtgtctcgttctgcgccctggatttccccctccctggacccctcagtggacccagtcttggtgtccccgtcgccctccgcagggccacgcaggaggagttgcagcgcgaccgctcgcccgccgctgagaccccgcccctgcagcgccgcccgtcagtccgcgcagtgatcagcaccgtagagcggggcgcggrccgcggacgaccccaggcgaagcccattcccgaggcagaggaggcgcagaggcctgagccggtggggacctcgagcaacgctgactcggcctccccggacctgggtccccggggtcctgacctggcggttctgcaggcggagcgggaagtggtgagccgctaaggaaggggtctgggggcagggccaggcgactggaggcggggctagggcgtggaagggcggggccggctgcgggacgggcgttctctggtcagacttctgcgttatggaagaggggctgggtcgggggcggggcttggttgtggggcgtggccaggtgtttggggcgtggcctgatctggggaagtgtataggtgctcaggttcagggcttcgacggggatggttttggaactcgggagccctgagcgtccccctcctctgtcccctaggacatcctgaaccacgtgttcgacgacgtagagagctttgtatcgaggctgcagaagtcggcggaggcggccagggtgctggagcacssggaacgcggccgcaggagccggcgccgggcggctgggggtaaggggcaccctggcgtgggatctgaaccccctcccgatctcttccaaatgtccccgctctccccaggctctcccctcccgccacttgccagggctgacctcaccgccatcttaaccgggtgtccacctctctctgcctgcctggtgctggccccgcgtccccatcgccgcscccgtctgctcccctcagagggcttgctgacgctgcgggccaagccgccctcggaggccgagtacaccgacgtgctgcagaagatcaagtacgccttcagcctgctggtgaggacgcgcccgcccctgggccggggcgcgggcacgacgaacctgtcccgtccccgcacccacgccaaccacctccctccccacgccccaggcccggctgcgcggcaacatcgccgacccctcctctcyggagctgttgcacttccttttcgggcctctgcagatggtgagacccgccccaggccctcgggcccccctgcagcgggaggaatcgggttcgacttgtagaaggtgtggcggcacagcctgcccctcctgctcccctgacagattgtgaacacgtcgggggggccggagttcgcgagcagtgtgcggcggccgcatctgacatcggatgccgtggcgctgctgcgggacaacgtcactccacgtgaaaacgagctctggacctcgctgggggactcgtggacccgccccgggtgaggggcggggctgggaggcagggggcatggtgattggaggagcataaggcgctgggaggtgggtggcatgatgattggaaaataggactaggagagtagggagggrttagaggcgtggcttagttgtgttggggcggggcttaggacagatgccaagattcaattggaggaaaggccaggaattaacgtgaaggaaagatttaagaccaccagaccaatcggattgaaagaaaaggggggcttaaaggaatagaggggctaggggctacggggcaggggcggggctacgcgaaggggcggggcttctggaaggtttggtctataactttggtgatgggacagagtctgtgcactgcgggctggcagttccgcagggaaagggtcagaacctgaaaccgaccttacggaaaacctgatttggaatcaggtgagatttagaggctggataaggcaatttttttccagagagagagatggatggggtctcaatattttgcccaggctggtctggaactcctggcctcaagcgatcctcccatcttggcctcccaaaatgctgggattacaggcgtgagccaccgtgcccggtctagaaatataaattgctgttgagttgggcttagagctaccggcaggacttggtgaaaagtggcggggctagaatcgttggaatacagcgagctttaggggaaaacttagtgaagttaatgcaggaacgaagttgggggctgtatcaggatccctgagctcttggccctgtccctggccgcaggctggagctgtccccggaggagggacccccatacagacccgagttcttcagcggctgggagccgccggtcactgacccgcagagccgcgcctgggaggacccagttgagaaacagctacagcacgagcggaggcgccggcaggtgacccaagcgacacagcagggccgaggctgggaagtccsggggcgcggccggtccgcctggccccgcctgacccgactgtcttacttcctacagcaaagcgcccccsaggtcgctgtcaatgggtgagtgtccgccccagggcagggcaagggggtcaaggaggggtgcgtcccgggggctcccgatgctgactccgccccctttttttctgtgtttttccttctgtcttcctggctcttctcaggtgggtgagatggtgatggggcgggccggggctgggagagagggaggagcagggtgggagggggcgggacccagacttctggggctaagggagttgggaatggagacccggattcctgggcctaagggaggaagggggctgggagtgggtaaagtctgagaggttggatycctggatccccaaaaggctggaagaagccagtttgttttcccagggcctgggaagcaccatgcctgggctccctaggaggacagagccctggatattggaggggagaggctggggaattggacctttgggttttgaagaagagcccaagtctggtgcttgggatcctggagacccagaggagcaggcttgggacttcaagggcttgggggcaagtttctgggaaagttaggaagtggtagtatctctgggcccccgagaggggtaaaggctggacgattaaactcttggttttccagaggctctaatgcaattgtctaagtcgctgctgggtgtcggactgggttaaaaggtttgagggttaaaaggataagattgaagcttgagacctggactcctaggtccctgggggaggaaagaacattccaagtcatggttctaccaagcagtgggggctcagactctgggtcctgggggagggaaggaggtagatggactagaactctagggtccttgagcaaatagagggcagactggagggaagcaacgtgggaggagacgaaaacaaagcagtgaggctggaggagacaaaggggggtctgggtgagggcccgagcagagggtctcagcagggacagcgtgctgggagctgccggccccacacagggggtgccgcggccctgaagaccccccctctcccctgcacaggtaggcctgatccaggctgaggtccctcttattgggggtcagagctgaaatcccacccctgcccccagctgcctgatatcgcaaccctggtccctgttcacagcttcaagtcactttctccgagcctcaagttcttttttgcagggaaactgggaataatgattatccgttcccggaacagtgagaagtctgtggtgttgtaggaactagcagttaagggcttaaggctgtgaccaggttcaagttcaagtccagctgcctgcaaactaaggcagcattattcagacctgggctaccctggtcccgggctggcgatgccactctcttactctgtgacctttacatccctgtgcctcagcttcctcctctgtgaaaatggaggagatcatagggtctctgggggaggaagaaactgggggagagaggggagtccaaattcatggttctaccaaccgttgtcataaagatcaaattaactaatatacgtaacagaacagtgcccagcacacagtaagtggtacagaagtggtagctattgttttttgagacagtctcactctgtcatcaggctggagtgcagtggtgagatctcagctcactgcaacttctgcctgccaggttcaagcaattctcctgcctcagcctccagaatagctgggactacaggcgcgtgccaccacgcccagctaatttgggtattttttagtagagacagggtttcaccatgttggccaggatggtcttgatctcttgacctcatgatctgcccgcctcagcctcccaaagcgctgggattacaggcgtgagccaccgcgcccggcctagctagtgtttttattatgcttatgagttatgatatataaagcccagtgcctattagatgctcaataaatgacagctgtttctagctgtgtgatgtgggcaagtcattttctcgctctgagcctcattctcctctgtaaaatggaatcgatggtgggatagtacccactacatatgcctacagcacaatgccaagcaacggagggagcaaatatattcagtctgttattcttgtttcaaatttctattaacagtattaacccggcccctgctgtgcccccagcttggctctaaccccagctcacaccagcaccctgcagcccagagcaatggggctggctgcctccttatctccaaccctcccgcttctcctcagtcaccgagacttggagccagaatctgagcctcagctggagtcagagacagcaggaaaatgggtcctgtgtaattatgacttccaggcccgcaacagcagtgagctgtcggtcaagcagcgggacgtactggaggttagaggagcgggaggctgaggggcasgaattagccagccctagctgcagacaggctctgaaccctctgttctttaccacacccaggtcctggatgacagtcgtaagtggtggaaggttcgggacccagcggggcaggagggatatgtgccctacaacatcctgacaccctaccccggaccccggctgcaccacagccaaagccctgcccgcagcctggtgagccagcgcagacgctgggatcttgagggtggagaggctgggaccagatcctgggaacaaggggcgtggggatcagctgtcaagagtgctggagcaggtggtgactgggggttcaraaatgcatctccagaaaggggagaggctgggactctgagtcctctccctaacccaggtactctcctctccttcctttcagaacagcactcctcctccaccaccagccccagccccggccccacctccagctctggctcggccccgctgggacaggccccgctgggacagctgcgatagcctcaacggcttggaccccagcgagaagggtgagtggtggggacgccggctgcggggagcggtccttatccttgctttccaggcagagaaacgggggctcagaaagagcaaagggactcccgtcccattctggggacgctggagcgcccccccgccccgccctctggccccaggacccctcgccctgagcccgcactccctacctcccggtttcccgcctgcagagaaattctcccagatgctcatcgtcaacgaggaactgcaggcgcgcctggcccagggccgctcgggaccgagccgcgcagtcccagggccccgcgccccggaaccgcagctcagcccgggctcggacgcctccgaggtccgcgcctggctgcaggccaagggctttagctccgggtgagtggggccrgggccctctcggcgcgggttgatacggacgctgggagcggagcgttccgatcggccgggagtcggggggcggcagtcgtggagaccacagggagccgggattagcccgaagtgagggtctgtctggtagcaacacccaatggcaggctgtgattgccatgttttttcagactccgactggattccttagggaaatcccgtaccctttgaaagcaggatgcggccacgccccccgggtggcaacattgtgattggtgggtggggttcaggaggtgtcgggcctgcccccgctagagctagaatgctgttctgattggaccatcgccgggtgggcgtgacatgattgtccgggctggggcatccgccgaccggcctgaccgcgcccgggctgccctcgctcaggaccgtggacgcgctgggtgtgctgaccggggcgcagcttttctcgctgcagarggaggagctgcgggcggtgagccccgaggagggggcacgtgtgtacagccaggtcaccgtgcagcgctcgctgctggaggtgagccggaccgctggtccctgggtctgggtagggttgggatgacgagggctcggacgccaggacaaagcgatttccaccccgccctccaggacaaagagaaagtgtcagagctggaggcagtgatggagaagcaaaagaagaaggtggaaggcgaggtggaaatggaggtcatttgacctgccaggcgcccttcgcaaagagtgacgaggccccgtgggagaacggactcctcagactctccccaatagcggaagtcgatcttctgaaggatggccaatctgctccggccctggtcttcccccatcccggtggacagacttaacgatccttgctgcagtccctccggagaggatctggactggctgggagtggggagggcgtggagacagtctacggaaagcgctagcagacccccgagagggtgcagtggagccctgagcattgtaatatgcggcccagcctataaacagcctccgtgcttagcagatggtgtgccaactgctgtcctctacccggctaccagggggctcagaaacctgcccctcgacccagtcacagcctcatggaacctggaaaatgttccaccctctttggtttctctctgaaccctcctttccatccccagggtcccaaaccaggctccctcctgacctcctagccagcctagtccagcttgccccaccttcacgtttccctggctcgcggctgctgggcatgaggctttgtgtctcccttcccgcctcaccaacgttctcacttcattccttcctgcgtcctggccctgcccctctccaaacgctcccaagcgttcaacctctgaggtttgcacctgctgtctctgctggctgaaacggccattccctgcctggcgaactcctgttcagcctccctggcccagctcaaacactcactgtggggaagcctgccctcatccccgaagctagtttcccagcatccacttctccattttgtcccccacctcctgccacggccctaccaggtagaactggctgcctcccaagcatgccacagctttctggccactctttgttctgggagatggcagccaactgaaaacttcctaatccctcaagaactagctccttctccctctggcaagccctgtaactttcttttccccattatccaggtggctggtaaggtctgcttttctctggatcccactgttttccagactggatattctctgcctttgggaagaatggccctttctctttctcccctggctctgccttccccagattactgagggcctctgggcctctgggcctcaagcctctcccggagttgttccaacctgggccaccagatggcgccctccaagatgggaaaggatcagagagacgcccccccacccccaccccgccccccgcccttggggcaggcaggagttctcagtccccactttgccacctcctgcctggttccttctggttccttccttcctctttggatctccaagagtccttctcctatctgccccgtccctagatcctattcacatacttcccttggctccctatggctcaccggataaaaccaggccccagcttggcagtcacaggttgcccactcggctcaccagcttctccgaccacggggctcagcttccctcctcctgctgccaagcttggttcatgtggttgcttctgcccagaatactctcagcccctctaccacttgcccggggccccacccctcattcttagtaggggaataggaaaggtaggcaattcccccaaacctctttgctccattcccgcacccccccccgccccccaataagcccccgtggctctcgccacctaggctgcaaactgaaatgcctgcaggaacccgacaagagacccaagtgagccagccgggcctcagccctacccccgtcacaggccagcttgtttgaacattctggcagctgtatcttccaatattctcagaacctgaccatctctcaccatcttcactcccatcaccccagccagagccaccctctctcttgcttggatttcaccagtagacccttagctggtccccccaatcctcaccaccaacccccagcctgttctccatgccagagggacctgttaaaacctaagtcaggccatggccatgctccaaaagacacccagagctccaatctcacagctcaagcccttcccagggccaagtctccacacagccaccgtgacctctctagcttcattccctgctttctccagctcctcagcttcctgcagcacaccaggtgccctaccccagggcctccacacacacagctcccatcatccctcaaatacctacacagctccctccccagggtctccacacacagagctcccatcatccagagcacccttccctcaaatacctacacagctccctctccaccaccttcaaccatctgcctgcaccagcttttccgtgaggcctgcctagaccactctattcaaaacacatgtgcacacacgtgcacccaccttcccaacccctttcttttctccagagcgccgccaccttgaaatacatttattttaacatcggatgcccccctcctaaaagtattggatctttgttttgttcagtaatgatcagtcacactgtactcactcagtcctgttcttcctgttggtgttatactaattgttgaatgaatgcctcatctcagaagatggctcctactcagctctagtcaacggtggctatgcaggactgaaaagttcatattgtcacagattcctgttctttcaaaagaaggcaaaattctttttgtttttttttttgtttgtttttgagatggagtctcgctctgctgcccaggctggagtgcagtgactcgatcttggctcactgcaacctctgcctcccaggttcaagcgattctcctgcctcagcctcccaagtagagtagatgcgattacaggcacctaccaccacgcctgctaatttttgcatttttagtagagaaggggtttcaccatgttggccaggctggtctcgaactcctgacctcaaatgatctgcccgcctcggcctcccaaagtgctgggattacaggcgtgagccaccacacccggccaaaattccagatttttacacacaaatttctccaaatgttaaatgttggcaattgactaaatttgtttcaaagacactgatggcaaaacccaaactccccagctccacatccttggccccagaggtcttgcccgctgatccctcctgccccatcagcttcccctcagccccccgcctgcgatcacgcgggctccgtcttggagccttcgctcccgctgggggctcatcctgaagctccttcaccacacaggtgagtaagcaccagcccatcccccggcacccacccaagtggcccagtggtttggtcatggacacgcacggccccccagcaggagcaggaaacagtgccctccctctggctgggaacacagagcttgagtggcaacttcacgacttttatttgtggtgcctgtgctttatctcgaaaataccttctccccctgccccagacagtgggcggggagggggcagcaaaaaatagaagacgtccctccctattgcacatggaccctatatacaggcccacctggctgaggctggcgggactcttggcacattcttggatccctgctcaggaggggaggggtgacggggtggcatcacacgtgagatggggacctccaggcggccactctggtcctggctactgatccttgcacttcttggtcctcagttccttcctggtcccgtctctggccctggtcccctctggcaacgtccccctgcttggctcggcctcccacctccatcctggcctcgggtggccccctcggctcctggggactctgctcccctcccagtccggaggtcccaggggggctatggcttctctgagacttcccccggagccctgtcactcgtgttcacacgggggaaggggtgcgtgtggcagaagcagctgtataaatacgggtgcgggaaagtccctccgggtcacttggagagtttgctgatgacgcggatcaacgctgcattctcatccttgaggcgctggttgtcagcgcggaggtcagacagggcctgggggacggcaagggtcagctgggcagccctggcgggttgcacccccacccaccctcggccctctgcccacagcccccacagcccccaccttcagctcctcctccagctctgcggccttgcgttccagggccctgcgctcctggaatgaacagggaaagtgcagaaactgagtgaggctgaggagggcaggggaaggccaggggccagctgggaagggcaatgtggctcccttggtccaaacttagggatgtgaggctggggacgcctctggcccccatccccactgcccctactcacgaatctctccagttccaggagggctggcctctcagcgaagcgttcttgcctctggtgaggacacagaaagcacaggggtcagcagaagaagccagcactgctctgaagggtcctaggctcctgctgggcacccgcccgcccactaggcagcccacaagcccttcccccacgggccaggccccgccaccggcaggcccacagccccatcccctcgctcagactccgcctccgagatctcggccccgcccctcaagtgaagcccagccccgccggcacccccaggccaggctctacctcccagcagtctaagccccacccaggcggccctgccagttcccgtgaccctggcctcggcgcccttacctgcgtggcccgctccagctccaccttgagctgcgccagccgcagcgtggtctcggtcagggcctcgcgaagccgctcgttctccctgcgcagctctgcatacagctgggggtcaggtagaggagggtcaggtggaggatggggcgatgctgggggggcggggaagccaggaagctgggcacccagcaggcaaagccccgacggaggggtgggatcgcaccgtcctaaagcctccgtctggctcttccgattctggctcaggttctgggttgaggtcccgctgccaccgctgcctgcgggccgaggggccgccctccagggtgctggggcaggggaggagcgcgcgtcaggggccggcccggcccgcacgcagaccccacctctcccaccccgcccctacctggactcctggctgcggtcagccggctccgcctcctccccctgtgggcaggtagacgggggttcaatgggtatgggagggactttagcgggtatgggaagggctttgcccgccccccggcccaccctctgcaccagctcggccccacctgagcccctcacctccgcaggccccctccactcctttccgaccttgcggtgctccctggccgcctgcggtcccggaccctgcccgtcgggcgcctctgctgggggaggggcaggaatcagcccaggcacctccagagccccctctcggtgcctgggtccccgggtcaagcccccaggaaagcaagaagactatgggagaaactggatgattccctgggaatgacctccccgagagcagacctcacctctctgggcagggctgtcagagttctccactccagggacgcggggccttcgggaagggtcctgtcgggagggggaggcgagtcagggaagcaggacatcccgcaccaccccactcgccctcgctgacccctctcaccaggctctgcgccggcttctctgactctggggccttccctgcagccttctctgcctccttcaggtctgtaagagtcacaccctggcagggaaaggggacagtcaggggacgctggggtcagggcccagcccctcctccctcagacccaggagcccaggccccagcccctcctccctcagacccaggagtccaggccccagcccctcctccctcagacccaggagtccagacctccagcccttactcctccctcagacccaggagtccaggccccagccactcctccctcagacccaggaatccaggcccccagcccctcctccctcagacccaggagtccagaccccagcccaccccacacctgtgtggacctccgagactggcgcatgagacgggagcgagcttttctctgggattccgactcctcatcccgcacaggcatctggtaggacctgagggaagggtcccaacctcagacagggaacctggggaccctgtcccattccgtggctgacaccctccgcgggaagcaagttctgtgggaggggactccaactcccagcagacctgaggccagctctccctcaggagcccacccaaagccccgggactcctgcttcacatcgtctctccctgctgggggcgggggcggcagcttcctgccctggcctcttcacctccgtcggtcccgggagtccgctgggggcgccgtggaggctgtggggacgtttggcttcgctggggattcaggctccggaatcctggagggaggcgaggagt

SEQ ID NO: 97263 - DNA, 109275 bp, Homo sapiens
  misc_feature (1)...(109275): n = A,T,C or G
gttactgtgtccagagggcagcagctgctgtgatgtacccacctgagcctggcagctttctccaactttggaagcccaggagcatggcccctgtccacagatgcacctggcatgaggcgtgcccagagggacagaggcagatgagtttcgtctcctccactggattgtgagggcctagaaggagacaacggtctgcttgagaaggcagtgaatagtgagcaacctgaggcagtgcccctctggatggatccacagtgcctggatggaacctggctcagacagagctcagttctgcaggtccctgaggcatggagagttcacagctaccaagtgtaggagtctggattcaaagccaacggtgtgactccaaagtccctgccctagcccctggaccacccttgcaggcccatcagatgcccaggccagcagcacagccggccaagaccagggaaacttggggagcctcagagcacccccaggtattccaacctaatcctggtacccctgcctctcaccacccttcttcctgctttaacctcaatccctacacaaagcctgggccacttaatgtggcatcaaacagatgcctcaataaatcagagtctaatcttgaaaaaaaaaaaaaaagacttaacagatatacaactgcacgttagaatgctaaagaccataaacatataacaacttaaagtacatataaattcaatatatatccaatcattgtgactatgacacagtagaatattaaaatactattttcaaaatgtatacaagcttaatgttctatgtattcaaactatttattcaaaatataaatcatcaacataatttgccactaatattcagtcccttcacaggacacgtgattcactgggagttaataaattagcagctggcaggcagtgacacacagcaaaaatgaaaaccaagaggtgaaatagttctgaaataaaggttttaaagctaacagaaatcactgaattactaagtcattagcactaattttgagccaactaactaattaatatgagatgatacaacgtcctatactttggtatatacagactatgtttaaacaatgtctgaatgtctgtaacgtgactttcaaaatgctcctggctttacaaagatgtgattaagatgtagtaatacatgctaaaccatttccccctgcagagcatgtggtaactttcatcagtcacattgagagtccagaagataaaggaaaaggtcgtggatttcgctgagaacttgccagagttgaactccctcattttccgttccccagcattagcgggttctgggactggtggctgtggtggctcgttggtctttgtgtcctagaaggtggggaataatcatcatcttgaaaaagaaaaaatggtcattactgaaggaaccatcttagtttacagccacctctgggtcaattcccaacattcaaaagctgagcagggctttaaagctatcttaataattatttctgtattgcaaacttcagcaatcttttttctagttacatttgaaatgttattcttttgggatgtgctcaagtgaatactgctttttcctctgtcttgcttcattactttttagtttgcttcaattgaagcatcattgtaagtctccccttctcctcaaataactttaaattgctgccaagaactatgttctattttaaggcttttgagaaaaaattttcaatgaagatagccacctaaagttatacaaatatagaagaaacgggataaaataaagcttagattggaaaaaatatttaagattatacaaaattcaagcataaacaagggaaactgagtaattgtatattcaaatacttttaacaagtgcaaaacatgtaggcttaaagaaatagagctggccaggcatggtggttcacgcctgtaattccaacactttgggaggccgaggcaggcagataacttgaggtgaggaattcgagaccagcctggccaacatagtgaaaccccctctctactaaaaatacaaaaattaggccaggagcgatggctcatgcctgtgatcccagcactttaagaggctgaggaaggtagatcacctgaggtcaggagtttgagaccagcctaaccaacatagagaaaccccgtctctactaaaaatacaacattagccgggtgtggtggcacatgcctgtaatcccagctactcgggaggctgaggcaggagaatcccttgaacccgaaaggcaaagattgtggtgagccgagattgtgccattgcactccagcctgggcaacaacagcgaaactccgtctcaaaacaaaaaaagaaaaaattagccaggtgtggtggcacatgcctgtaatcccagctacttgggaggctgaggcaggagaatcgcttgaacccaggaggctgaagttgaggtgagccgagactgcaccattgcactccagcctgggtaacagagcaagaccctgtctcaaaaaaaaaaaaaaaaaaaagagaaagaaagaaagagggctacattatttatgaaacagatactgttaactcagtcaccagaaagcctgtgtataaatgagcagtgagatattcaagcacagcacacacacacttctcaagacagctgtcgtgagagttccaagctcgtttccttctggatacatcagcaactcactctgctatgatcctgcaatacatctcatgttagaattagacacatctgggccaggcacagtggctgatgcctgtaatcctaacactttgggaagctgaggcaggcagatcacctaaggtcaagagttcaagaccagcctggccaacatggtgaaacgctgtctctaccaaaaatacaaaaaattagctgggcatggtggcgtgcccctgtaatcccagctactcgggagcctgaggcaggagaatcgcttgaacccgggaggtggaggctgcagtgagccgagatcatgccactgcactccggcatgggggacagagcaaggctctgtcaaaaaaaaaaaaaaaaaaaaaaagaaaaaaaaaaaaaacagaaacagaaaaagaaaaaagaattagaaacatctgaatcaaattagctgccagtctcgcaaagtgtcgggtaacatcctattaagattgctgcttacacatcatctataaaatactgaaaatatcattttaagaaatcttttttttattttgagacagagttttgcacttgttgcccaggctggagtgcaatggtgcgatatcagctgactgcaacctctgccccctgggttcaagcaattctccttcctcagcctcctgagtagctgggattacaggcatgcgccaccacgcctggctaattttgtatttttagtacagacagggtttctccatattggtcaggctggtctcgaactcctgacctcaggtgatccactgaccttggcctcccaaagtgctgggattacaggtgtgagccaccatacctagccaagaaacccttatttgaaaacaagccaggcgcagtggctcatgcctataatcccagcactttgggaagccaaggcgggtggatcacttgacgtcagtagtttgagaccagcctgggcaacatgttataaccccatctctactaaaaatatatttaaaaaattagctgggtgtggtggtgggcacctgtaatcccgggttctcaggaggctgaggcaggagaatcacttgaacctgggaagtggaggttgcagtgagtggagatcatgccactgcactccagcctgggtgacaatagaaagactccatctcaaaaacaaaacaaaacaaaacaaaaaaccactaaaaaaagactccatttcaaaaacaaaactaaaaccaaaaacacaacacaaatgtagtatacaaatgaaaataattactgtgttaaacacagtttcatagaaaataaaagaccaatcaaatacaataagctgcctttttagatgggtatgttattcttcttttacagctaaagaaaccggctcagagaatgttatttgattggaccgtgttgcatctctggacagtgcagctgagatcagactttgtgtgtaactccactagcctaccagggtgcctctcataaaggtaagaaatgtaaatttggcctaatataaaaagttgccagggcagcactgggtcaattctacatacagtacttctatgttcatcaagggaaaccttaagggaaagtgaaaatgcttctagaaggtgactggacaccagcgcctttgcttgttgcctttgggctcttcttctaaggccaacagtgacctgaaattattgactgacttttccaatcaagtggacaaaatggtaccaaggtcgccaacatcagacaaattcacttgagggccttatctatgtgccttgaaagacaaaactgcttttgtaaaggatactgtatttcagaaaaacataatcatattaacaactaataagactgtaaaatgctgatgtgttgaatgctactttagaaaaacatgctcaaatctagggaaaaaatttgatacaaaactacgtatcaattatctagctagctagctagctatctagagacatgctttcactctattgctcaggatgggaagcagtgggattatcatagctcactgcagccttgagctcctggcctcaagtgatcctcctgcctcagcctcctaactagctagggccacaggtggacacagttactcctgcgtttttgtttgtttgttttgtagagacagggtttcactacattgcccaggctggtgtcaaaactttggagtctcgctatgtcgcccaggctggggtgcagtggtgcgatctccgcccaatgcaacctccgccccccgggttcaagtaattctcttttatcagcctcccaagtagctgggactacaggcatgcgccaccacgcctggctaatttttgtattttttgtagagactgggtttcaccatggccaggctggtctccaactcctgacctcaggtgatccacccgcctcggcctcccgaagtgttgggattacaggtgtcagccactgagcctggcggagcactttcttatgttattaagtagcctaacccaggtggggcgctgtccctcacgcctgtaatcccgacaactctgatggccaaggtgagaagatcgcttcaactcaggagttcgaaactgacccgggcaacatagcgaggcccccccccccaccccatctctagaaaaaaaaaatacaaaaattaggccaggtgcacaccgcgcccggctaatttttgtatcttttgtagagacggggtttcgtcatgttgcccaggctggtctcgaactcctgagcccaagccatccatcctcccgcctcggcctcccaaagtgctgggattacagtagggcccagccagcctcatgttttatttagcagtccctccctgttgcacacttggatagttttttaatttttttacacagggtttacctcaatctcgcaggctggaatgctgtgatgggatcatagctcactggagccttgaaccgttgggttcatacttgagggctggggggctgagcccccctcagctggggggagctgaggtaggactacagagatggggttgcgccatgttgctaggctgctcttggcctgaagggtcctcccgcctcggcggcgccagacatagttttctatttttgaccaacataaacactgtgctgggtctgaatttttcagctacccttcttcggctggcaacacacaggacctggcggggaggtcgctcttaccagtccccactctgacgagaagactgcccagctccaggcaccgtagggccccagtgacgtagccgaacacccacgcctctgacgtcgccagaggcccacctctatggtgtcggcgaaggcgcgccattgtgacgtcacggaaggcgcgctcttgtgacgccacggaaggcgcgctcttgcggcgtcacggaaggcgcgctcttgtgaggtcgcaggggaccgccactcacgcggagccaatcggaactcgcggcggggctgctgggtcttccaggagcgcgcttgagcggacgctgcctaccggtggccgggcgggatgtaacccgctgctgagctggcagctctgtgtcgctaggcttcggcccggccgccgccgcacataagctgcgaggaggagctttacgacttcccggtcttcggggccgggcgcagcaagggccagactctgcgctagcaggcgctgcgcgccaaccggccggcacctgtcgcagaaggtgcaaccgatcgcactgtcgcgccgaagctcctcaatggccagcgccagctgcagccccggccgcccactcgcctcayctgagcctgggtacgtgcgccccacaacacctcccccaggcagggcccggggayccccgggagcgtccccggctacctggcgccgctcatcctgggtagggtyggccccctctgaggctgccyggcatgagggagctgcacccctgagcttgacctctgacggccctttgtaatagcattaagtctttgaaactttgtagcggggtagaaggggctaggaaacgaagaaaacatctttttaaaaatataagcggtcggctgggcgaggtggcccacgcctgtaatcccagcactttgggaggtcgaggcgggtggatcacgaggacaggagttcaagaccagcctggccagcatggtttcactgaaaccccgtctctactaaaaacacaaaaattagtcgggcgtggtggcgggtgcctgtaatcccagctactcgggaggctgaggcagagaattgtttgaacccgggatgcggaggttgcagtgagcggagatcgcgccactgcactccagcctgggcaacagaccaagactccgtctaaacaaacaaatatatgtgtgtatatatatgcgatcgagcccgggaggttgagattacagtgagctgagattatataagcgatcaagcactggaggttgaggttacagtgagctgagattgcgccattgcactccagcccgtgtaacagagggagactctgtctctaaaaaattatatryaagtgagmgcttttcttccagcrctcatgctcagactgaagaaagtaattgkgccaggccyggtggctcacgcccrtaatcccagcattttggggaggcrgaggcggwggcggaagcrggtggrtcrcttgagctcaggaattccagactagtttgggcaacatggtggaaccctgtctctacaaaaatacaaaaaattagctgggcatggtggcacgcacttgtagtctccgctacttgccgggcttaggcgggaggatcgctcggctgcagcctcgacctcctggggcaatccatttcagcctcccaaagtgctgagattacaggmatgagccatcgtgmctggctttrcactatattttaatactttttttgaaaatggaaamttttacaggcaattyacttcaaactaatgataaggaagtgatgctgttctgttctgttttgttktttktktktktttttttttttcttttttgagatggggtcttgcccaggttggagtgaggtggtgcaaacaaggctcactgcagccttgaccttctggctcaaggaatccttccccgtcagcgtccccggtagctaggactacaggtgcatgctaccacgcttggctaattctttttttgaaatggagtctcactctgtctcccaggagtgcagtggtgcaatctcggctcactgcaggctggtctcaacctctgacttcggatggtccacccacttctgcatcccaaagtgctgggattacaagtgtgacccaccgcgcctggcgattttgctcattttagatactagaactttttaatttaaaattttttttttcctgagatggagtctttgtctccaggctggagtgtagtggcgtaatctcggctcactgcaacctccgcctcctgagttcaagcgattctcctgcctcagcctgccagagttgctgggactacaggtgcgcaccaccacacccaggagttcaaggctgcagtgagccatgatcgtaccactgcactccagcctgggcaacacagcgagaccctgactccacaaataaataaatcaacatcatatgatctgtaccagggtataggcaggtgctatgatccccacttttcatcctcaactctaagttgagtcatacatcaacctctagtaaaaagtggcatgctctcagtcaaaggggtaagcccaaaccacgtggagagaatcttatctcttttgagagctaatataaaaagaattcctcctaggcataaaaatattgtgacaccagttacttaggctaaacatgcctattatgctaagtgagttattaacaataaatactttaactctgtgccatgttaattatcataatctgatttataatttgttttaaccttaggttatatataccttgaagccatttatattttggtatacttgtaataattactatacactggactatgtatattggactaaacacggagagtcaaaaaagagtatgtggtcagagtagaaatcatgccctagcttccttcgtgtctacctcctaccttgagtagaagtggtagaaaaagtaattacctaagattttttggattctggtttgtggagaagcacccttatatttaggctgatgggcggcaaaattagaaagtattttttgtgatttagaattttatacagagatgttcattgtgattaattattctttgtattagcagatttttgctttttatagctgcatgatttcttgtttattattcattcattattgtctattaataaagaaaaactttatttcactgaagcagtgatatataatccaacttggatttttaaataatgactgacttttttctttgggaatacattactgttaaaaatgtaattattagatacattacttttaatgaatataagtggtataattagaaggctgaaaagaatccttggaaacgtgagtttaatttgatagctaagaaactgaggacaagatacttattctttgtagcatattttctaatgtcatttcattgtctcaccaagaaatacttgcataaagcaagttcaattacagcatctgttgaatatttaaggttgggtaaagtgggtgagtttaacagatattttcccttatttcttttaggcgaatctggaytgggaaagttgacattaatcaactcattattcctcccagatttgtattctccagagtatccgggtccttctcagagaattaaaaagcctgtacaggtctasatattggtatttttaattgatgataagctggaataatattaatacacacaaagcacgtgttgtaacttttattatgcttccttagaggtaagatgcaaatttgccctcagccagtgtaagatggtaaatatgacttcataamattaaaaaaacagaagaagtacagttaatcgaattatcttgactagaactttccaaatttgtcctaaggattctcctagagatgacactgtgacatagtaaccaattcccctggagttgtgctatgtagtatgatagtcatttgccacatgtttaaatcaattaaaattaattaaattaaaatgcaatttctcatttgctccagatatatttcaagtgctcaacagccatatgtggcaagtggctgccattttgtgcagcacatatrtgaagattttcatcattgtagaaaattgcattggacagtggagagaaaacatgattcatagaaaaactattgttatttaaatacagtgttctatattagtcagtgggataataccatatcatagttgaatggcaatagcaattctgtaagactcccaagctatatgtgatctaatttactgcttctcagtctttgctatgcattccaatcctgggtatcctgttaaatttatttcttctagtagttctgagatgggctgcctttctacatttctaacaagatcccaggtgatgctgatgctgctggatggtagatcacactttataaagcaaggggctagactctagatatgcactttttattaaatrgtacagcagcctgtagccacatgtggctattaatctttgaaatgtgggtagtctgaattgtgatgttctgcaaatataaaatatgccacagatttctaagactgagcatggaaaagaaaatctccgtaattttttatattgatcgtatactgcagtgataatattttggatgtatcgggttaaataaaattgactgatttcacctttttcctattttaaaagtggctactaagaaaattttaaattacttacatgaccgacatggtatttttatttggcagcgctgctctaagctgttgatgaaaaatattgttggtgagctctgcttaggtaatatataggacacgagcagagaggaggcacgtgaacagttctggctggagtaggcttcattgaggccrtgatgcttttagctggatttgaagaagtggtagtgatcatcccagtgcacaggataggaggacagtctatatattctgagcagtaactcatatatatcatactgcaagaccccaaaggagtaattttgtgaagtaaatcttatttctcctttttaatgtttctattttaggaattttttttttttttttttttttttagtaaccttcatagggcttgagatttcaaattacctgcaaaattctactctaaaaacttgatcctacatgcttatttattttgtgataaatattggaaattttaaacctaagcaagaaaatgaactttgaactttcttaatttgggtatctattatgaataccttcacttaagtatttatgaatttagatatgaaaggtaaaactaaccactgtccaaattaatatacagttcatttccagaaccctagtttcttccatgtgctcactcgcattcagtattacaacccccaaagataaaccccttactgactgccttctccataaatttgcctgttcttgaacgttatatacgtatacttttttgtatctgttttctttcagtgaagattatgtctgtattatttactcatgttgggtgtagttgtttttttcatcgtcgtataatactccattgtgtgaatgtatmagtatatcctttattatttattgtagataagcctttgggttttcagttttttactaacrggaacattcttgtgcatgtcttagtagacttaggcactcattgctgttgtgtgtgcataaagatataaaggtatttgagtttattttatttgatttctagtgaggttgaacatgtcttttgtactcaataacttcagatttcattaaagtcttttggtaatcttaatattttctgtcattttcttgctgatttatargagyttgaaaaatcacatttgagaagaggattggatcctagccataacataaatataagggtaattacatccatrctgagaaagatttaggaatgatagtaagttcatttgagtgagtggtttgggccaaacttgatagagaatagtctaggaagacatttactataaacggtagattaaatgttsttgcctgatgaattacatttgaactctgaatgactgaatcmctcaaactgcttatttgtattattaratgcacatttaagttatgtattacatgtctttagtggtgatcactattttatcagttcctctgtctttctttataccaagtatgactcataaacccagtattaatttgccaagagattggcatactatttgtatatatgcttttctttcaaataatctggatttccaatgcccacaatcattgatcctaaagaaaatgtgggagtaggtaaactcaaacatccctaccatcacccctggtaggaaatcactggtgtaatgtatgatattaacatctgcaccaattactsttataggtggaaccaaagttttaatcaaagaaggtggtgttcagttgctgcttacaatagttgataccccaggatttggagatgcagtggataayagtaattggtaagaaggatttgtcctcacaactttccagtgtatttggggtattggggtggttaaactttctcttcttaacattttaaaactcttcttagcaaaggtcaccaaacttcaagtaacatgacaggtttgtataccaactttgccacttatttgacaaagtttaacttcaaagttaaacaaagaagtttaacttctttgaacccatttwcttttcgataaaatggagataatacctatcataaaattgtttttaagacatattccaaaataacgtagctagatagaagaattctcattattgtaagaaatttaaaactgtttgctttaattttatccatttgtataaattctatctcaatcctaatttaaacctgatatttagaccttcagtttttccataagtcctaagtgaagaaaacaactatgaaattttagtctgaagtaattatcttagtattttataaataacttttatttttgtttgaattcacattgtttttgaggtatttttctgtcaactcttaaaactcctaagttcatcatgaagtttttatattatttaaagtaatctctcatttgaaatttgaaactgaatataattgttttcatattatgaagtgtgttattaatacacttactagtgccaataatatgctaataatttcagcaataaatattttctttcatttggaaagttttgaaataatgaataaagatttattcamcataatttatatttttgaatctttatatagaataacttgacatatcttcccttggtaaattcattttgcttatttgaaaatattgattattgtcctttaacagtcatcagttaattcatatgtagaattgcaacttaattgttttgtttatttgcattctatagctggcagcctgttatcaattacattgatattaaatttgaggactacctaaatgcagaatcgcgagtgaacagatgtcagatgcctggtaacagggtgcagtgttgtttatacttcattgctccttcaggacatgggtcagtaacctgatagttctgattcctttttgttgttgttgcttactgttacctttatgtgcatatttgagtaatctttaagtttgtgaagtacatacaactatacccattattaagtaccaaatttcatgtagaaatgtcttagttgaaaagcctttttaagtcctgtgtaagctaacagtgattttactccttagttcttcattcatgaggattttccctgcttcatggaaataaacagtgttgccaccatggtttgaggtctcagtgtggcaaatttagctttcatgttgaactaccaaataaagagaagcagccaaaccagttagacatattcaaaataaatccaaagatgctatttattataagtctcataagagatggttatcaaaagcacttgcatgccaatgttttcttgtgccatttctttctgcaagaaatctgtttggcttctgtttcaccttagctgtcatagacatgtcgtttaagtatcatattgtcagtactaaccttttgtttattaggacataagatctaagaatctagacattaatctgatgtgattgttctgtttgttatagttagcctgtactccctttttttgttctttgtacttcccctttcattttgagtacatatatgtgtcatttgtaactgcagatttttccaattattcttcctcagtcttttcctttgggtaagtaactcagcatacataattcagccacctggtaattgtaacgccaccatctctccactaaaagaactgtagtagcatcaggctaaatagcattaagttatctaacacattacagtagagtaaaccaattccttcaggtatacttttctcttccatttttggcttctcactctcttttttttgtttgtttttatagatgggtcaatgcccattatcactctagatggataagggagccttaattatatacttatatttttgcactgtcagattggagtgggrtaaaaatgtttcttcttttatgtctaatactcttttttttttttttttttgctgkgccgtagaccattacataactgaagactcccaccttcaggcaggattgggtagtacgtgtttgtaactacctggcattgccttttgttgaggtaatttcagtttttattattattagtagtagtagtatactttaagttctacggtatatcttcacaatgtgcaggtttgttacatatgtatacatgtgccatgtttgtttgctgcacccattaactggtcatttacattaggtatttctcctaatactatccctcctccatcccccaccccacgacaggccctagtgtatgatatttcccgccctgtgtccaggtgttctcattgttcaattcccacctatgagtgagaaacacctatgcggtgtttgggtttctgtccttgcgatagtttgctcagaatgatggtttccagcttcatccatgtccctgcaaaggacatgaactcatccttttttatggctgcatagtattccatggtgtatatgtgccacattttcttaatccagtctatcattttatggtgttctcagtttacatatttaaatcactaaactgactatttgacttaaaaggctcaaaaaaagtcatctcaaaaatacaacacactgcataaccttttataagtatttgtgtagcttcttgaatttatatttttaaatcattctcatttaacttgtcagggccttttcctgaaagccagcagagtgaaatcttaacctgcagttaagccaataaaatttgtcagcttataaccaattttattattttagattttctggactctctccaactatagtaattctcatgaaatcacattcctgccatccccttggggaaaattttatttcttaaaattgcatgggaaatgagagcttttttaaaagaaaaaaatttttatattcaaatgagatgtagtggctttgtgccatttcttatttgtcacaaggggtaagatgtttaaaattgctatatcttatatataaaaatgtacctttgaataatttctcagtttaactatttttagaaatggagcaaagttttgcccattggtacatgatattgtggattaagtgaaagaatatgaggctgggcgcggtggctcacgcctgtaatcccagcattttgagaggcttaggcaggcggatcacctgaggtcgagagttcgagaccagcctgaccaacatggagcaaccccgtgtctactaaaaatacaaaattagctggccgtggtggcgcatgcctgtaatcccagctaatagggaggctgagtcaggacagttgcttgaatctgggaggtggaggttgcggtgagccgagatcacaccattgcactccagcctgggcaacaagagtgaaactccatctcaaaaaaaaaagaatatgacacagaattttatgtatagagttccaggtaccctgctcactacagactgaaattctrtgcagtctaacaaatgaatcagagcctttccatcttgtctgggtagtccctagattccctttttagagggttttgtttttagagtgattataaattcgtccaacagtgcactttcagtgccttctacctccctctaccaagtatgaactgcatgcatggctgatttatgatttcggctattatcgcttcatgtgcgttgttcactattttgtaactgttattaaagtaaaatactgacttggaacatgaattttaaaatggtgttttatccttctagtattgattcccagttttagaaaaattggtgtcatccagtgagttttatacagaaggattttttcccttagaaatatatacatacatacaaaaaaaatttgtcattttccctgtagttgtttattatgctgtagaatttgaggctaaatagtcttttctctctactgtgggtttaccttctagaaatgataaaggattttctattgctaaaaaacaagatttaaaaactaaatttgttgatgaaaagactagccaatataaatctaaatggacagagggaaaaaattcacccagaatgtaatacacatgtgaactaaatgttttctgttgctgacgttttgtaggcttctgaaatttaatgagacttttacaaggtttaccttttttcctaaagtttaatttttaaactgacttaaatgttttttgaccctttggttatatttaagaagttgacttctctaatttccttgtcatgtttatttttaaatatctttctctttaaaagttgggatactataataaatattcagcaagtattttgcatttaaatataaaatcttgttatttggattttaatactttatattaaatgcctttaagatttattaaaattttrgattaactgaactctgcttttttgtcactggattaataagcaggcttgtatctgacataatagcttaataaggcagtgacaatttaaatttgtcatgagtataaattgaaaaatcataatttagaaatcggagattgaatatttcatggcatttatatttagtgttttatataatgattaatgaaaagaaggaaaacttaaattttttttcaaagatggrtaggttcaggccagatgcagtggcttactyctctaatcccagcactttggggaccaaggcaggaggattgcttgaggccrtagactaggcaacatagtgagatcctgtctctacaaaaaattaaaaaattaaytggggctgggcgcagtggctcaygcctgtaatcctaacactttgggaggctgaggcaggtggatcacctgaagtcaggagttcaagaccagcctggccaacatggtaaaacctcgtctgcactaaaaatacaaaaattagccgggtgtggtggtggatgcctgtaatcccagctactcgggaggctgagacaggagaatcacttgaacccgggaggcggaggttgcagtgagccaagattgtgccactgaactgcagactgggcaataagagcgaaactcaaaaaaaaaaaattagttgggcatgggggtgcactcctgtagtcctagctactcaggagtcgaagtggaagaattggaggctatggtgagctatgactamgccacttcctcaaatataaggaagaatataatctgactaaaggattgtctttaaatttaaaaaacttagccttatgaaaacttattacattgtcctcattttgacatagatcagtaaaaagttcattgaagcctgacatttgcagtccrctggaccagatgacctttaatgttctttctaagattcaattgctatgaatttggaaccttgctacaggatacccagtattcatttgtttgtctgttatagtgcattggagtgtattcttatttttgtttaastaaatgtacattgggcatctctcatatcacaggtgaatctccccagtgatagacaaagacatttaaaatatttaggagtaataatggcccacaaacgaggtaatkgtgaaagaagacatgtggatcaatgtgtgttgaaggaagtgttacatatagggacaactttgaggtacatttggggacttaagaagtgaattctggaaataggtagcatttatgtagtagtttaaaaaatatctgatgctgggaaatcactccacctactccctgcaaaatgccccaaaccttttgtttctgatgtacatggtaggcattcagtaagtttagtaaatgtacttttctgaaggtgactgtaagtttactcatctatggctgttacggatttacactagtagtgcttatgaagaccactgaacttctttcttaagatcaggcagaaggttttttcaaggtgatccagagaaggaaattcactttatgttgcatttctgtagtgttctaccaaatccaaatgcatttactctttatgatgaggtagtttgagtttttaatttatatttattgagtgcctactatggccagattttggggatatctcaraaaacaaagttccttttcctatgattgaaactaatagcaaacaaatatgtaatattgttagtagtattacagtaaacaaaaatgaagcaggataaaagggtagagaataataagaataataattcagatagggtcagggtgtctttgacgaggtgatattttagcacaatccagagggggaatagcattccagctagagagaatagyaagcacaaaggcattcttgaattcttcccctgatgagataattgctgcagtgagtgggtccgtaactttttgtgtgttacgcactgtactttcttacattttggactattggcatttgctaaaatattcctttgaccagttccattctctgattttaccttgaaaaacaagcccctgctttttatgatagctctttttcttgttttccttctctgatttttaggttgctaaatgtgatttgcatactttatcacttaatctcgcttagtcttgtcaacaaccttatagtggtaggtgtcttatttatcagatgaagaagtagagtttaagttactttctcaagcttatcaagtattagaaaaactgggattctaatctctctgttgtatcacttttttctgtcttgcatgacttctcttctatcactgtttgtgggcagtatttcctcacggaagtaggccttggccagttcttttcaatcaactgttaatctctgagctctagctccatctatatcttaagtctgggctctaggtctgtgctttggtgtggaattttgaacttctcacatctctactcttagctcatgcctctaaacccaatacatccaaaactgatgtttgttcacaaactgacttcattttataacatttccacttattcaatggrataaccattcttctggtccctgmtaaccaaaacaytggaatagtctttgatttctctctctttcttcatcctccacatcttatcagtycccaggaactgtggtcttggtttcaagtgtccattctggttgctactattctgatgaatggatttcatcacttgatacctgaactttttcactggtcttctattgagctctatgtattctctcctcatccttcagtccccacactgttttaaccctccaacatcttagagtcatgtgaagtgacttatcaaaaccagagactcaggcagtcacagcccttcatcattttatcttatcctatatatccaagatcatcatgtgcttttaaaactctcccttgtccacaagccaggattctccagccttttcctatgcttctcttcttctctcccctgttacaacaacttgaagttcctccaaggccccattggagccccatctccttcaccaagtctttcctctttactccaactcattccagctcatcgttgcattcctatggtgtttgtcactgcacctatgtactgacttgtgccattccttagtggtttcccatgtaccttcctgtttagatggtaaatggaggaagatctcaattcagccttcctaatgtttcttacccttcttagtacatggcatgcagtgggcatctaggcagcacttaaatacttaatttattggctttggtcattttgaatattgctattaactttgaattgaatgttgcaattaaaaatgaaggccaataagatccataaaaatatatctgcatattcaatttagatcctgaactcaacaattttcttctaaactttgtttatattcatatagtgcctagtgcctatacagctccctgagataggtaggtgaggtattactatctttgactttcatattacatttcacatcagacatatttgtgaaataaattttataagtagtctgaagcccagagaggctaagtgactaatccagggtctcttggttagtatttggcatagacagaactacaattttgggcttctttctcattctggttctcatctagtaccttttcatttgagtgctggaaaatgtatcccagtcaactgaattgtggagtcatattgcctcccccttaccaaccaagtgatggcartactaggaagaggggcaaaagaaaagtcagaaatataagtgataaaataaatggaaatgtttgaaatggatcatcgacctccttttacctattttagcacctcacaaatatcccactctracagtgctttgttagttatttataaaatattccttaggagattggtcttgcataagacatgcttttaccgtggtccttttcccggtaatagtcactgtcagggacaaaaagtgcctgattgtgttctgtttgtcatgtaggtgggagggaaagagggagagaaagctgagttgaactgaagcagagctttttacagctctattgttytactgtcagagagcaattatactccaacttccatccacctcagacatcccaacctcctcctcctgccaatgcttccccacacacttaacatacagccacacaaccgagttctctggggagaatagggtgcttttaatacctccctctgcccttcagtgagttcagggctctgctttttaactgctaatgtattttagtaaagtttggcaattcaagcttttctagatgtttccttttcggctctggaaaattggaaaaaataatttttaactatatatatttaaaatattcagtggcattatgatattgtctgaaaggcattctgtgacttgatgcaagatcagaagttttttttctttcttggagaagtaataaaaagaaaaaagagatcgaagtttttatctcacaagatacctcatattcagttctacrtactgaagacctaatccaagttcttacatgtctatagggcaaatgttaacatttttaaaaagctatatttatttggtaatatgaacatatgtttgtagattagttagtctactctttccatacctaataaaagtttaaattccagacatgtgaagaaaatttgcagtgtgtctctttgccttagctaactgcaaaaattgaaatcacaaccctaccatagacccaaacgtgtttccaattgagaaagtcttctaccttcacagcctctaagtaatatagtggttatttgtttgaaggatgtgagagtattttgttgagaaactgtagaatgacataacaaattttagttaaaatgttagttatggttgactctgtacttctgatatcctggatttgtatatgagagcaatgctagtaagatgcctgcttctgaatgcaagtttggctgggaagacagcagagaaatrgaagaaatattataaagtaatggagaaacctcaaaacagtacagcatggatgttgactttgaaaacaacagctgctgacgtgaacttggcagaaatttgtgagtaatagtgggtgactcattgcaagcaggggagtcttgcagcttttgaggtgaacaggcaaaggggagaacagtgatggtggccacccaagggccaagtgtttatgtcctaaatgtcaaaatgtctttgatctcctgttaaactttgcagctgcatcattcacatgaatagttgcatttttttttttctaaaaatgcaacatattttctaaagcatttgtttttaatctgggatgattctgaggtgggaggtaagttggtggcaggayataytacatgatttttgttattgttattatttttaaaaatcacgcattgctggctttcccctatactcctggagatgccatcatgtatgtatagctaattctaaaaagggcttgtgtgactcttcatatgagaaggggtggttatttgtggcttgaaaaaattgcttgggtgattctgatctttctctttcactctgctgaaaaccattgtttcaaagccaataataaatatctaaagaagttttacttcatttctgtggtgttctcagaattgttacagtaggtttaaacctttgcctggtttggaaatcttgactatttgagggagacagccctgttagagtctttattttcttcctgtctgagaattcagttatcatcaatagtgtattcttaggcagagtcagaaagtcacctcatctgagaagccacctgtgtccacagctgggaatttgyagaagtcagtcactgaaggaaggctttaggatatttatgataaaacatagcagtacactgggatccaaaccctgggaaacctcaactattttagagtatgtgttgataacaataggctattggataattgccagactacttgaggagtctaagagttggataaagacttaaaggtgaaaggaacttggaaaaatatcctcttcaggtattttaagggaggcagttctcagaatgagaagcttttctggaaaaggttagcactttgcttcagaagagaagyagggcaaaggtgtaattcttcatttaatgtagtacaacctaaagggtaaaccttaacctctcacttacacacatacccrcacacttacattcttttgatcagatttgtattttagaaggcttcatttgtcgccaaatgtgggtgatacttgagggaccccttggaggagaaggctaattagatattactgtaaccttgctgagaaatgactgaaactaagatggtagaagtgagattggagaaaagagaaccacagaaatgtggcaacacactaggtggctgtcagagatttgattagcaaacaagacagtagatgtcagctgtgttagatgggtgtgtatctcccaagagcatcggggcacagaattcccttttcaactagcttatctatatgggatatcaactattgaaatacagataaagtcccctaatggcatcctgtccatcagagattgaaatttgcttcagtaaatgtgtctatccttttcaataggaatttgcctcttaartcatctcacatttgtttaagtaggatcactctctttagtaacttaaattgactttttaatatctacgtttattcattcatccatccttttctacccataagtcgaacaggcacaatttatggagtttaaatgaaatawaaattgtttttcatctttatctttcactaggagaagttttattcctgggcctgcattaaaaacctaggcagccctatgatttttctggtcattcaagtaataaatgttttatcagagcctctgagttgcacaactccagggggcaacatttgcattgtaatctttataaatggagtctcctggagcccagcttcaatagattgtaatgggatggtgcccctatagttttgcaacatagtccttgtggcctaagttcactttaatataaaaaaatcagtcttaattcagtatttactatatttgtctaatatattcaaaattaagagttctcctccccagcccactacctagctgtaggcaggccccaagacctggctgtaggcaggccagcagtcttcaaggaagaatatgccataaaccttcatgcttaacccctctaggattggagggtagggtaaagagcagagagttaggggccctgcaaccacccaggctctcartctaactctccaagtgtggcagtgcctcagtttcagttggccactctctgtgcccttcaatttctgtcttgcaagagtatatcccaaagccatttatttctaggttgcctcagccctcacagactacactcttggacagaaaacctctttaaataaccctaggctgatatttctacctcttgttcttcatctagtccctagaattcacatacttttgacccactattaaaacagcatacactaccttcctggtctccyacctctatcctgctgtygtaggctgctttatcaggctctgataagggtcaggcattaccttgtatgcccccagtcagggctgtgactagagtggaattagtaatacatgtcttttgagtgcaaaatttaagaaagtaccagaaaactcagtaattaagatgaacatgtctttttttttttttttttttttgagatggaatcttactctgtttcccaggctgaagtgcagtggcacagtctcagctcactgcaaccaccacctcctgggttcaagcgattctcctgcctcagcctcccaagtagctaggattacaggcacaccatgcctaactaatttttgtatttgtagtacagacgggattttgccatgttggccaggctggtcttgaacttgcaacctcaggtgatctgcccacttcggcctcccaaagtgctgggatcacaggtgtgagccactgtgccyggccaagataaacataccttaagaaaatttttaaaaataattattaatataaaaaaccatgatgaacaagataccaaaaatttaaatacaagattgtgcaggaaatacttatggagttcagtgactatcttgaaatgtagtacatacaaccatcatcactgttccttcacagtacatttatttttccactgaaataatcctcacaaaattctctcaattaccataatcttacatatctatgttgtgggtattagaacttaatatcagtcaccatccttgaaatttaggctctctggtccaacryttcactttgaaatgtattttgtatattgttgtatcagtcaaaatttccaatttaaattatagttatccatccatccatccatccatccatccatctgtccatttatttattgggtttgtgtatgaaggagaaaaaatagaatcttcaaatgctaatgattaatccattttaacgactataaaatggaaatgtgtacagttacaaaggcatactaagttggtctgcctcatcaaataggcctgggcaaaaattggtaggtaaaattaaagggaatcacagtgcattttactctcatgatctctgttagaaatgtcccactaaacatgttacgttaccaactcttctattatgccctcatctctacctctatagatttagcctttgtgagctattctgaaacagcttattccacagcttctggtcaatttttagacaatgtaaatagagatccaccttcagatatagactggtgagtctggtcttgttcagagaacaattaaggaccttcaagctagtgaattgtcaattcctttgtaaaaagtgttttattaaccttcagctaccttggaggtagttgttgacagagcattatattaaaacttgtattaaagaatacagatatgcattgtattagaggctttaggacttttttcaaaacgaaccttgaaaaacttcttcaattttttttttttaaaagctgttctattaaagggataatatagtgaataaatatttgttgtctgtttaacttaccttatgtagagctattggctctaaggattttgaaaggacaacaataattctctaaaaataattcaggcacctttggccatttgtgtaaccaggtacaaattaccacgtttcccagtttcccccttgagtccaactgtaatgtattgttctgtaaagtatagtccagttgtcagctctgtttgccttggtcaattgaatgatcctcctccttaagcttagcctatagtgcatttggcttaataaatgaaactgtaacatgccagccacacaatagaggattttatagaactgtttctgcttggaatactataattggaatttgagttaactataattaaaaaagctttcatagcccatggtatatgaactctgaaaccccaaataccaaaatcctactatataaaaatgatccacatactaaaaaaaaaaaaaaaaaaccagacacayaaatcgagtttaatttcgtatcatgctattttcctaaaatatagtttctaaagttattgcaaattagttcctgmtgcttggtaaaataccatatttaaacttaattacaactgccttcctgcaatgaagggccaactttttcaaataatgtgttacagcccagtgactctagggagtctatggtcccattgctgcaaatgagcagatcggtgaaaacaaaaacatattaagaagtccacatttctaacaaayaccttgcaaagaataaaatggtaatttaaggaatatgtccacttaatatacatttcatgtatataggacacataatacaataaataccctttttactacccccaatttaagaagtagactagtataatagaaggcatatctccttggtactcagtatttctaaaaggcagtaatggctgtctcctctaagcacctgagatgatatgcctctgtgcactctagccttagaaatatgcttatctcctgcaggcagagcatgctggaagtgccagggagttaaggttaccaggaacagccctcaactaataatgaggaaaagcttgtggataaatatccaagccccctgccttcaggtaggaacactgatattttattagattggtgcaaaaataattgcggttatatagtctcaaagaggaaacagtctccacgtgaaatcgagccccagttgtccacagtaataacccgcttattaacttagcctatatggatttactttcttctcatctgtcttctctgctttcgcagggaaataagtagttcactagtgtttcctgtgataacctcctgaataaactacttatgctcaaatccttatgttggggttttcttctggaggaattgccaaactgttgaagttccctgtgttcatccccaatctcagctctgtccgtctccccaccaagagttactgttttgattttttgtgtttcttgttcctttcctgtttgtaataattatactaatatattaaaaatattagtaactacactggtttgctataataaggtatatcttcccccagaatataaagtccttggagactttccctaaagagtctagaccttgaccattatgcgcttcccaagctgtggctgctgcatttcacattttctttcaaaattgggcaaggaattactaaaagatgctccagtagatcatctgggtaccaaacatatttctttctgtacccagtgtagaatagcaaccctacttttttatgatgctctgggtcagttactcttgccaggatagtgacttctttccttggtctctcagcacacagaccccaaagtgactgtgtagcagccacagcttaagtttaatggaatttctgctgtgtctgctgaaggaagcatttcctttaaaaaataggatttctaactcacagagcccagagttgagggagcgagaagtgatggcaaaaggacaatttctgctgttaccctttagtttccagatccatgtatttggtctgttgaagacagactaccatataatgattagtaataggtgtatacttcatcttggaggatgcagccctacccttgaagtatatcagctccaatcttgttcttcagctgtcccttcaaaaggccagcttctgggctatgtggcaggttataaatccagtggatcttatgatcatgtacccaggggtgtactgcttttgctctgagttctttggtctgatgtgatgtcacacaggattccrtaacaatggatcaaacactctgtagcccccagatgctgaggctttgccagcaggaaaggcaaaaccataccctcaaaatgtgtctgttccagtcaagcttaattgcaaccccttctagggtaggacaggctgaaaataatcaacaggccagagatctcctccagggatgatgttattaggagctcatcgttggtctcatttggacatttgacagaggcagcactgtatcagcttggagtgggaatccacggacccatgcatagccttcatccctctatcatgactgtttattcgtgtgacttagttttgtcccagactgaaactctaacagtctagataagaacctrtctttcataatatgagttggatccctattccatactacccctaggcctgccttgatgcatgtctggactgataaattattttctttattaatttatttattgagacaggttctcactctgtcacccaggctgagtgcagtgatcatggctcactgcaatctctgccttctaggctgaggcaatactccacctcagtcccaagtagctggaactataggcacgtgccaccatgccagcctaattttttattttttgtaaagacagggtcttgttctgttgcccaggctggtctcaaactcctgggctcaaacagtcctcccacttcggcctcccaaagtgctgagattacaaaygtgagccatcaggcctggccttatttctttaaatttaatctgcctacaattttwaaaaattatgcattcttgacaaaattgtatttaggcatttttttaaacaaatatttatttctccttcattagcaagataaacactgttaatttatagcttttcctataaatttcatttctcctattctttggaataatcccacaatcattaagccttgtttctgacatggagagatgagggcagattttttttttccttttttagatttgttgtgttaattaaatcttatggtgctataacatgcagtggttaaaagggttggagaaatcaccttgttcaaattatagtagaaaatttatagctaattgaatgacctgaggccggttacttgacctctttggcctccagttttatcatatctaaaggacaataatgtatatctcagagggtttttgcagagattgaaaatgtatgaaatgcctaacacagtagcatatacctggtttggttatttctggttacaaaaccaagcctcacagtgtgtaaccaaatgggaattccatttctattagagcatactttcattttgagagccttgataggccaggggagacaggaaagtcaaagttttgaaattttctttcaccagtgactcccatagacttgattatggtcagagtgtcatacaaatctaggctatacacagacatgtttccaagctaaagtgataagatgtctaaaagaaatatttcttagtctgtgttgaattaatgctgcagaaggtcatgggtgagtgaattactttcagaagggaggaagcaatagcaatagtgagcaaactgtgtatgaggagaccctatgaagcaagggcattctgtattgaatattgcaactcaaggaccaattcaaggttccttcttgggaacttttatagagagacacagaccataaaagaagggtacagaaattaagatgttgagagaaacaatactaccatgccagtttacatgcaaagagctacttctgtcttttggttcagatgggaactatgggaatgaaagctgctagtgttttgtggaatcttttccagaatatttttattgtttttctcctatgctgattatgaaatcaatataggcttatctcagaaaaatcagaatatgtagaaaagcaaaaacaactccaacaaaatcacaaaaaattttctccattcagagatagccattattagcaacttgtctatccaatcatatcctttttttaattaaaaaagttctatataataggattttgtaatctgtttttttcactaaatactgtcatctcartagagcttatttttacatgattttgaaatatgcctgcatggtattcttctataggaatgtattgtaatttatttaattagtcctctaagggatgggcatttatatcatttgaaacttccattattataactttgtacaggttttttttaatccacatctttaattatttactgatgagaaactcttagagttgatttgttggagaaatagccatggtacagtcagctctctcacagatgagggtgagtgttcctacctctaggatgtgtcagaacaccctggctgcctacaagtgctctcctcctatttcatttcagattgtttgctctgccctggcatgcaataccctgggttaatgttgcctaggaactctgctctgtaggactggattctatcaccarattgttttgcaaatagcttataaaaagaaagataaaattgtagttgacaaatacaaagtgaggtattctgtaatggttaaataaacccccaatggggaataatagatacatattctaggaagaaaggagtttgtttccacaagggattagtttggctcacttgaaaatgattaaacaaacttcacagaaaatcattctcctgatttagaccatcacaaatgaatgattaactggctgaactatcactgaggttatatatcaagcttgtatatatatcaactctgttatgtatcaagcttgttcagggcaaaggaaagagcacttagaggattatactgaagcaagcagattgctctctgattacctctgtaaaatcagattacctctgtaaaatcagattacctctgattatactgaagcaagcagcaagtgctctctgattacctctgtaaaagggttcaccttagtctttttttccctcatgtaagagataatggaagaacactgatgctggacttctgtttaactgggatgtatggtgatagtatagagaaaggagatttcaatggaaaaagaggaatagacaacataaaaaagggtaattcatgagaaaattcctgactcagctgtctttgttagatgatagaagtgcataacagttctctcttaatacagcataattagtatgtatggtttgcacgctaagaaagatggcacaggtgatgtctacactgtaatctccattgatatctgggtagcaacccacagcaaaagacttaaagtgacttttctctcagagatggccaattagcatatgggccctttctactgtgaacacacagtagttaggagagtatggactttggagccacacccaagttcgtattccagctatgcctcttacaaactgtgtgatttggagtagtaactaaccatctctgccttgttttcctttctaaaaaatgggtgtaaaatcacctacctaatgcagttatcatgaagatcaaatgagttaatgtatggaaaggggtggcacatagttactcctcagtaatgttggcctcattccctctccctgctttctgtaatgcagagaattatcttctggtaacttcattgaaaaggcctctttaggcatgaaatcacctgccagctgtgctgaggacaggcttcacagagctcctggaggctaattaaggtgcagagttcagagcagaaagatgcttcactatacctgtggcaggatggccaccagggcctgttccctggccagagtaagcactctttccctagggatttggaacagccccattctcacctggtgtttaccccaggttttgaagagattccaaactagagcagcaagcaaagtctagagctgactggggaaccagccctaccctggatattggcctctgatgaaagcaccactaaacctcaccttctctcctaaatctcttcagaaatgcttactctctgtgatagacatggaacagattgttttgcctcagggatttattgattgattttgccaaagtctttcccaaggctcctttcaaaactggactgatcccttggttctgggaatgagtggtgaacatcagacctctggaatggtggctggtcaatgtctttgccctctcaagttgctcttgaatgttgattcaactcattaggacatacttggatgatgaattagaaggagcatctttgccctctacttacagatcctaggaacaatttgtggaattatcagtaagcaatatctgtaacagataaaatgtctgctttccctttgcccctcttagcctatgacatgccacatccaatttgtcttcgttccaactgtgagaggtcttaatttcatcattctggccttttgcagttaaatgttctccaaggatatgatctatggggagaggactgatagtggaactaatctttcaargttctgcttaagcaattgtagataacataggagaagaaactctggaaacaattatgattatcctagttctgcccctgtggaaattcaatccgaaacccttcatgtttttgcttctctcttctctacatggatggaatatgttatacttttttgagctgaaaaatctaaataattagaaaaagacaaagttgtaatgagttttctgtttaaacttataggaccctttctaataaaagtgttattktaatcattgaatcgttagttaactgctttgtatggttatgtcttgtctctctttaatccagggactgcaagcaactaggcaaaaaactaacaaaaaaaccaatgttttataagagtggttctcaaactttaaagtgctgattaaagcacagattgcccaggcctcaccctcagtagatgggtatggggcccaagaactttcaacaggagatgctgctgctgcagcttgtctaagaactacacttggaaaattactaatttgtgtaataaatacctgaccatttggaatccttagaggatggaaatattttgtaatgctgtgtgcaagatttgatatagaaaaacttgggttcaagtggcaattcagcagattacaagaggtgaaacaactgagtttctgagactcagttttattatctgaaagtcaggaatgaaaataatgcctatgtggcagaactgctataaagatcagacaaggtcgtgtatgggaaaggccttggtaaatggaaaagcacaatctaagtgtaacttattctagatgtgttttcaataggcaagttttatatacctaagactaaaagcttgcattttaatccctgggattgaaatctttcaccatcatcaccatgatggtaataacaacaataacaatactagtgcactatttattgtattttctgcaatgggcacttaatatgttttgattatatatttcaaaaacctcataaaatctattttatcatgtatattatttgcttacctaagagwgtactggacagaatttaaatttttcttgagggcttagggcagtgcagttcttagggtgtgtgatgtctctgtctatatagatgatttgatttaaaaatgtgttatatgtgatacatttataacggaatattttttgctaaaaagaaatgagctaccaagctataaaaagatatagaggamccttggatgcatttttctaagttaaagaagccaatctgaaaaggctataaaactgtatgatttccaccatatgacactctggaaaaggcaaaactatggagatattaaaaagatcagtggttgtcaggggttaaaggggaggaagggataaataggcagagcacagatgtttagggcagtgaattattctgtatgattcatattggtggatccatggtcattatacatttgtcaaaactcatagagtgtgcaacatcaagagtgaactctaatgtaaactatggactatgggtgataatgatgtgtcaacataggtacattaattataacaaatataccactctggtgcccagtgttaatactgggggaactgatgtgtgtagaggacaatggtatatgggaactttctgtaattttgggaactgaaaactgctcttaaaagaataaagtgtattaaaaaggatcacaccaaaaaatgaattgcaaaattcatgacctcatgtgaaagatagtgactgtggtagatagaataatggcccctaaagatgaccacatcctagtccttggaacctgtgaatctgctactttacttggtaaaaggggctctacagatatgattaagttaaggattttgagatgggaaggtcatcctggattatctgagtgggtgcagtgtaatcacaagggtcctttaaagatggaggcagactgtcagaggaattggcacaaaagcagaggtcacacacacacacggggggatagagagagagagagagagagaggaagatgttacactgctggctttaaagatggaggaagtggctattaagtcaagcaaggcatgcaacctcaaaagctccaaaaaacaaggaaatgaccttcagaaggaattcaaccttatattccttgctgacccattttagacttttgactatctgaactttaagttaataaagtgctgttgttttaagccaataaattggtggttatttgttacatcagcaataggaaactggkataatgatttttcaatgaaaatttagacaagattagaaaaaaaagaataaaaaggaacaaacaaagcctccgagaactatgggactgtgtaaatagaccaaacctatgactaattggagtacctgaaagagatagggagaatggatcaaagttggaaaacacactgtaggatatccttcaggagaacttccccaacctagcaagacagacaattttcaaatttgggaaatccagagaaccccaataagatactccttgaaaagatctaccccaagacacataatcatcagattctccaaggctgagatggaggaaaaattgttaaggtcagccagagagaaaggccaggtcacctacaaagggaaacacatcagactaacagcggacctctcagcagaaaccctgcaagccagacgagattggggggcaatattcaacagtcttaaagaaaagaaattccaacccagaatttcatatccagccacattaagcttcataaacaaaggagaaataaaatcttttttcagacaagcaaatgctggggtattttgtcaccaccagagacctgtcttgcaagagctcctgaaagaagcattaaacatggataggaaaaaccattaccagccactacaaaaatacattgaagtacacagaccaatgacactatgaagcagctacattaacaagtctgcagaattaaccagccagcattatgatgacaggatcaaattcacacataacaatattaaccttaaatgtaaatgggctaaataccccaattaaaggattcagaatggcaagctggatacaaagacaagacccatcactgtgctgtattcaagagacacatctcatgtgcaaagatgcacatagactcaaaataaaggaatggagaaaaatttaccaagcaaatggaaagcataaaaaagcaggggttgcaatcctagtttctaacaaaattttttttgactttaaaccaaaatttttttgactttaaaccaacaaaggtcaaaaaagacaaagaagggcgttacataatgttaaagggttcaattcaacaagaagaggtaactatcctaaatatatatgcacccaatacagaagcacccagatttataaaacaagttcttagagacctacraagagacttagacccccacataataatagtgggagactttaataccccactgtcaatattagatgggtcaatgagacagaaaattaatagtttagactgatcaatgagacagaaaattaacaaagatattcagggcttgaactcagctctagaacaagtggacctgataggtatctacaswactctccacctaaaggcaacagaatatacattttttttgacgtcacatggcacttactctaaaattaatcacataattggaagtaaagcactcctcagcaaatgcaaaagaactgaaataataacagtctctcagaccacagcacaatcaaattagaactcaagattaaaaagcccactcaaaaccacacaactacatggaaattgagcaatctgctcctgaatgaatgactcctgggtaaataatgacattaaggcagaaatcaagaagttctttgaaatcaatgagaacaaagaaacaatgtatcagaacctctgggatgcaggtaaagcagtgttaagaaggaaatttatagcactaaatacccacataaaaaatctagaaagatctcgaattgacaccctaacatcacaactaaaagaactagagaatgaagagcaaacaaatcccagagctagcagaagacaagaagtaactaagctcagagtggaactgaaggagataagagtcatgaaaaacccttccaaaaaaatcaatgcatcccgtagctgttttttttttaaaatcaatgaaatagaccaccagcgagactaataaagaagaaaagagagaagatttcaaataaacaccatcagaaacgataaaggggataccactactgacgccacagaaatacaaccaaccatcagataataccataagcacctctatgcaaataaactggaaaatctagaagaatggataaattcctgcactcataaacaccctacaaagactgaaccaggaagaagttgaatccctgaatagaccaataacaagtcctgaaattgaggcagtaataaatggcctaccaatcaaaaaaagcccagctcccgatggatttacagctgaattccaccagaggcacaaagaggacctggtaccattctgaaacgattccaaacaattaaaaaggagagatatctccctaacccattttatgaggccagcatcttcctgataccaaaacctgatggagatacaacaaaaaaagaaaactgcaggccaatatccctgatgaacatcagtgcaaaaatcctcagtaaaatactggcaaattgaatccagcagcacatcaaaaaacatccaccatgatcaagttggcttcatccccgggatgcaaggctggttcaacatacacaaatcaatacatgtcattcatcacataaacagaactaaagataaaaaccacatgattatctcaataggtgcacaaaaggtcttcaataaaattcaacatcccttcatgttaaaaactctcaataaactacgtattgaaagaacatacctcaaaataataagagccatttatgataaacccacagccagcatcatactgaatgggcaaaagctggaagcattccccttgaaaactggcacaaggcaaggataccctctctcactagtcttattcaatgtagtattggaagttctggccagggcaattaggcaagagaaagaaataaagcgtattcaaataggaagagaggaagtcaaattttctttgtttgcagatgacatgatcctatatctcgaaaaccccatcatttcagcccaaaagcttcttaagctgataagcaacgtcagcaaagtctcaagatacaaagtcaatgtgcagaagtcacaagcattcctatacaccaacaacagacaagaagaaatgcaaatcatgaatgaactcccattcacaattgccacaaagagaataaaatacttaggaatacagctaacaaaggaagtgaaagacctcttcaaggagaactacaaaccactgcttatagaaatcaaagaggacacaagcagatggaaaaacatccaatgctcatggataggaagaatcaatatcatgaaaatggccatactgcccaaaggaatttatagattcaatgctattcccattaaactaccatcgacattcttcacagaattagaaaagactaatttaaaattcatatggaaccaaaaaacagttcacattgccaagacaatcctaagcaaaaagaagaaagctggaggtatcacactatccaacttcaaactatactacaagtccacagtaaaaaaaaaaaaataaaaccagcatggtactggtacaaaaacaggcacatagaccaaaggaacagcatgcagagctcagaaataaaactgcacatctacaaccatctgctcttcaacaaacctgacaaaaacaagaatggggaaagcactccctattttaaaaatggtactgggagaactggctagccatatgcagaaaattgaaactggatcccttccttacaccctatacaaaagctaactcaagatggattaaggacttaaatgtaaaacccaaaactataagaaccctagaagaaaatctaggcaatactattcagaacataggcatgggcaaagactttataatgaaattgccraaagcaattaaaacaaaagcagaaattgacaaatggaatttaattaaactaaagagcttctgcacagcaaattaaactattatcagaccagacagacagcctacagaatgggagaaaatttttgcaatctctccatctgacaaagggtgaatatcaagaatctacaaggaacataagcaaatttacaagaaaaaaaacaaccccattaaaaagtgggcaaaggatttgaacagacacttctcaaaaacagatactgcagccagcaaacatgaaaaatagctcaacatcactgatcattagacagaggcaaatcaaaaccacaatgagatactacctcacgccagtcagaatagcaatgattaaaatgtcatgaaacaacaaatgctggtgaggttgcggagaaataggaacacttttacactgttggtgggaatgtaaattagctcaaacattgtggaagacagtgtggcaattcctcaaagatttagaaccagaaatatcatttgacccagtaatcccattacagggtatatacccaaaggaatataaatcattctattgtaaagatccatgcacgcgtatgttcattgcatcactattcacaacagcaaagacgtggaatcaacccaagtgcccatcaatgatagactggataaagaaaatgtggtacatatacatcatggaatactatgaagccataaaaaggaatgagatcatgtcctttgtagggacatggacgaagctggaagctgctattctctgaaaactaatgcaggaacagaaaaccaaacaccgtaagtgggagctgaacaatgagaacacatggacacaaggaggggaacaacacacactggggcctgtcatgggagggtgctgggaggagagcattagggaaaagagctaatgcatgctgggcttaatacctaggtgatgggttgataggtgcagcaaaccaccatggcacacatttacctatgtaataaacctgcacatcctgcacatgtaccccggaacttaaaagaaaatgtagaaaaacgggtagagaagagtgatttacatacttcattttccaattagtgcatgtgaaaataattcatcttggtagtaktgtccagatactatctcttcctgtttaggtccaggaacagtctgcttgtgttttttattgtcaaatgagttgttctctaatttcatctctcactgggagaaaaagaataacaatactcatactcaaaatgctgtggctgtttagaatctgtttatatgaaaataatatagatcttgcctctgcagttccctaataccattcattgatgttgtttgtattaytcgtgatgctgtttcatccattgtgttgcctgtgaatattggtttccartgactaaaggtttgttagtgtgctttgttgatggtcatcacaaatgcaagtgttccatggagtaggaagaaaaaaataggaatgataatttctggtcatgttaaatttatttttcagaattttataacttagaaacacatctttcagttatacttttcttgaactcattagatcatattcactgcattcctaaaatgtgatccctttcaatgttgacctctcttctgtcccctattcccccatacagccaccagcagaaaggagagatgagtaagaatgttctcattggcacaaggaatgtttgtccctagaatggcacagcttaagacagaaccaggaaatcacaggtttaccacattgatgagaagcaggagaaggcttgattggaaaggcccattggtgttgctgatcaacaatctagaaagcccttagaggacaggcatagttaacctcagaaaactctgtgacattagctagtgtgctttgtggagagagtcaggtaagtaaggggtttggagaacatgttcaggttcaggaacattctacacttaaatgggcttactcttaccctctgcttcaatccccatcccttctacaggttagatcttgggacagcccacatacctagacaaacttaggctttccagcttgcactggaccagggtggaaaggtaaggaaaagaaacacatccgcaacattttactgcttttttttagatcaacctcacccatttaaggagtgtggactgacggctatcacaytacaaacagactgggttgaattagaggtggagaaagaggctgagaatgtcactttaggggtgctcctccatatggagacacaggagtgaggaatcaatgatttctcccaacagcttcaaacagatagatctattgtgtgaatttcttggggatctgatcttagtcttgtgacttctgacttcttacatgttgattgtttcctcgtgtgtcttgaaattatgaattaagaatttttcttaagtagtgtaatttctgtggaaatttgatgggcctgtttgaggatgtgttattccaaagacattctgcctttgcttttgccagatgtacagaggacattactggcatgagacttctttttgtgcttacaatttaatgtgggtagttccagatcatattcaaactcaaatctgtgtgactatgaggataaacccaatgtaaattttttgttaaccagggcccagattaagacagacatgcttcctttatgtttccctgtgaatctgagtgggttcttgcctccccatctcacacatattcattgaggatgtagctcttcagaggtttcagccttactgggagggccattccttaaaggcttcctggggtctcaagaccatgtttcctgtgtgaaagttgtctatacmaaaatggagtcacttctgtcaaaccgtaaggaaagagagcttggagaccatgaagggaggaccttcttacatgtttgcatgataacagaaactatcacaacagattgtcaaaaccacaaccttgtacaaagattacatctataaggatgcctgcccagcagctgtctgtccactaatgaactgatgccactcttgttattaatccttgtagccaaggatatcatttcaaaacaacgaatgtaacctccttcgttttgcctttattttcatattgttttgaattatgtgtaagtaataatataatttctgggttattccaaattcccttttgtaagttatccttaagttatttcgcacactgctaagtttaatttaacctagctagttttgtttaataggttaaaaggaattaaattggttttaaaataaattatgctgtgaataataaaaacgctaataggaaatatattccattaaaaaaaccccttgtcttctttgcttctctggatgcacctatggccctctatagcatgtatatctgattacaatcccctgctattaccagataaactctgatctggaagccagtctctctgctgtttattttaggttgacaccagctggggtgggcattaaaccctttatgayagaggtctgcaaattgtcccaggtctgttatagcatcgcttacatgctttctacttggatatttaattgtctttgttttggcctctgggaatttcccttactttcttaagagctatgtcaaaggatatttgctttattttataaaacataagtatgaaatatttatactttataaatatacttttaatactcatcattcataagtataataattttgtaagtatttaaataagtagtagtagatgtttcaagttctctagtctgctacttttagatctttagatattctaattcttctgcctggaacgctcttttcccttttcacttgactaaaccagaggtcacatccttaaggaagctgtgagcttcaagtttgaattaaataccctccactctttaccctcagtgcatagatctaatggcttgtttgccctcgtgtgtttcctccactgaactgcaagctctgtgagcccatgcctatttagtgtaccctagcttgacacttagtagagaaccaactatttgtgaatgaatgcatgtcttctgttgacatgtttgcttattattattttttttaatcctgcctcttggcttgaagttgtttgtttccatagatttttagccttccgcctttatgaattttcgttggtgyctagcaataaaagctcccactgggagtaacttcacactggttgtcaatttattaatgaaagcctggcaactaacatgtttttcacagtagaaacagaaatatatttttctaaaaacttttttattattcagtcagttttttcatattacatttcagctcttgttcaactgaggattcttttaaaaatgctatattgatttttctattgcccttcactaaaattaccttcttcattataaaaaactcaattttatgtcaggtaagaaacaatgggaatctattcttttactccataggtatttgttgagtcccttcaaagtacaagaaagaatgcagagagatgctggtagttcaggaaggctgtgtaattcaggtggggccggggagaactgaatgtttctcgaggatggagccagagtagaaaaagagcagcagaggctccagaaaacaaagttacagtcctctcctcatcttccaaggagtgttactgatttactgattcttttctataggttttatttttaattgacacctagcaattgacacctascaattgcacacatttatgggatacagtgtgatatttccatatatatattatatatatatatatatagcataatgatcaaatcagggtaattgtctaatccatcatctcaaacatttatcatttctttgcagtgagaacattcaaaatcctctcttctagttatttggaaatataaagtacaatattgttaactatagtcaccttactgtgcactagaacaccagaacttattcctcccatgtatctgtaattttgtatctgttgaccaatctcttccccttcccgaccccccaaccccagcctttggtaaccatctacagtgtacttctatgagatcggtttttaaaaattccacaaattaatgagattacgtggtatttgtctttttgtgcctggcttatttcacttaacataatgtcttcaggttcatttatgttgccacaaatgacaggatttcattcttctgaatggctgaatagtattccattgtgtatatataccacattttccttattcattcatcctttgatggacaattagggtgattccgtatcttggctattgttaatagctgcaataaacatgggaatgcaggtatctctcwgacattattttatttcttttggataaatacccagtagtgggatcgctggatctacttatttgtcctttatttaaaattattttattttttagygataaacgtcccactctatcacctaggctagactgcagtggcttgatcttagctcactgtaaccttcaacccctgggctcaagcaacccttctgcctcagcctccggagtagtttggactaaaggcgtgagccaccatacccagccaacttacttattctcataggctcagtagagcaactttagtagctatttctgtaggcttttctggagagagagagagaaagagagacagatagagagcagttgtagctgaggtagagttgttgatgaccacgtttcatggcagatcagtgagaccagagaattcctgactttcagagctgggtggtaaagggggaagtttgcttcttacagttacatgctgattggtgtcatataaagccttaaaacactcctattgggtaagacaaaaatgatatgaagtggaaatgtgaaaaatagctttgcaggtagttagtatcaggtatattaaagttagaaactattatgaaggttggcatggtggccaatgcctgtaatttcagcactttgggaggccgaggtgggtggatggcttgagcctaggagttcgagatgctgtctctacaaaaaatgggtgtggtggcatgggcctgtgatcccagctacttgggagactaaggtgggaagatcacttgagcccaggagacataggttgcagtgagctgagaaagcatcactgtacccctgcctgggcaacagagtgagaccctgtctcaaaacaaaacaaaaaaacccaaaccctgttattatagttcatgttcagtgtttttttctttagctatgcaagcttgtccctgagattccagtttaggaagaggaatcctaaaattgggattgccgttagataactgaaagaaccaactcagttcctgtggctactgcctaaaatccctttgtccaccataaacacacctttgcacaggtgtgtgcacatgcacacaaacacacatacttaaaatgaggaaagccaggaagagaaatcacatatgctagtcagtcagatttcttttgattaaaataatcatgatttttattctatttgtaacttgtgggttttattttgaacaaatggtttgtgaactggaaacatgtttttctgagctataatctgaatacagcttaaaactgtgaagaatattttcttcaagttttaagtatttcttctaatttaatgttatgtgccttaagaatagaaaatcataggctgacatttccatatatcaaatgtaagaatccctgtttgctaagaatgctacagaactaagagcaacaaagcaggttcaagagttgtcaaatgtgtcccttttccataggaagggtagatgtctacccaaatggaatattgagtatcagagacttcaaatgataacttttgtttgtttggagaaaatcttgaggacgtgatcactgtacaaaaggtaataagcaagtcttaaacaattttcccccctaccttttattttctctattgatttttttccatttatttttatttagccactaaaaatcttaaaaaaamacacacagttttattagttctttatggtcaggaaggaagattacttctttaaatataactaaaactctggcactctctagtggtcagagaatctaaaatattgttctacatgagcttatactttacttcttcctttagctttatgaattagacataacctagatattctgccccacatgaagaaggcttgtctaatggcaaaataatgaaatcagaaattctgcatttactcataatttcacacctctagactagaagcactgagatacagtggtgtgggagtctgtgaaggcattttcttagctattaccagatgaactaaattaagaaatgttaactgtaaaaactcagacaaaccaaacctgctgggtgagggaattcctgtctctaatgcttccagatagcccatttggcttgtaagagtggatttgagacctttataaatttaaattcaaaaagagaactaaggaatagaccccttgctttgcaactagacagatctgggctcaaatccagctyatgccatttggccaagtattcagctccaagcctcagctcctcatggagcatcaggctggtaataatcaccctccaaagagtcattattgacttgaagtgagaaggagatggaaaacattgcccccaaattggcaacaaagagtattaataaaaggaagactattattgagaagagtctaggctaaggaaaggattacttttcttcggctaataggatcacaggttagcttgattaaagtctctcaaagtattgggcccattctctctgcctaaaatccaaactcccctattaattcccctcccttaaaattcagagtcccctaataatcacacagtattcatacctacttgatcattctttttatttttacaaagcatggcaaaatgaggaaaccactgacaggtgaagaatttgcacaatggaaaaccaccttgaccatctcatgactttatacaggaatcgraggtaagtgttcctttaaagtgattttgtcatgaaagagtcatctgaaatgactctcgtgatggaggaaaggaaagtaatgaaatcaacattcatggttatttaaaatgccttaaaagctaagcataatatacatagtaactccttttcctagtataaaaatagtgccagaaactatatttgttcaaatatattgaaaaggtataagaatacaaatagatattaacagtggctagtgatgcctcataaggttttcttaaactgtaatataaatttatattttcaactatttacattgctttcaacaacattcattaagacatgtttacacaggcttttagtaagtatatggaatggtaaagtgagctttaatactttcttcttcactctctgtagtagagcagaaggggtccaaaaccatgcacaatttaacagtccagaagaactgtgtaatctttacctggctagcacatggaaaaaawaaactatatacaagaatacaaaactcctaaagtgttcttcaactatcagcaggttaagtgattcatacttgcaaaaagacaggatgtttgtttactggtagattcttagtaagtttcaggtaaagaaggtgcataaaacatatgttattgatgaaaatggaaatgatgcagtataccccatgttctcacattaaattggcagtatcagaagctaagtctcttctctagcacctccttcagggaccgtgagctccttggggtcactgctctgtctccacagcagagcayggtacctaacatgtggcaggactcaataaaaggtgggtcagtgtatttctgatacaaaacaattaaattgtgccaccttattttgactacagttgttcataagagaggataacgatgacattttgtatcctctcatattaaatcaatcttgtaaacaaaagacaattgcttgtgatggcctgttaagttttaggagtacaatctggtgaaaaacacagaaaaaaattgtagatcaaattggaacaggtctaatatttatttgctatgctgaaaataaaggcacttcactgctaggcaagaatatatctgtgactgaacagttttctccaagaatccaatattyccagtatattttcatatactttcttatctctaatactcctattaaaggaaactattattcaaaattaagagacagtggtgacarcatcatcatcctgggtttgtaccttgaagcaatatactcaatgagctctaaatctcacattcactagtgatctgcaagtgaagctgaataaatatattctctttgttcagtcatggaaactcaacattagaaatgacatgtgggaatagatcaccttctctctagactaatatcccatttctgacagtggtctccatggcccattggggcttataaagtagctgccttctgtgacattctgcttgaagacaaaggctttkcccaaacataactccttttaaaaaagcacaacttgtttaggcacacagaggttaagtgacttacacaaatccacccaggattgtgattggcacggtctaatctactgaaaaatataaggccaggcaattatatagatatcttttaacaagttagtaaaatagtggggacttttctggctaaaaattgtaattaaatggtatgttactctgttataactaaacaaacaaaaaatctagaacaagaacttcttgctagttatgggtaatataaatacagagtaaggtgaaggaggactgtatgtatatttttccaacttgagaagatactagaaaggaaattaaaaattatttgaaccaattaaccagccctaaagaagtactctgctttgtatgaactaaaatatccaacaaagaaataaaataggcattgcccagcttcctttaatgtctcaactagtaaagtaaaataaacaatattcaaaggcagaccaaaccatttctaatctaaatatatcttcttgcttattaaaatgacacacatacaaagcctctaaacacgatctaccatgtctttaaaaaatttctcagtgacacatactagaggggaccaaacaaactactaaagcataagtacatattttagcataactgctaaatcacaatgtaataaaaaggtttattaaagattgctattctttatgcaatttttctatactaaggatttatgtatgcatgcataagtatacacctgtatgtatatataactattattttagtgatagtctgtgtattttacacaccagtgccacaaaggggcaaccttacaaattttatctgtatggcaaaaaaaataaaatatcctgaaaatacaagtatacaatacatatagcattaaacagttggtaacttcctagattaacctttaccaaatacaaaataatggcaatacaatgtgttttgcttctattttttgtttttttaccagaatgataaaaataaaactgcattatgtcaagatatttgtacacactcagaattttaaaaacttaaggaacatactgaattttaggcaaaatttaggggaatcgggacatagatggaaaacacattttggcgaaaggtccttgagaatgctggattaccatgtcccttagaaattttctatccaaattagtgatagaaactcagatcaaatatcttttttgtgggttggaggtagaagttaacaaatcaagcaaatctctccttctactctccccaaatccaaacattcctgcatatttgaaacaaattttcctttcctagaccagttgcttaattcattatctacttctccaatattgagtaaatgtgtctttaggggcacacatgtagaatattaatccacttaaatgggctcaaattctaagaaaatattaactatactaaatgttatgggaagaaaatacattgaatgtgagttaagggccagtgtttagcattcacatccaggattctctggatctcagttgacttgtcctatacatcaaaatatggcaatttttcaatcacaatactgctaaatgttattcaggcataaagtttcttacccactgttccctcaaattcatttttgaccctagtattggcaatagccctttgctatttatataattaaaacttttctttaaatttcaattgacaggaaaaagagtcattttgtactstcttatctataaccatgtctcacttcaagtcaatgctacaattgtcacttttattttgaaaaggaagctcagaaggaaaaaaactcttagagagatcttctaacagaacatttttcttcactgatagacatccaaggccattccatttctaaatcacacttatccctcaatcaagtcagtgactggatcatctcctaaggtttcacctgctttgcatcaggtaggtgagatgaaagtgattttatgggtagctttcagaaaaatgtactgcactgaagtgacaaagttctgtcttgcctgttctctcacaaaacagcatatcaattaaataatgttttctttacaatacagtttcataggactttccatttgtttcagagtgccttaactttttaaaaaaagacactgttaacaaatacaattatttctcttaaaatccactcagccagcatttttcactatcctataaaggctttaaatgtcacagaatgtatgataatttgctcctaacctacttttgaaaaaggaaagattccaaacattcttgaaaaaatggtaattcagaaaacacaaaaaccaattatttaaaataatccccaagcaaaaaaacctcagtgcaagaatactgcatacactttgcagtacacgaaatatcacaaacaatgcttttatcaatgtgctaacagtggatgttgttgatcctttcagttcagtagcataaaacaaatatacaaaaaatatgtaatagtcctctaaaaacattcatgctatactctcaaaagttgtgcaaaaataaaaatacagcagtggcaaagtatataccaaatacagacactatacagacagtgtgtaagaaactaggcatattgcagaacacaccatctctgtaaacttcaactctgcatgaaataggccactcagttccgcttggcctggcygctttccccattaatcagcatcttctcctgctgttctgcaagggcctgccatttctgcctgttctttctgcagccatctagcaaagggaaacagtcctctgacacgtgggtcagggcctaaagagaaaaaagaaagcaaacagctagagagaagccaggaaataagtcctctcccacaggcctgttacaaagggccacatcccacactcatttcataagcagactcactgttgaaattttcacaagctttgtgagcacatacacagatcatttacacatgattcttctaaaacactacagataaggagtacatgctgagggacagagcaaacacacacattccaaaataacattactgtgctagggagacagatctgtgtggaatccacttttaggggaaaaaagacattttgtttctatgtagtacagttggctcttcctaagtgtgactgcatcagggaactgcttagtttttgcgtttttctagggaatggtttcatacaatgtacttaaataggcttttatccaggattatattataataaagattcataattyggtgtggcattattatgtaccaattatagtgccataaatatttagccaccagaatgttcatttcagatttcttcctaatagtgaaccacttaaaatgacaaatacccaacaataggttgtcactgtaaaacctcccgcagaataaaaaaataaaaagaaacctcacagaaacacatttgatacataaaatatggatataatgacattatggattgcaaaaggcaattactgaattattaaatgaaaagtatatgaaaatgtcataaagcatatacattgatatgttatctgtagttttctctgggtaatggattgtaactggttttattttcctttttgcttctcagtaattctgatttttctttttcttcttttttttagggcagggttccactcccattgcccaggctggagtgcagtggcgtgatcttggctcactgcaaccccctcctcccctattcaagcaattcttctgcctcagtcttctaagtggctgggactacaagcgcgtgccaccacacccgcgcttataatagaaaataatttttctgtttttttgtagggatggggtttcaccatgttggccaggctggcctcgaactcctgagctcaagtgatcaacctgcctctgcctcccaaagtgctgggattacaggtgtaagccaccatgcccggcctctgatttttctatagtgagaacataactatttctgtaataatattaaaaatacttgtcagtatcacatagaattttcaacagcagattcaaataaaatgaatccttgtgtgtgtgtatatatatatatataaatgtagaaggataacatctataataggtgattactatgttgactgtatttacagggatggagaaaactcaaaagagccattagtatttttaatggagaaactcttaatccaatcaataaggaaagcaactgttatggaaagaatgagatgtccaagtgtttgaaacaatgctctgaacacacttcatacttctgaggaagagctttgaacaaaggagtaaacaagtagaatgctgagaaaaatagggagacgacagtggcacatgacacctagtttttttttttttttttctccatggttcttttggtatctctccttcctttccctgtcagccacagttctttatattaaattcttttgatggcgagaatcctggagtaggagtgagaactggactgtagatgcacctctcccactaaccacctgtttggggcaaatagtctgtctcgttgggagatgaactttacaagttcaattactaaatctgaaatatctggattagaatatttctaggttttttttctgctcttgacattctatgataactccatgacaaatgttctttttccaaataattaaaacttaaaacatttccgtttaaaccttcaaagacaaagacaacttcttctttctgcatttgagtcataaacatctaaactaataaattagatgttttagggagaatctatttgcctacaataaccaccccccctccaaaagccaagccagcagatacgtggaaatgggaacctgcaatattctacctccttccttttaatctcagaagaatttttataactagagtaaagccacattatgacaatragaaaaagttggattacttttctttatttaggctaaaatttagacttaaaaaaagaatatgctaacgcatagtatatacagtattgctccttgagggtaacactggcacataattcttcttagcatccccaaatcaatttgttggagattagcacatagtaggcactcaatagatattagtatgtgttccttgttcaatacaaacatgttcatcagtaaaagaaaccatactgctaataattttatttcttgatttagaagcaaaatataggcgcctaatattaatctcttcaattttaggttctaattcacaacagtccaagtttagcaagtctagtagttttcatataaatacctcatacagttgcaagcagatggcatctatgaacccaacttgcatacttgggattttgtttttcttctccctgttcattagatcctgaaaatacaaatacagaccagacacacagatgtgcatttatttatttagttagttattactttattattttttgagatggagtctcactctgttgtccaggctggagtgcagtggcaccatctcagctcactgcaacctccacctcccaagtttaagctattctcctgcctcagcctccctagtcaggtgtgcagtaccacgcctggctgattttttatttttatyagcgacagggtttcaccatgttggccaggctggtctagaactcctgacctcaagggatctgactgccttggcctcccaaagtgctggcatcacaggcatgarccattgtgtgcatttatttaaagaacacaaagctggctctagaaaggtgaatcagtgggttagcctaggaaggtcagacagcaactaatacaaaaagaaaaaaagaggaaaacycttatgttttatttcaaggaaactcattccaaaaaacagaagtgggctgagaggaatctttacttgtatctgagatccatactctatgtaaaaaggcagtatgtatcaaagacctttaaattctgtttgcccttcaacacgacaactttgggaatttatgctaacaagataatgaagaatgaggtttggcggtttatctattcccttggtgtaatgtttgcagtgttcactattacaaacagcactgtgataaacatctatgatagatgaaacactgctctgaacacacttctgaggagaactttgaacaaaggagtaaacaagtagaatgctgagaaaactggggagactgtggtggtggcatgacatctggtcatctttcctccatgtttcttttggtatctctccttcctttctctgtcagccacagcttctctattaaattcttttgatggcgagaaccaaggagtaggagtgaaacatctatgatggatgtttatcacagtgctgtttgtaatagtgaacactgcaaatattacaccaagggacgtaggtaaattatggttacatcgatttcatgtaatcatgataatacrtaagaatatttgttaaaatgaaaagtggtttstaatacttaagcggaaaaaaacaaattacaaagaacactgatacaatatgatgaacccaagagtctttattatgccttttattggttttgctttctgtaatgaacatgtataattcttccaatgagaaaaaagttttaaaaaataaaatgagaaattktggtcctaaggaaagatcccatagagccataaaaaggagtctacaattaaaaaaaaaacaatttgaataattcctaccaayaaggtttcayacttacagtgggttctatgttgagttcttttctctctctgtctccttgatcaaaaaattcagttgctacaagttctgctatctgaaataaataacagactcagttttgacaatgaaaagcatatcattctttaaaacagagaccgtgaatgaaggccctgttaggagctgtatatctccattttatagcaaataagcagcagcttsatacccgaagacaagtagtccatgtccaaagcgtgctctcttaactattacattatactctttttcacttaggtacatctctctgtctttggtagcttccaacatttttcccttttaattttatttaaaaatgttttcttcatttattttccccccataaaacagtatgtacaagggtttgattcaggggagagaaaggatatatgaagacacattcttccctcttctattctcttacctggttagaaataaataggcatatagtcctgtttattatgggcaggaaggtaggtaaagatcacctaagtgcttatggcgtgttggctttggcacatggagaatgagtttttgatcttgttttctcggcatgtctgtttcatgagatgagcctgtaggaagagttactaggctccctgactaagcagcccggagtcttgaccaacagcaggctgtcaacaatcctaaatagcatatttattacggactcaaaatgaaatcttgaaaaacaaaaacacaatatatatgtcactgcatggacatccatcactttttctgagcctgtattgcctctgcaaaacattatagcagttacttagagggaaggatttttttctagcctcctggtaacaggctccattcagaacgttctcgacatcttatatcaatacttcctacatctacaagccccagaaatctctatgttctacttgttaatgtctatttagagctgaggcacagcgtagaaggctaaccataagaaaagtaattttgcttcttctaattttcaaggtcattaaagggatgaccttaagaaacaagtaagccagaagtataagttatattccaaatccaaaaatctgaaacctaaaatgctggttcaatgagcattttctttaagtgtcatgtcagtactcaaaatgctttgaattttggaacattttgggtttttgcattaagtatgctcagcctttcacactgaaatgaaaactgtgctaatgtagatgctctctttcttaatatatcttacaaatattatgtgcaaatgcatcttctaaaaagaaaagcctttgtatgtccaattatctgtttttaatactacttaaaaattccaaaaaaaattccatacttacttcagaagctacctttaagagtaaaaacttacttaaaaaaattttttttattttagatttagggggtatatgtgcatgtctggtatatatgtatattgtgtattggtggggactgggcttctagtatacccattacccaaacagtgaacrttgtacccrgtaggttgttcttcaccccttrttcttttcccacctttcccccttttggagtccccagtgtctattatttccatctttatgtccgtgtgtacctactgtttggctcccacttatgagtgagaatgtgcagtgtttgattttctgtttctgagttagttcattaaggataattggcctccagctccaatcatgttgctgcaaaggacatgacttgattctttttatgcctgcatagtattccatggtgcatatgtaccacattttctttatctaatcaactgttgatggacagttaggttagttccatgactttgctattatataataaatggtgctgtgatgaacatataagtgtcttttttatatagtcatttatttttctttaggtagatacctagtagtgggattgctgggtagaatgttattttgactttttaattattgttattgtcactaagtaacatacccgttgttgaataggccagggttttgtaattgcagaaagatcacaagctgtcatcagcattgccctgttatggaaaaaagaaacccmaaactcctatttacttttgtgttattatataccctcagtaaatagttactaataaaaaaaagttaaaaccctctaaacaatggaaatggcagtttataaagaccaaagaaaaagaaacaatttatatgaaagtctaactaatacattgataacagagcatcattgtttcagtttccctttgaacttttggaatttgtcctcaaactgcctcatttagctccagattggcagactgaaaaattattaaccttgggtaaaatcttgcctgcttttattatttttgtcaccttagtattccattctcagcgacagtatgatgaaagtacattgattactaataaccattaaagtacaacatcaggtatcatactgataaaagtcttatatcagaaattatagtaggtcatcctaattcactcaacacacatggtaacttctaaatgaaaagcctttgaatgattaatcatgtttttcagctttctcctttattgtttctgcatgttgaattatagttaggaaagttttctcactcctaggttatagaagaatccatctatatttttatttaatgcttgtatgatttaattctctacattgaactctatgcttcagttggaatttaagtctgtagagtagatccaattttgtctttytccatttggttatccacttatctctctctttcctccagtcactggaaatgttatctttattatacactatatgtcttatgcagttctagattttcagctgtgttccactggtctgccaccaatatcaaactgttttaatcatagagacttaatagtattccttccatgtctggaccctgacctcactgctctaccttttcagattttctttaagagaagtaaacattttgcagctatatcttacttccacaacatttataattccattttcagcacttccattacaatgaattaggaaaatgaataagggaaacctatagccatatattgatactctaccacattttaaaggtttttctagaacaaaggaacagttcattcacttggatttgcaaatgcatttcttttcaagtaaatattcaaatttactctttgtacaaccctctggagaaatctgrccgcttttaagatcatcatattgtaacaaataattgcaataaaaactaacagtgaggaaaaaatagtgagaaaattaactgggtaaaaaacttcagctttaaagatagtaaacctacttacaaaaacaactccttttgatgaggatcttccaaattgaattgattttttcttataagttcaaaaaattctcctcgcctcctacaatgtttaaaaaaaaattgttagttataatgagtacccagggtcttatccctttggtccacaaagactcatggactaaattttggtgaaaaaaaacctctgattttttttcccatcttagagcccactataaaatcatcatttacaaatctttaatacctcactttcccccttctatcatttgctttcgataaaacattaaacctcacctaatttttaactatagatcacaaattatggtaatttcaattcttgaatatttgttattttaagaaaaatgaaacagtatgagttaaaaatttgatgctgagaatgatttcaggtattttaagtgcatggcataataagatctataggtttcagtttatcatttatttcatggtaggggataaaaatatmtaaagttgtgaagtgcttctgaagtaaacaaagactaggtaaagtttaaaataaaataatatttgttattattcagtgaatataataatatttggtgtacagtgaatacctctttatgtgcccagtattgttaagcattttgagaaggcataagacaaaaatttttcttttcgcagtgtttaatatctacctggagacacaagactcaagaaaaacttacgtaataaaactgatagtatatgrttataaaaaatgaaaagtatgtttcataagggttcaaaggagagacccatgtggcctgtaaagcttagaaaggcattgtggttacaggtatttttcaaattcttggtaattygataatccttattctgcaattatttttaataaactgaagtttactattaatatatattattttgtcttaacctcaaaatgctctaaaaaccaattaagtaggcacatgcagttacttctagatgtataacagtagatatctggcagatgtttttgtrttttttctatgtgtttttacttctcctaagartaactacaaccatgaatgtgaattccttacagagggagagagactcatgttacaaggaaatcctragwgtgattccctgactcccctcattcccacacatgcgtcaaagatctcagctaggagttggaaacttatgattgctcaaatgcaggaaagtattttctagcttttagaaaggcagtttaatcatgaaaatgcataatcacagagacaactctaatgtatactcttattttagaatcaacaacttcaaagttctacataaatattcttctcctgccaaaatcaaataaaaagaaacaagagttacttgcttggcagtaactccttttcctgcccaactaagcttgaatgacggtataaaggagtcrtgaaatggtcagaagttgtggggagcaagggaaaggaggaaaagcaaatgatctatataatctttggacaacatggcttggaatgactgaccttgagatggctattagatttgtatatagtttcagagacacagtggtagataaacatcagaaataataggtattcttaattttcagcagtataagccaaaggagtagacttttctggctaccctttcagaaactgctccgtattctgataagcagttytgccaggacatttctgctttgaaatttctcaatatggatgtcaaaagtttgaaacaatgaaaagacttcaaatacctatttctcaggttatttcttaaaacttacttaatgtacagtgctaggtctgtagctaaaatagcttgcttgattattttcaacgtggtcttatattcttcaatggagaggccactgagaatctgattgccctttataaaaaaagaaaaccagtattaacatcctggagaagctgctgacaagaacaaaatctagaaatatattcayatatcttaaacacatgcccagtattctaatgaatgtggaggacacacttaaataccatgaaataaagtttcccctctatgttcccacccaacccctctgtcatacatgtaaaccgcttcataatgcttcatctgcctacatatgcatgtttttccaactcttatactccttaagccttagtccagacttaaaatctaatagctatccttttccgtagggcagactaatcgctataatttaacagcatgtaaaactttgaaaaaaaagccatattaatggatatgaagaaagaagtggtaaaatttttaaacttctctatggcattttaaataaatccagtaacatttctggtgcaaatttatataattttaacttggtcagttatgataacagtgcatattccttaggaacatcttaatatagatgggtaaagggcatgagccaaagggtgcttactggtcagtggtgaaagaaagcgtgggttgaaacatctataaggaatatttaaaaggtagctaatccatgtgcaaatcattcaaagttttcactatgtaaccattttttatttcttatctgtaatttaaagcatagtggttctctaatcttgaactaagtaaaatacacagaccatgcactcagaatacaatcaaaacaacatctgtaagttgagtcagatgtgcttcctatatcttagggccaagaaaaaacccagacgcttaggaatgagatctgaaggcaagggatttgttatgaagacaggagaacttctgggtatgttaggctggggccaaaacacattgattaaaggataactagatgctgaaattgtggcatggatctaattaatgacaataatctataattacaaccataaacattatttttaaatactaaatcattttagattctaggctaaacagaaaactattcagaaaataccttctgatacttactttaagataaaacaatttcaagtggaagatgaaatgtcttttggtgctatatttttattttttactctcaaaagctgaggatataatttcttgtgtaattatgcttacaaagatagaatatatagataggtcttataatttgagccagccatatagataatcagattccttatatattaagtaacaacatattacataataagttatatagtaacaggtcagttgataggaatactgtaaaatatgcttttaaaaaagcatattttctttctttggagctaaatttgtagtgggatactgaaatgaaagttttagtggaaacacacagatagcaaaagtacagatgttcctactataacatgacatatacattcctgagaaatttcagttctgaaaaaccgtacactaaaaataacatggattttgtgaaaaaatggtattgggaaagaccactcaaaacctatgcaactttgtaaccagagcacaaactaaaccaagaattggttcctctggaagtaacttggacaggccagtctggcaggtctggaggctgcttctgaggacattaaagatggacaaaaacaatcaagtagaaatgctggtttgaggggccctgcaataatgcatatagaattgattgttgagacagtaactctgctattaaggtgggcattgaaagaagagcaagctaccaagaggctacagcagtccaaagcgagggagagagcctcaggtgcaagtgctcatttttaatattcctaagatagaatggaaagggctgtatatgcacgagccaaagggagggctttttcctttattgctgaaggtcagaattcaacttctataattstggcacctcttaccccagagaagtcgtgtatgaaatgatagaacgtctrtagtatactgataccattcttctacctcccaatcacacatgatataattcacattaaacagtcacatgttgtagaaaaacaatctgtactagaccatatacagattttataaggaggttgccaaaacaggctatataactcttaattcctccccgacactgaggtgttgagggaggcgtgagagtgtgttcccctctacctcaggtaagagagaggggtgtggagttcctgtgtatgtctcctatcatttagtgggtggaggtggggctagagtagacttgtgtctgactcttgtctggaaagtctaaaagcaaggcactcatatcagtaccagtctgttaagaatgttttgatgtttcttacctattctcccttcccattctccaagtatgaagaggtaagaaaccacatggaggttggggagagaggaaggagttagaagaaacacaaggtagggaatgggagaagcctaccagtgcagtaacagaaaacctgaaactttaaatcatgttcaaaatttggactgctacccaggagtacacatttttgtttctgagttgagaactctatactatatgttggaacctaaagtaactagagggcttttacttataaaatagtgaccagaaaagtgatgggaatccctgaatttttttccagggctcaggaaagaattagcccmactgagtaaacttagcaatattgtaaaattgctttaagattatatgtcatgcattgtgtatgttcaatgtaatagttaaaactttcattttttcttattattaaggtaatacatacacacagccgacaatgtaaataatgaacaaccatcccccccaaacaaagattaacaatttcattacaccagcacagccattgttaatatcctggtgcatattatgttaatcttgttttccttaacataagtatgtttagcatagcatagcatatgctttcttatgttgataaatattcatttcaccaagtagttaaatagctttattctttaataaaatcctctcttagtgactggaagtttcaataaaaagaagaaagggtattgctttgtgaaagcaaatgcttgagctatagaaaccacttcattcgattaaacaaaaaaagcagaattaactgagagccacaaaatacacattttgtttgtttctaatttggaatagccacgtagagtagaataaccaaatttcccttattgggcaacatgtagacagttctggttgtctagagaagtgaggctgtgaggatctcaaatgttttggcttcgccttccttacccaaaaaggaataaagtatgtgcaagaatttatgatgctgggaataaatccaagaactaaaaataaaactgaatttataaagctctcttttaaaattccacaacaataaattaggtacttactggactattaagaatcatcaggcactggtcaaaatgatggtgttccatgattgaatggcagtaaagctgggcaagkggatgttcacttctgaaagtattttgttgaagaaaggaaaaaagatcagtttccttaatatgccatttatcagtacatttttattactgtttaactacaaaagaggctacttcacaaaattaatcaactaacaattttctctccttttactgagaaaagtgtgagataayctctgggaaacaaatacaaagagtcaaattgttttcaaataccaatgtgaccattgccagagtaaagtatgaacaatttcattggttttaatactgattaaaatagaagtaaggagtaaagacaaaaaaattaatacctccaaacatggaaaaaaaccctctgaaatagttgtaccaattatatttttcaatttcaaaactgcaattgatataaaatctgaaacaaattcatgttagcttttcctctgaaataatgctcaggctgaaggtcagcttattcatgtgtgcctgcaaataagaaaaggactgactgagatggaattaactgaggtatgattgatgaaaggcaagaaaaagagggatagtcagtgtacatgctcccttggaaggaaggaaggaaggagacggctgagttggaaagttccccatgtaggatccaggtcattttagtgcagaatatcctgctagttctgctaattgaacttggtgaagcagtagagaccctttggctgagtgaagagaaaggaaaggatattatactcagttcattatatctctgagacagtcacaaataaagctttaaagcacgacaagcacaatcctccacctcatgtttctcatgacccttcacacgtgaatattaagcatagttttcactatttcttcataagaaaaagatgaagtttctgaaagcctctgttcataaaatttataggaaaggggtttgtgaattgtaaagctccatatacaagtgttggataatacaactgatttgttatttcttcctattactatctgaaygattattttactttgcatttaatttgttgaagatagagaagctacctaagactgaagaaatgtaatgtgggggaaaaaatgggtaaagtgagagaaatctgagggaaaaagaaaatagtaaagtgaaaataaaggtaataggacagataatctcatctattcttattgtttaaagtgttgtttatatttactgttgtcctaacctttcccaaattaattcttgcccttcttgtcttctttgctccttccatatttagtgagttggactatggatcaggtactgtgctcagcatcagaaaatgggatgacaatgaacagagtaacaggactatatttctgaaaaaggatgaacttactggaaacaggattgcgtatgtatcgagactatgggagttagttaggagactactgggaaacttctagtaatctaagtcagagagagcctggattagagtggtagcagcccaaaggaagagaagcagacatctgagagctgtttaagagtagatcagataggaactggtaatgactcctgactaggagtgggatgagggagatraggggatgagggagataaagggaaaaagtatgaatgttaaactttctgccttgggatgctgacctcatttactgacacaggaaaagggagaagatgattaaagatgggggatgaagcaggggaacctgactagctgaatgttggatctgttcattttaaggtgcctgaaatatayccaaatggatataaatgtcaactcagttctggrctggagatatagatttggaatgcaccaacaatgcagatggtaatcctggcatgcgagtaggtgagatcatccagggagatggcctataatgagagcctacaacatgtcaggtagtttgctttaattttttttagtttattatatttaatttttacaataaccttgtgcagggcatgcccatttacgacatcaaaaccctcaatcccacctcttactcatccactgatgtagtgtccagtttcatgcacgctttaacagacttcatgcaagtaccaattagaaggtgttttgtcccagcctatctttaatacctctcacttctgccttagagctttctgaccccacaactggtgcccagaggaatgttctctgcactcatacttgttcawcctgaaagtgtcaaagagtgaaggcctgtggaccaccttggaccaggggggtacaaagacctagggacaactgcctttgtcttgccagtcaacagttctgggtcttatttcataagactcctcaaaagtgcctgggaagactaagcaccagtatgggtggacatctggatarctcatccctctactgcctttcctttcttccctgcttccttcccagttctgcattcctgctccctggggtcatattcacaaatagcctatatgcacactgactttcatctcaggttgtgtctccagggtaacctcagctgagacctctctaaagttgccatctttttgctttctagacaatcaaaggctcagtgaaaaataatgtgctcaaggttgatataaatggtagagctggcattcaagtatatcctcttcaamccatcacactgtcttaggataccaaagtactttaaaggcacacagtatccactcattgacccacttaggggctggactacgaaatgcaattaggtggttatttaacacaaacaagttagaacttcaaacacacattacatttttagacgacgcagaagggactgtttcacattagagaaaattcttggcttgagatagatgaatgcaaactgtgtttgcctttacttacattctaaaaatacagatttatgaatccataacagagtgacaaatgactcgaatttcctgtatataaaaacattcatggaaaccagtgtattctctatctgttgtattttcctctttcaaacacaaggctatgtggcttctttatttaaggttgcatcagaaggacccatttaaaccactactgctacagaattttgttctcacactgctgtcagtgagcactaatggaccagcatactcactttgcattttcctctgttctgcacagttgttggtccatctctgacagtagtattaggatgtccaatgcagaaatcagaccaatattttaaaaatagaaagccttagaaatctatagaaaatgaaagccccatgggggtgggaaactatattgccaccccagtcttcctatgtcaccaagaacaaacaacatccttggttctgcttcttagccatatatattactctgggctcaattctctaacaacctctttgtaaccttcaatcccatttagttctttacttcatcatttctcttcaaatcatcactattgctttcttctcccaatcaaccttttttttttttgccttctcattgtctataatcatattcaatgacataaatattcataatgatgattcatttcaccttttgacctcagaattctctgacctccttgacactactgattatctctttgcacataatgatggacagggctccgcttctttgttccacagctactaggttctactgggcacagtatttttgccactccctttattcaccacaggacaaagcaagatcttgaactcctatctgttgctaagaacattcccctgtgaaaatagctaaaacctgtagagcatttaacatgtgccaggaaatgttctaagcactttacatctatttatacccctttaatccttatgaaaatcccagaagataggtattttcattattccattatacaaagaaggaaacagggacatagagaagtttaatgacttgcacaaggtcacagagtaagaggagagagaagccaagatttgaagctrggcatctggctcaagttggctcttaactaccataaccatcacagccactgcatggtggtataaggactaaatgaactaatatataaaaagtgcaaaaacgtttcaaatggcataaggcctatataaagttttagcttctattattantatttactactgacataggactaattgaattgaactttcactttattcatagtcagatctccaggctctcaagatctccaacctgaccagagatcatctcattcatgggtaaaatggactttacccagtttgaacttcacacatgattttgtgctgtgtgtagtgcccttttaagtctctcacatcctgctgaccctctattcccactgtgccagaccatgacttcagctcacttctgtcctctattagagcagagaagacagtcatgggatagaacaagttctcccaggacaaatatacagtgtgactgtggctaccaggagatttttctccccctgattgtattgcatctctaaccttgaaaaaaacacattcgttcgatcattttaccacttctaactaccaccctatttattatcttctactggacttattrccaaaactcccataacttccattcttgccaaccctctctctcagtgcacacatatacatatttcccagctctttcattttcatcaatggcaccatcactgttccagtttcttggaccagaagtcatatctccttccttcatgcttatatataactagctgctcattattaaattaaaaaatttttttctccttcagtctcttcctctctctagccagtatgtgatttttcagcttatacttgacttgctgtaacagctttctagttgagctctgtggttctaatttctacccattcaccttgtagcttacattcagacttccttcctaaaactgtgcatttattacacactgcagtggctcctttttcccacccatatcaaatctataatgcactggttaattttataaccctgcatcaaaaagtttccatttgttcattctcttctttttcattcctaatcagtgtgaaccttctaactctagtcaagctagccatcaccactattccaagaacatgcttacctcatggtgctcctgaaatatatttatcctttctcctttctaaatcctacccacattttaagaccaagtttaagtctcatttcctccattaacaatggagatgtactacatctgtcttgaccagttttctctgctgaacacttacagtccatgcactaaataactcaggactagatactttcttgtagtgatcactattacttcatgagactatgacaattcttaatggcaagaatcacattttatacttctatcactttctttctgccttgcaaagggcaaaagccctagtataataattattcattatctatctgcctagaatataacataatttcactgcattatttatcaacaccaaacttgaatctaaccaaataaatgcatctacaacagtcttcttatactgaatgcagacctaatgcaggtaatctctctacataacccaaatgctacaattgtgttttctctagtggttgtctgcactttagctattttgttcctattactgcctatttttaaaataagaattcagtatctatctgagatcattcttttttttttgagatagagtctcgctctgctgcccaggctggcatcagtggcgagatcacagctcactgcaacctctgcctcctgggttcaagtgattctcctgcctcagccttccaagtagctgggactacaggcacccgccaccacacccggctaatgttttttgtatttttagtagagatggggtttcaccatattggccagcctggtctcgaactcctgacctcgtgatccacctgtctcggcctcccaaagtgctgggattacaggcgtgagccaccgcgcccagccctcattctcttcttgattcacccaagtgggagaagtaagcatgagcagtgaactcttctctcatatatgccactggcatacctgtagaactcctctacgagggtagtttcctaatcaaagaaggcatcaaataatcaaatgatgactcaaggggcaactttctattggagaaatatcttcttccaaggtaatttcagggtaattttctgaaaagatgttcaagaatgaatgaggaaaatctcagtttctaattttgccaccacatgaccatttttctctttttgataaattactttcatctctgtgcattgttttattttttgattttctctaaatattagtttgaatatctgatgagggctggacacagtatacctttttagaagatagtactttacatgggaatatttatggtactcatagtttcctgggtctcctggctaagaaaattctactttaagtatcactcatttaccaacaaggaaagaaaaaaaaagaaaaatccctggaaaattcttggtttcctctactgaaaccacagggatgtaggaagaaataaaaatctttgaaactgctttaactttttttttttttttaaagttgaagtctgctttgtggtgtgtgtgtgaaagcaagattctgcagtcaatgactttttcccaggatgttttctttttctttttctttcttttttttttttggagaagatgacgtttctccagatgtttttggggtaattatttttaaataaacaaaggaaaaaatagttgagtgttttttttttcactctaaagcagggcaatatagcatcttagagcaatccatacactaataatacacatactaataatattatgttcagtgtagcacatgcttattctgatcttttggttgtgctgactgtggagaggcgtactatgtggcttgactctgtactatacatcttttcatatcagtgtcccctttcataattattctgtgtctgtgtgaggctcaggattgcaatcacatgacaaagcacaggggacaaaggacatgtcacccagtcagttctccaaaacatgagatttttcaagaggaaacagccagactctgatactcaggcaagagcttgctatcttttcccatcaaaggtcagcagaggacatggttgttacatcactacaattctttctacatgaagttttccatttatttagataagaagaatgtgattagagagctttctgaaattccctctagatatcagacatctggaatttccttgagagatctgcccattagttgaatcacttgtgtacttaaaaaatgctcagtagtaagagatcttgcacttaaaatgtagacctttcaactaaattcctgtaagaaaataaaaatatcacagtggctcaaacatttgatgaaaagtgatgtcacctttatcctctcatttgtcatctcaaatgccacttaagtatggctcttaaaggagcctgacacttgtcctaacggatagtgtctcactctcaaactcagtcaatgagcagacatctgatgacagtacatctctagcatctgcttctaatatttaagacttaaataggtaccaagcattctgcttggtattgatgtgcattatcttttacaactattatctccattttacagatcaggacataacggtatagagaaattagacagaggaccagttttccaacagagtgctatgtagcttccactaagaccaaaagcctccttctactgagcacttaataagtatgtagggccgagctaagcacttttcaaatattatcttttctactgtagggtaaaatgttaccttttctaaactagtcttaatagttttctaaggaagctgttaagctggatatatataaactaaagtaaaactcctggtaattatctaatgaaataagattctcaacataaatatgttttgaacttcagggctgaaaaattataaacataatacttaacctgcattattttttccatttcctttaaatataaccagagtatgttatgggaccttgaccatcaaattttgctgtggctttaacttaaaaaaagacagccctacaattaaaagaaaacattttcttgctttactgggaaagtcttaccgctgtatgtaagagttattcacaccacggtgatccaaatcgtggcttagtgcagcaatcagcaatgcaagtatctccaggtcagtcagcttgttctgcatgaccaaagacattggaggaaagagagaacaaatataatgtggtgaaggacattatattacctcttttcagtaatcttttttttcccctcagtgctttacatacatacttctctatagtcacaaaggactaaccctagaatcctattcttcagggaattagttgtcctttgtcattcagaatgggatcaccacaaatgtcacttatcaacaggaaaagctgaaatgcctcaataaattaataatctgtccacctatagtaagtattgctaattcttaattattatgtgaaataatcataataaactttaaataattgtttttttcctcttttaattccctgcagattctgttcactctctgctatcagttgctgtgwmcttarggaatgcagacaatgttaattcaagcaaaacaatagaaagaaaatgatttgaaatgaaaacttggctttaaaaagttacataatatactctcaagctaaatataggttattttttagtatctgctatgagtattatcattaatactgttccccttcattcgcaaaaaacacaagttaaaattatcatcagctgtattttcctagaactctcagtactctaaataggttttacaacaaacacaaaaatcatcattttgttattcctcacagagaactaggacagttttcagtgttgataatccttgtgaccttccctaccccaaaataagtttacatgatttcttacactggttgagtatccctaatctgaaatccaaaatgcttccaaatctgaagctcttggagcaccaataagtctcaaaggaaatactcattggaatattttggatcttcagattaggtatattcaaccagtaagtataatgcaaatattccaaagtctgaaaaaaatctgaagtccaaaacacttcttgtcccatttcggataagggatactcaacctacacgtgtttgctaaggtaggaaaatactactattgtatttaawtgcacctcacttctttaataacaatcacttcttttagatttagccagttaaaatgtgcaccctatgaaagtagagacagagaataacattttaagaatttatttacaaaaagaaaaaggcagggaagctctgaattaaaaacagttatatgatggatgcctggaatcacttacctagaataactagtcgattcccactgaagttagaatctaaggacagagatatggataaaatttggcctggaaaggaacgaattacttgaacgttttctgcattgatcttccttttaaacagtctctggtcaatgtatatgaaaccaaaaccctttctatgaaacagtacttacaaaatttactgagtgctccagagaaaatgcgatacagacccctaacttatcaatgaagcaagttcaggaactaggtggtttttgaggaattctactatggagcaggttgaatgtgaacaagagaaatgtgatactttttcttactttttcttaataaggcagtgttttcctcagaaggaaatatttatttgcccaaagactatttacgtgcaacatgaagttattttgaaggttttctaatatgccatatatatcatatatggaagaaaattagcaacgaagtagttttgccagattagtcctctttaattaacgaaatataacttattatgtaagtggcagcaaatattattttaaatcattgtgcaccttaaagtgaaattgaaagaatatgctataaattttactactaagcaacaaaatgtattagatatatgaatggctctaaaaagtacctgaattttgcctgcttttagagcagcaaacatgcactgagctgtattaaaggcatgtctccaattatgataggcaacattcttccgataattcttcttaacacttaaaatccatctgcaaagaacctttagggaataaaacataagtagtaacaataattgccaacatcttcacacatttactatgttccagacactacaaagcattcacatttagcctgatactccgatttggatcatcttacagacaagaaaactgacactcagagaggtaacttgctgaaggtcatattgttagttagggatggggccaaaattctaacttgagcaatttgactycrcagcctaccatgttaagtaccatgctaattaaattgatataaaacacaagacatccctaagaagggtatttttggcagggtagggcactgggtaggttttttttttttttaataaaaggtccatgtgtccatgtgccatttccatgtgtcaccaactaggagagtccaaaggttcacataggtatgaattcaccatttgagagccataaaagcggccactcccaagttcttcccatgctctcatgttgtatatccgtgaaggtatttagtgcaaggccctgggggtggactagtaacaaggtatatagcacatgtccgaggacaaattggagctacaagacaatgccgtcattagctctttgtccttttaaattatacttattcaggtagttactgcctggttacaaagaagtaattaaaaaaaaaatgtgccaaataaagccctggggtccatataaaaaacactttaaaagatggccgggggcaggatagacttcagcaagtctcaagagttgggtttaattcaacttctaagtggtgtattaaataaaatccccagagactcatgggccctaaacatggtctgtgttagcatcagaatctgcctctcttcaaatctgagtgatttactatacttttggggatttgtaaaataaatatgtgattctccctacatgtatcactggagttgcttcaaacacaaagaacattgccctgggaaatggaaaaagtaccagggaaaagaatgttgctttgacaatattcaacacaatacgattagctacagaagtaggccaaaaacaaggtttcttcattgtcggtagaaactgcttataaagaacttggtgggaaatcaatgcttccatatcctcccttttcaggtcattttattcctgttctattgctcagtttacaggaaattctgataacaaagaacactaatgtctcctaacctttttacccactgagttgccatattccaagcggaggatttctgtgtgcctaagattgaatgtgttcaccccaagcatactgcagcttcttacaccattttttcayatctgaatagagtctgtcaggaaggtgatggatgaatcttactgggagactaatcttactgagagacttttaagtaagatctataaactctctttgatatgtttagaaaatatgttgcagaaaattactggtgattaattaaagcagcaagaaaaaaaacaggaaaacccagaaatttaaactttggatatatctttttactaatcataaatgtacagatataattaaatatataataccatatattgtgaaacaatgaccaaaatgactctatgaaacataattcctaatggactactctattttccttttattaagacggacctaatagaattggataacccaatggacaaagtagttagtacctatatttaagtacagttttagattctgttaccaggatgttctcaacagcatacaagaaaattatggtcatatctggtaagttctcagtggatatgctggacaccattaaaatttgtaagacagtattttgtacaggactactgagtacttatttgcagtttggatgactctacagagcatgttcaatacgttgaatcagtctctaacaattatggaaggtttcctgagtggtgaactcaagatgccaccggagaaaaagaagaaacagaaaacagcttagctcctgcttcaagaaactcaatcagtagtgaaaaataacaaaattgcatatataaaggaaataagtaaataaacataaaattgagagcaagtttatacattgccaaatagcaattgaagcagcatgaagtcaagcctagggttctcttacaaacagatattcttaagtcaggctctgaagaagagaaatgtttgttgtggtagagagtggaacagacattattcagggaggaatgagatgtaaaagataaaaagtgaaaataagcacagcacatgcagattggcttgagcagaatgaagaatctgtttcagagatcagcaagaggcaatggttacagtcattataggagaataactaaagatttagaagccatgcagagaacatgaagatbtttcaatatgaaatattcttagtcacaacagcttcatgatgttaacatcctctctagcattaacatttttatttcatcatcctaaaattatactgacaataatatctgaaagaaacaaaacagaagaggcactaaggaaggaaggccagccagaatgatggcaatgttcaagtttgatgttggccagaattagaataatagttattcaaccagaaaaggtaggatgatgaatcagacattaagaggaaatattttcctcatggataaaaacccaacaactggtaagaataaagatttctacagaaactttgagtgattatcttcattacctaaccctcaaatgctatctaaaggccaaagagaaataaatcaacttatatgaatttcatttaaaagtacaagaatcacattcctctactctagccaagtcctttcaacagaatcattattagtttcaagaatgggagtactcaggaatggaaaaggatttgagatactatataggtttataaagtcctgtaactagcaagaagcagaagtgagattcacatagaacttctggctccaaatgagatcttcatctcatcaatagatacggctttaaaaaaagagccttatgacctactattgagaaatttgatgagtgatgtaaccagtcaaacttggcctaagaatgggataactgacatggactctacacctgtttgttaaacagaatattatagataagtacatacatacacatgcatacaaatagataatcacagatgcacgtataattctcgtaagactcccatggggagaataataccattacccctaataacagaaaaggaaactgagaatatgagtgattaattgcccaacgaaaaaagagctaaccagtagcagaggtatgactcaaaaatccatgatctttctactctaccatgctgtcccaatttcttcatttgtaaaatggggataacagtaatcccagtaacagcctttctagagaacttgttgaaataattaaatggcatgatatcccttaatcaacgcactctaacaagagtaaagtattattaggtaagagtctatggacaattgttctttattttcacctaagaaagagtaacataaactttggttaaattcaggaagaaccagatttgggcctccaataataccataaatgacaatgtattaatcttmgctatattcactcttagttttcatttctgtgaagcctttgagagcagggacaactcatcgctgaaatgtgcccctggcagagtcctgaattaatacaatgctaaatagtggaggccttcaagatatttaaattttcagataggaaatctgtacaaggagactagacattcaactgatcagaaaaagtaatttttaaaggcaagattactgaattcttttttttaaatagtcctttctgctgcttcttattctttgatgctatatattataatacatagccattatgaaacaacggaattccctagtatctccaaactgatattagaagatatttaagtttttctattttctgagaagtgaataaggtaagcaacagaggttaaaatcagttttcatcttcacccatatgggtgaccctgttccaactaaaagcttggcctcccatcaggcccctttatttcctccttcattttcaaaggagttcactctgcttcggtccttccctgtacactattgttataaccattgcagtgagatcatgctacttctctgcataaaattcctgtgactcaccattgttttcagggtaaaatccaaattcatctgtacggcttacaaggttccgtatcatttgcttctcaccttcttccattgcttctcttgccattcttacccctcaacagtactcctggccctcacccccaatctctgctgtcatgcctttgaacatcctgctcctatttttaggaacactctcccttagtcttcaccctgatacttgatacatgctaggagcccattaaatgtctttttgataatgataatttttctttaaaagtctcgggtatatattaggtgacagtatattaatcactaaaatgtaaaaatccctattccatatttgcattcaaaaccaattctctctcttacatacacacacacatacacatagacttttccaaaggatgttgctgcattcctacctcatgtttcatctggaagttctgcacaaggttgaggtcagtaaacatccgaattgtacacagtgctgtttccagatcagacagctcaaagtcactgaagctaaagtcagtaattttaagggtctgggcagatggcaccacagcagccttgggtaaggaaagaagaaaaaaaaaatgctgttaattaaagcagcagtgatttgcaaggttttcttgttttgctgcagagaaatagcatattgtggcttttttttcctttttaatgaaagacactagaaacctttttgtacagtggcaactccactctctgcatttttaaaactgagccacataagggtaattartatggttcaaagtaggctaagtggagaaaagggagttgtcacccttagactgtacctggaacagtgagcaacactaagaactcctctagtgatctggctcctttatacctccccagtcttattcactcaaaagaaatttataatttattgagtaaatattctggaaccatcccagtgctctgggctgcaaatcatctggtaagaagggtaatgataatgttctaagcattttatggttagttctcaggacagccttatgaagtggacactctagctccatttttcaagtacaggaacttaagcacaaagaggttaattttcttgccagtggcagcccagctagttaaggaatgaggatgccaggcctccagtccaggaagactatcctgtgcccagactagcagaacctgcctcccaccatacttgcctcacacaagcctgatcataagaatcacctgggtgcctattaaaaaacattcatttggaccaaggagccctggctccctcagactgagcagagcgcacaggctcctctcctagatgttttgctgggccctgtgggatgggaatttaaaggaacctccactcctctgmccttggaccatttaccctgtcagcactttgttaactgttttagctagatcaggctattaactggaccaacggaggcctttaygtggtttgaagtagagggaagaaaaattaaatttcagccaggttctcaaaccccttaagtttcctatgagtatctgagatagcactactttgcttttgggaagtcaaaaggtcaaaataataaaatcttatggagcaatctaaagtagatttccctacaaatctgaaggcacttgcacattctcctttttattctggacttcagatttcacttacatataccagacttgtttaaactttccatgaatgtcaccctcttcattcaagctaagaattttttcccaagaccaaaactgaccagaaaatatgcattctgttaagtcaattccataggctaatgtgtgggccgaaataggggaagaaagaaggatttaaaatgtttagataaagggcttagttgtttattccagcctccaacatcagagatggagcggtaactcaagtttgggaagtgtggaggtggggaaaagcccaccttttaactcaaagcagataacagctgctttccttaaaatacagtgcaatggacaggagaacagatgttttttccttagggcatcattattcttacagcaggaagttttctttctttcctttcacaaagaacattctaaaagctacaggatggaagccagcatagcttgtgcctctttccattatctactgtaattcctaatctctctctctactaagagaaaakaatcttttcttttgattgtttggtcacaccacactacaactcaaacattctgagctgacccagtggggacatgcaaacattttccataagagccttgtggtcagtgatatacaggttcagaattctgggatctattattaacaagccatgagaagtcagaaatcctttcaagctcttgtactctgcttctttgaccatcacaagagaattcaactttctgtttaacttagaaaggcttgggataaaggtgattttaagtaaaacataattacctattatttttacttatcacattgtaggataaaatattgtacattttactaatagcaggaaataaatttactaagcagggaataaagtatgtggtatttctggcataggatgtatatacagttccagattttcacagtttcttgttttagtgacttttattcattagaattagcaaatttagatttctgagtttgattttcttcaggggattttattattgcattacggttttgaagcctaacagaaagaacatattttacagagtctgtaaaacaataaggtactataaatataaatatgtatatgtatttttatggttgggtaatccaattcaaaaccactggaactgtgataccacctaataccacccaatattgcttatttatatgagagcacaatgtctctgaattcttggacaaaacagttagtttagatattagtgtttaattcaaatatggttaagctcttacaggactatggttttaatgtcaaattaaccaaatatggaatgcaaaaaaaaaataaaaaaacaaagctcattgggttaaagattcaatctgacaaacaatttgatggtatatgtattcttctgagttcttcaattgtatctgccactcaaactaataaactagtgggcctctagtgactctttaaaggaattatatcataagtctttttatgatccttttctaataccatggccctcttttcaccattcttgcaaaaattaaaaattaaaaaaaattcaactctggacatraaaagtcactaagagtggaacgagagttaatctttgagtgcaggaatgtcttgagttaaagcagtagtgagagttataaaaatattttaattttgcagtgaccttaaaactaattgttctaaataccatctaactgatgagctaaatagtaaactgatgtgcagctgacaaaatgctagatcaactaccatatttacatttcagcatgagatgatgatcagaaacagaaacttaaaaggaaggtgaagcaagtgataaaaaggaatgtcggctattgggggtgctagtccagatgttccactgactttgtcaccctgaacaagatgttcaatctctctgcctgcttttttgaaygtgtaaaagaaggaagttggagtagactatctctaaggtttaacattctctgatatattaatacatttatctctgtatccacagggctcaagcacctcttactgcctcctcactctggaaccaaatgccttactgtaagtggcatctagatcttgccagtgactttcctgtacagggcctaaactcaatctctggttttctcagcatttaaggtacatggacaggtgcaccttggcagttaagattatgttgtatttttcatgctcgattccatacacatcactttggtcctgcttcctcacaggtaggaggagggatatttcacagctcctggcttaaatggaggacmctagcctctactgggttaaagtagtggagggttagactcaatatgtggtagcctctcttcttattgcaataatgttctaaattttaaaaactgacttttctgaaattgtcatttttttttttcagggatgggggaagtgtctatgtatttgtcatctgtttttaaggttaattaataatctctctcacaagagagaaaaagaaggctctcttccaggcctctttgtttctyctctgcctagaatgcatattcccatgttttcacgtagctaattctttaactttttttatgtctcagctgcatcagggaaacattcactagtccttgtgatagcaaggctccattaacatctgtttcaacctttttctagtgagtcttcatcttccgaagaggctagacagctaacaaaaatacatttccttgactctcttgcaacttggattccagatagatttggtttcggcaatgaggcaaacttgagtgagacttgaatttcaaactaatgtagtgacacatgggaaactcattattttggggggacgtgactctagagggaatactgcagtcctgcagcttgcagttctgctagcagctttctgactctggcctatgtatgtagaagtttccatagtgagccagaacagcaattttgttctaggacttattcctgggatgacttacctaccctttccaatgatttgaaagtacttagttaaattcttttctgcttaaaatagctacagtagttsctactacctgcagttgaaccctgttgatgctctattttgcaacgaaagcatgtgtaggcaacagactctcaaaagtttgaatatttgacctgatgagtttgaaggcagargggatccgtttccattagagcagcagttctcaaagttaagttcctggaccagcagcatcagcatctgggaacttgttaaaaatgcaaattcttgggtcccaacacagacctactgaatcagaaaccctgggagtggggctcagcaatctgcgttacaaaaaccttccaggtgattctgatgaatgctgaactttgagaaccactgcattagggataggttattggtagtaaatagtagttaacagtcattttaagtgaacagtttagaaaaaaatgcctttttgtggacccagtggtgactgccatatcacagtgtgatgggcagaaactgtaagtgggttggctgcttcttgctgtgtcagagagattaaagaaagaaaatgaagggctctgggctttaaatttttggctcaaataatggtctgaaaactagagaagttttatggctttcctaaaacagcctatttcttgtagtactgatgtagccaaaacccaagtgtagtcttatcctacaggttggtgaattacagtgtaggttgaaatcacagacttgccacatctcctatgtgaaagttaaagcactgattaggaaggagtggagcaccaagaaatgaaattgagacatatgaaaagatctggataatgacatrtatcttagaccattcactctagaatatgtttctatgtaatttcacaatgttttatactttacagtcccacctctttttcctaattgtaattatacaaattgtataattatcttatatatgactttttattcactgttatatttggagcacctaatataatgcctgcatagaataggggttaaatattgaatgaataaataaatgggtttttaaatcatctagtacctaatcagtttctccatattatgcagaactatttcatataaatttaatttggcatagagctatagtacagtattcatattagtaatgaactatactatggcggaaacaaccaatatgttgtggtacatgcctttttctcttaaagttcaattattcaatttattttcttttgaaaaattttaataattgagtttcttctttcatctgcacaacaaatactccattgctgtaatttttaaaaatcagttacagcttgtcttaataatcattaagatttgattctctcacttccaacaacactgaaaacccaggatgagaaagcagtgaccaaaaagttttccaatttttagctgctttcgtaggaagttactgaaaatggtgaattccagattgttccccataagtagagaactggttatacattatgaataaaaagtttacactttttttgtgcttacaaaayatgacatattttcccccagtaagctttccacctacctaattcaacttaagctaatttaaacatgagtgtataatttcttttttttcttttttcttgagacggagtctcactctgtcatccagactggagtgcagtggcacaatcttggctcactgcaacctccacctcccaagttcaagtgattctcctgcctcagcatcctgagtagctgcgactacagatgcatgccaccacgctagctaatttttgtattttcagtagagacagggtttcaccatgttggccaggctggtctcacactcctgagctcaaggatctgtccaccttggcctcccaaagtgttgagattacaggtgtgagccaccacgcctggccaaaaaaatgagtgtataattttttgagtgcttattattggaatcrctagtgcaaaaaggcttggaacatcataggaacataaagatttcaatggtattgctactagatattgaaaattgatgttccctcccccacctattgccactatgagcaataactaatacttaatggagcaaatgtaccaggaacacatttgctctgattctgtgaggtaaattcttttattatcctaattttgcagagaaagaaactgaagcacaaataagtcacatatttgcctgagatcacacacctggaatttgaacctaggtatctctctctctctagtacccaatgctctccatcttgctacagtcacaaatatgaaagctgacaatgaaaatgttatctcagtgtccctcaacatggctggctctatcaccagtttgtaggctgttttatatatttaatcaactctcaaattatttctagtttcttcatcattttaagggaaaagaaagcaaaatcttattaaatgtattgaaggagcttgatctgtgtttctttttccttcatgctagattataggctttctaaaagtctgggttttccagaatccattcattgattcattcattgattcaatcattagacaaaacacataaaccaagttcatgttaagcaatcactaaatgacagctattaytattatcaccaagaactaacagcctgaagggaaagatagatacataaatgaaatacatattttttaagtggaataacagaaggaagtatgttagtagcttgcccaagtgatccctaacaacacaatgatagagaatgtgagtccacattttacttttttcattaaagagaatctttcctgagctttatcaatgcctcacttaagacaaatgacagcccttcttttgttcaactttttatcattataatggccattcacacaacaaaagggacatacttgtgtcccttttacacaagtatagagagtgcctttttgtttattcaatagagaagaaactttatagaaaataatacatttataaaatgtatggtctccttgaagaccataaagcatgtgtttgtagaaaataatatacttgggtaaagtaaatataatgatcatttaaaaattattacgtttctaatttttagtggatgcctcatgagaaaggtctatatttaggctacagcaaagtctctggtaacttcagcagaaaataaagacatgtggctacatggctacgcaatttgctcaattgtgtaatctttgtacaaaaaaaaggtcatactgctatcaaaggcattctgcttgccttaggtctgaagcgtgaaatcttaagagccaaaataaaaattacggaaactggaaacaattcctaatagccaactgctaagaaaagaaaaggctctttattcagaaagttatttattaaagtagtgtgaaaagaatggcagtratggaacttggtctttcataaaatgtcaaattcttccaattagcctcagtgttgtataaaggtattttgttatattgctccttggtatttattcaatataaatggtccacaggaaaaaaggtttcaatctcaataatccatttttaaagaaattatttttattatatatttgatgggttatatcagtggctgtaaggagacatctcctgccaggtgttttaagcccttcttattggctctgaccaccactcctacctcacaggatacttcttaatggagagcagtttaattccaggtctttgaataaagccaccttgacagctgccacattacaccttatggaagaccattatctcttttctccrctttccgcatgcccaagaggggtgtttttaaagaagaaaccacacaattagtttataaggcttttagaatttatctttttcgaagagggaagtgaatccaaagacagataagaaagaaaactacttttaaaacgggaatgagtatgaaattcagtaaatcttgcagacagtaaagaaatgaatcaggcacagtgggactggactagtatattttctttaataacagcatcaacatgttatatgatttttcytttttttctaacattatataagtgaatccctttaaatctcaataagaaagaggcaccgactatagaaagttttataatgtgcttatagtttttcaaaatcatatagaaagcatgtaataatgttaagattctgatataatatgcatacatttataagaaaacttttagagtaaatttatgattgcaattgggaataatatacacagatctgattaccatcttggttattgagttccaaataaaaaaaatgacactaaaactatggtgtttagaactatacacagtagttagtaaagaagaagctcaagaacagtgccctcatattttggagctaagcttatcactggaagtaacccactagtaaaatcaaatcaaaacagacargattagcttgtcacatgaaggcagaaagaatcaaacagaaaatctagtaggtcttgccaatgtgaaaaacatgtagcccagttaatgttacatacatctacaaaaatcaatgtctcaatcgatggtgtacagaaagtccaaagtattgtttcagaggatttctaggactgtttgaggaagatgatgccttggggcttcccaaccactgagttgtggactggtacccgaccgtggctggttaggaaccaggccacatagcaggaggtggtgagtagtgggagtgagaattactgcctgagctctgcctcctgtcagatcagtgacagcattagattctcataggagcatgagaactgtacatgtgagggatctcggttgcatgctccttatgagaatctaatgcctgatgatctgaggtgaaacagtttcatcccaaaactattcccatactgactatrtctccattccgcccgccccccaacccaacccctggaaaaattgtcttccacaaaatcagtccctggtgccaaaaaggttgggtaccactgccttactggatgccataggtaattacagttcagtgatagtggttatcaagatagtcgggccaatacttctttgttaaattatctgctcaaaatttttccatttataatctggccatccatacagagttttcaaaaaatgaaggaatatgatggtcatcttgacataaggaacttgatcagtgccataacactgacttaggcatcagagatttgggtcaggtacctggctccgccccttactgctgtcacctgcagcaatcacacacatgtgtgatcaagacagggtcatgggaagtttttggctctgaaaggttaaggtcaagatgaggaaaattctggcctaagaaatcctgcctaaatggtcagctaagctataaggactgaactgaaacagcactgcctccgtgacaaaaatgagaarctattttataaaaccaaaccctggtatatattttactgttctaacaagaaaggaaggytgccgggactgacccacagaccctgacagagcaacagatgagaaaatgcactctgacccagatatccaatgaaagagcaggctaggggaccaggtaacccacagaaagagttgtagcagctgcagccctgacaagctggggctgcaggcatttatttagtacagatttaatgacagaggccttgagtcaacacacttgtgggtaattaacatggtcacccctcatcccctttctatctaacctaagcttttaggcaccggataagagaatctggctgccttcagccaaatccttttccgaagcttttgtaaaacctcccagccttccaagaaggtttgcatctttccacagtttttcccgccaccctgactgatctcctacagaaggcaaaaaaggctgtcaatcaatgaatcaaatatttacttcctagtttttcagataataaataagcacttattatattctgataattaattaactttctaataaccataacaggtcagccggggtccttttattattatctccgcaacttgcaactaaggatcattaaaagatatatgcaaaatgctcagtttaacacctaatttatgctacacccaattttaagccaagagaaggttagatttataatgggatacaacactcaagcaacagaagtggaaaaaataaagattctgaatttcctatccactaattactttgttayaactggagaaatttttctggacacaggcgtaaatatttagtagatttaattctcttaagaataaatttgttaaaataaaaattaagaaaatatttgatagcttttccatttattttgggttttaaattgagataaccagacaaacgacagcaattttggtgattgctggatgatacaaacacctgtgtagctagggctgtacaggcatttttatttggttgacagacaactagaactgaaatcagttgctgaatttcaaccaatttaagtgaattacttgacctacaagctatgtaaccctaaatttctcaatgcagctgccagaaatctattttctaaatgcaacaacagctggttttgaacaatactggaatatagcaattttcagttattcaaaagtatttttctcttgctaaaattataaacattgagaaaataattttcagatttttctgaaagactactattttcaaagtgaaaaacaaacttgaatatcatctttagaaattattgctagctttttttttaacctagaacaacacatataatgatagagtgtaaccctcaccttcattttagaaataacttaaccctgcagtgcctgcaggaacttcaatatgtagacaatttctaaatcaccaaacatattgctcgaaaactacatccttctaggaagaatagacaaatgggccaattaagcctgaggtgaataatactttaaacctgtaaagctttgtaaataattgaaaaactgytcatcacttcaaatactgtcatcaacatacaaaataaatatagacaattccatatgaggttaactcaaaaaggaccttaacctttcaggtgcaattagtatctaaagttcatagaattgttcttggcagttaactcagtttcactggcaaatgactcagtttcttactcatggatttaactgaaaatgtttacaagtcctcattttactttgttctgtctaacttactctctctccagtgctgtgcaatcttgtgtgggctctggatccagactgcctggatttagtactggcaccattccctccttacaacctaatgagatcctgagaagcacaatagaaactctctaagccacaaattccctcttacaaaatgctaacaatactgatcatttaggttgtggattcagtaaacttagttgacttacacaaagaacttaaaacacgctcggtatacaggaagtgctcaacaaatgtagctattattattatctgtatcctcttgtttgggcaaaagaaatgttgctctttcatgcctagccctcttcaaggtccttatctcttcactgtcttgcattgttattctcacactgactcctgtgcctccgcctttgcctaagaacattctgcctctcttgcttgtgagcaatgccagctcacacattcaaaacctaaccaaacaataaaaaacttcacatgattcgggcaacatccttcatagctgctcctccactctgttttacacaaaacattacaatttttgaatagtctatattcatttcttccaccatttacttttaccttttgcagtttcacttccctgaaactgcgttctcaataatcacttaatcaacgaatccacagcagctttttcacaatcctcatatttctcatccttcctaccactgatgagatctcctccctttttgaaactactttattttgccttctgtgccactgcactatcctaaatcttcctccttgtttaactaccacttctctaccttcttrgctgttttcttttcctgttccttccatctaaggctatattcacaggagttctgttctcagtctctctacctctctgcattctctcccaattgatgcacccctatgatttcactaccatgggatgttaactcccaaatctccacctctagttctaaacaccaccacctcatcgctygagtcctgccttttctgattgctgaagatgttcacttggttgttcaaccagcacctcaaacttaycttgtcctaaatcaaacctgcagtttcagggaagtgaaactgcaaaaggtaaaagtaaatggtggaagaaatgaatatagactattcaaaaattataatgttttgtgtaaaagagagtggaggagcagctatgaagggtgttgcttgaatcatgtgattcttaatattcatcttaatatttccacttttatgaattaatgtcaccatcattctttgaattgccaaggtcaaaatatttggatcatctttcctgtctcagcacagtgttctgtgcacaagctctggatggtgaacttgtatcctcattctttcactgcatggcagtgaccttgagcaagtcactgggcttctccaggcttcagtgcggccttcataacatagttatgaagtttacatgagaaaacagttgtgcagtttacatgagaagatgtacrtaagggcacaaagagtttagcatgtggcaaactatgatgaggatgacagaaaaagactctcaatgatctgttcacacttttctcattccttacataactgttgtcacaactcacatggcccttacctatgtcatcgcaaatacatttaaacacaggaggacaacctaggttgtaaagtgttaaagtgcctcaaattttcattaatctcaaccaagccattccaaaccaagacctacaacatacatctacttacatatccatgtgcttttctctcattgtatgctaaataatgcaaagagaattcaggwactgaccttatttgaccccaatttcaaacagcattttataagccatatggtcagaaattaaaatcactctcaattcttgataatacagagtaggtatcagtaacaaactataaattgttttgttattaccctagccaaacaaccacctcatggtccccatttctccaggaactaaaagaaaagtaaatttaattttggccccaaaaagatgtaatgattataacaattactggaaaacaaatatcagaatcatacactatattacacagtcagtataagttatttaatgccttttgctttgtattatcagtgactttgcatccctgcaagaaagcagagttaattaaacatttttataagtatccatctaaatatttaccaaatttggttaaattaggtgtctgtaattagtaatttttaaaaagaaagaggataattaccgctaacgactgtagctctcttgtttcttcctctgctgctgaagcatgatacgacagaacctacagggtaggaaaagaagtccaggttacacaggagagaactaccacatgtagactagaacttcaagcttggaattctgctaagtcttcttggagagataattagactcctcagaatgccaaatcttgttygctgttttcttcaacagtgaaaaacccagatttagattccattgcttgttttggaaaacaaaaagttatactccctatgtttaaagaaaactcttgtaacttccagtctgacattattgctataacaaacacattatttataagccagcctagaaataacttttggctcaaactttggcagaaaatttattttgttttttttttttaagacaatattgactttagctatttctgcttgtgtacagaattaaagagaaaatctctgcataatctgacattttgatattaatatttggaaagaaagtagtctacaagtggctctcagatgaggcctgtaaccattctagaattcacacagaaaaactggatgcctgggacacagtcatgcagatttaaggatccctttacactcctacaatttaagaggtgagaagagagtagtgctggcctgtaaagccatccattgacagttggggacactgagcctcagggagtcacatgatttggctgtaagctcacacctagtgagaggacaaggagatttaggacccagctttcaattcctaacctatacacgttccattacttagagttaaaaaatcaggcttattaacttaatttccattttcaaaagcaatcatttctaattacaagttgagcatcccaaacctaaaaatctgaaatccaaaatcctctaatgagcatttccttttgagtgtcatgctgctgctcagagaattttggattttgaaacatttttgagtttgagatttttggatttggactgctcaaccattaagtataatgcacatgttccaaaaatctgaaaaaaaatgcaaaatacaaaacacttctggtctcaagcatttcatgtaagggttacccaaactgcaatgggattttttttaaacattcttttaaaccaaggtagtggttgtatttaaagtatctatcatgctttgaaagcatatttttttaaagttcatttttgagagagacaacacagatttacaaaaaaaaccccaaaagcttaaaaagcattgatgaaaaggtagctcattttcaaactttaaatggtgagtaaagtaattcagcaacccaaaccagtatttcttgaaccagtctttaaaattttaagtaattaaaaatttaaagccaaatgatacatatttgtactatcttatgatttagaactgttaccatactgcactacattgcatctttcttgccatttgaaccattagtcactaggaaacctcaagaaactcacagctgctctctcctgcacgtgtgaaattgatgggtcatggctataacctgttgctactgagactacagtggtggttccccaagaaaagctaatactgtgtccatgagttagactaatattaacaagtgcagtgcaacatggatacatgaataaagaaatgacacaatacattctaagttaaaaaaattttatcacacacaaaagataaaaataacttacacatggggcataaggattaactttgttaatacatgtaagcattagaatacaattgaaacatctgataaatttagttacttttattgtcatcattattttattgttattagaatgatcacaacttccaggtcaaaataattcactgtcttttgaagacctgaggggtttgtgcccttggcttttgtccaatggtctcataaagaaaggaccatttttttcaaagttatatctatgatcatagaaatgactacacatatgacctgaaatcaaaaactttttatactaggtaaaagcctaattatccatatatttaactgaaagagagctacaaagatagaaataagtctcaatcaggaaaatattcagagattctgaacaaagtaatacaatgtctgggattgcttcaaactaagccagtgggaggggaagggaagtgcagaggagtgcggtgggaatggatggagtgataatggtcatgggttgataattactgaatggatgatgagtatgtgagggcttattaagctttctgtctacttctgtatatgcttgaaactttccataataaaacatttaaaaaagaaataacttctaattgatagctgacttagattaaatttttcaatgaaaaaccatgaaactgaaaaaattagattaaaaattatatttatatattttataataaacacatatatagatatatgtatatatgtgtatctgtatatttaaagctatttgwacacatatgtacatgtgtatatgcacctaattgaaactatatttgaaatatatatttgtgtgtatatgtgtacatatatatttgaaacagatttccactggtttatatattcaaagtcttttatataatactgtagcaaacctattagtataatatattcagcatagaaagtaaagggtaccatctggtatattttatataatatatgtctctctagctctttaaggttagttatgtacttaagagagattgagggaaatgttattatatcccaaacactgattttctctaatttcaactagataagaaatctccatgttacatcaaytgaataatttcaaggcagttagtgaaacatatatagaaaggactgaccctgttggagtcggctggtcctttgtgagaaagagtgttcctcggtcagtccctgggagccagtggtttcttcactcgctacctgcacattcagagtcacctgggggagcttggtagtcatacagattcccagcttctacccaagacttgctgaatcagaactttcagaagtagggtatataaatttatagtttgaaatagtttctcagatgattccaggagttaaaactcttcctgcttttcgttgattttattttttcttttcctcacttctaattctcttaagagtgcctagggtttctgttttttgtttgtttgtttatttttaatttttttccacaactgttctcacggaaagatggggaggctcaggcaatgggaaagagacagataattggcagtagtcatctgtgtcaatggattattaaagtcaatattgctttctgcagaaaaagcaaaggcataaagggataaacatcytgagttgtggtttggttataygacatttgacaagtttcttaaatattctgagtcttagtttctttcattctttagttgaggayaataaggatctcatcatctaaatcacataattttggtgaggacacaatgacrgaacacacacacaccatgagtgattatgagggaaaggtaaaagatgagggtttggctgtacagtgtgagaggtccctaaacttcacccacctccaatgtgaccatttgcttggccatggctctctccactgcttcatacatctgcgtgttctggatccccaagccacaaaagatgacaaaagcttccagaaactgttcgtcatttcggttgaaaggcttaaccttgccagtattctcctccatcttattaacaagttggcaaacccctataacaatccgagaaattgagcaaatgttattgttgattatcatagtttttgtggactttaacamacacacccaaagattgtcttacacttttctcttaggaatgcttagtatgtcgaaataagcaaattaacccccacaaatataagctagagaagtaaacagaatttatatgagaactagtttcatgtagttcaaaatgtacattgctggcgttcaaaaaatcctagagtactattttcttccagactcggtcacgaattttagatcagttgagtccccaaagacaatttgtcctttggaagctaattggatttttgtacacttgccaagagaacgattttgatgcacatcagaattttgggtcaaacagatctcctttccttactgagaaaccagaagttaaacatacacacacacacacacacacacacacacacacacacacacacacacacacggttacatacaaaatagaatgcagaaaggaggcaactgacataagcagtctcaaatttcaaatctacacctctgtatccaacagaatcaaatttgcagaaaacttttgattctgcaaataattatgcaaataaaaatgactacttagaaataaaagttaaacacgtagtcaataaaaatggaagattacatcaacattaggataaatcttaactggttgttctatgagtttctgagcctagtggtctctgtgaggagtgacctcacagaggtcactttgatgacccagcctacctctgtgtaaacaaagtgttgttaaagtccttatcacttctgtctctgagtatataataacaaacttctaccatgtgcccactgtgggataggcattgtgctaaatacttyggtagacacatgatctccagtcttctcaatttattctgtgaggtagatgtgactattctcattttacagatgaggaaactgaatctcagaaagttacatcatttgctcaaagccacttagctggtatgtgtaggtctaaaattcaatccccagctcagcctgccacaagggccactctcaactgccatattacctgtcagatcattgctatcagtgccctggttgcatcttgcttgcccacacctttgcttatgcttttccacaggtctgcactgctccccattgccttccctcccgcctcaccagttgatccctatacctccttcccaatgacctccaggaggcctctaacttacagrtgaggcaggcatttttctattcccttaacatgaccagttggtgtatcatggtaaattttatttctctctctctttctagactgtcagtatcttgggcttagagttttatttatttttttcagctccacttcagctggcaaaaygcctagcatatagtaggaactaaaaaaatgttttccgaattaatgaaagaatgtagaattgcagctctgactgtaactagtttcccatgaagactataatastctattatcctttatttttcctggagcacaaaaggatttcatagagtctggaagacggttgcacattaagcccctttaccaccatcaatgttcactttctttacttttcatactataaatgatctggactctcctttttgctctttttgtttgtttatctactttaaacagtaaagacatctacatgcttatctatttgcaatagtgctgcagaagttactttatcaattattccatagtcaagggaaactttagacaagatataatgaatttggacactgcaagtaaaagccatatactaaatggcaatcagcgttcattatcttaaatgtatatatcctgtgtgtggcaaaaaacaagaacaaaaagcaaaaaacaaaccaagggttatgtccttcaacctttgtgaatccccaaaatataaatatggaactgtttatacaggcttctgtctcctaaatcttattttcttgagagtcacatttcatgcccttatcctcacatcacaatggaattgcctttcagttttactaaagttttctcctacttgatagcctttttcataaacaagattttaaaaattacttcacaagaattactacacgtatagcaagaaaagtacaacacagaggggttgagatgtgaataccaggcaatctgcgaggcttatgacctagctaagtatctctccagtacagcagttcaaatctatgccttggtcaaaattcactgaatgaatatattaagagtcattaaattatacctttggaattgcccgcaagtcctttaaatggaatgttatgtgtagaaatatcaaggttctgctataacaaatacagctcagagcagaacaactaaagtatatccatgttatgatctaccattatagatatagatctataggcacagagttaagctctggggaaaacaacaacaacaacagcaacaaaaatgggtactgaagacaaatcatccatctaggcatataaattaattatctttttgaaagtgaaatgagcagccatatttaaatagcattcatgataatcccattgatctctttacactcttcggaaagtttaattctatcaagcaaaaatacccatgtaaaaacaaaaagttataaagaaaaagagggcttataacaaacagggttccctgtttaagaaaactaaaaacctgggcacatttacagatagagtgttcacaacttcttccttaatgatctgaaagattaaggagtacaataatgaaatttaaaactgaaatttgagatgccacgttactcataaaccatacaaactcagaataatttatatttaaaaatgaaatgtttaatgcaaaaccaaaaataaaagagaaccattcagcaaaaacccattaataagtgcaatcacaaaataaaacaacattcaaaaatgtattgggggaaccaagaagtagtgaagttagcaaactatcagtgttacctaatattattatagagttcataaagtactcagaatgtggtcatcacagtaggtctgagagttggttagcattgaaggcacctctggaaattatgctgaagggactagatggcttctaaaattaaacagttatattttcttttccataattcttgggatcggatgttgttaccaaccacagtcttcctcctggctctttggcagaacagggggtcaatgcttataccctgcttgcagtcttatgtcctctctaccacataacatggactccaaaattagcatcctgccttattaaaatgtaaaacgaacctttatcacctatcttgcaaatacttttgtttctgcacttttcatttgtcaatcatcttaatttggagaggcttttgctgtataaaagatttaattttttaaggagccagaataattatccttacaatattcaactatagtgccttgcttttaaaagaggcttcctcattttaatattatatataaacctatattttccctagtacttttatagatgtattacatttaatcttataatcccacttaatttttcccctaactgctattggagtcttataacatctgaagagttacccattctttgatgatctgaattgtcaccatatactaaattcatatttgtttcaactattacatactttttccacattttaatatttttgaaatcagtatgcatgttatgatcaatagcttgacatagtaaattgaaatcatattttattttcttggagatacataaaatggtgtctttcattcaaaagtatcttacttaaaaataatgaaatataccctactctgttacatacagtaacacaattatatatgccagactatgggtctacatttagactttctgttctgtttcatcaatcttggcatgtcttttagcacctataccatatttttaattattttacttttatatcattttaatttctgaattaaatctaaatttaatttctgaaagggcaataaccatcagctatgattctttttacacctccagttgtaagtattaccaatgtttgtaaatgttgatcaggaacaacctccccacccccacccatgtctcacaaggataataaaattgatgcaaatctaatctgggagacttgatatctcgtaaactagattttaatcatttcagaaatgtattcacttcttaatgatttttaagtcactcagaattttgtagctttcctcatatagatgacatatatttctggccaagtttattctttgttactgtagtaaatggttttatttttttccattgttttctaacaaatttgtcttggcatatattaaaattatttctctttaataatttgataattaggcttcttataaaactcttactagacaggtactttcagctaattctttttgggttttccatttaacactaatataatttgtaagttattttattttgcctcctttttttctgtgtctcatcttatttcaaccttgcctcccttctaattgctttggttagaatttctttgggcaatagttktttttttttttttttaaataacaaattctttctcagttactcccatgaacaattctaaaatcctcttgagttagtattggttattaccaatttttatagaaattycccatttcaccaaatgttaattcctatttgctacactgtaatatcaagtatcttttaaaatgtctttgatatctgtacttacattccctctctcattactatttgtgtttctctcttaatatcctcattatccgttggaggttcatctattattattgtgtttgcccattatctcttatttcttctcatttcataagtttattttttcaattttttcttctactttctttcttctcatgtatatacttatttggggaaggcaacagagtgagaaagagaaaggtgctgtttttctaatttctacggttgaatgcttagttaaaattttttcattatttcttaataataataaaatatttaaagctacataatttcctctgagtatagctttgaccatgtaccttcagtttttatgttatgttaatagaacaattacttttctaaaatgctgtaatttaattatgacttttgatttcttctttgtcatttaggagaatgcgtttcaggttctaagtgagttttttccttccaatttatcttttaattatatattaacagttttaatgcactgtgatctatgaaagtggccaacaattctgcttttcagaaacgactgactttatgttgcatatcaccaatatttgatttctgacatatattttagaataatttatatttttaaattctgaaacatgaaagtaaagctatatatgtcaattaaatccacttaatttttatcaattctaatgtttattttttcctataatttaacactgacaagtatatttcaggcccactgtgatgatcactttgtccatttctccgtgtatttttttttttttttttttttttgagacggagtcccgctctttagcccaggccggattgcagtggcacaatcttggctcactgcaagctccgcctcccaggttcacgccattctcctgcctcagcctcccgagtagctgggactacaggcacccgccaccgcgcccggctaattttttgtatttttagtagagacggggtttcaccgtgttagccaagatggtctcgatctcctgaccttgtgatccgcccgcctcggcctcccaaagtgctgggattacaggcgtgagccaccgcgcccagccttctccgtgtatttttaacagctttagtttttgtatgtcaatgatgctatttagtttattagcattcacagcaattacattttcctctatgagttttaattttactcaatgaaaggtgattctttacattatgttttaccataaattctactttgtttgatagaaatattgttatccctattcaatttttgcccatgttgtataaaatgtgtctttacaaatgacgtatacttcacaggttccaggaattccttagtgtttctgatccactaaagactacttctctgttttctagtgctactaaaaagttttccttatttttgtctttcttcagtcaattattaaatctgtaatctttacattgtttttattatatagatcttcacttccataattctaaactataatatcttaattctatttttttctagttttcttccacctattactgcccttacaccctacagtcttatttccttgtgctcattataastaagcataayttacaattctctaactgggaaaaaacctgratactttaagtaatacaagcaatgtataccatggaagacaatgtacaattataaacaaatgaatagtgatattgccaagtgataaaatttaatatgaaaagtacaatgaagtagtagtcaaacttaagcgatataacattagaatacttatttatgccttggaattctactgcaacacacagatgagcagcttatctctccatgtattcacctatttaawggtccaccygagtaatttattaaataaagccaaaataaattaacagagtaagataagatgacgtggtagtgacaatcaatgattcaaaaattcattaaggcctactcaaaaaaactctgcaggcatgcaggtctcccaaattttattgatagaaaggaactaaaataaggtgccatttggagcatyggaatgatgtaggtgtttagccagttcaaacaggctaacagaacaagtttgaaagtgtaagagacttagaaaattcattgtggaagtaaaaaacagaacattcttacagtgtacatgagaagggattaagatagtaaccagttgacaaatacatatttctttctcatatttctctgtcaaacaatgtgtggtacagcactgtaatttttatttttatgcttttatttattaacaaggagatgaaaaagtaagctatttaaagtggagatgttctaagtatctttttttaaaataaattttcaatgggaataggactagtttctgcaaaatttatcctgaaattgatatggaaaaaataggcataaaaatgtctggtaaatataatattggaaaaaggcatttagcataataagcagggaaaataattagttaaaataaatgaacgttcaatgagaaatatatttccttaaaagtactggaagcaaagtagtggaaacactgtgtattagccagagcactaagaaaacatttgatacgaaacaatacctcagggaataaatgtgatgggacagcaggccccatactggtctaatgtctataattccatctaaatgtcagtaatggaaaaaatgagaagaaggaagaagattacaaacaacacatgtgtccgtctgtctttctgcatgtaactctatagggattctctattagaattacataatagtggaatctggtctatgacatgtaagacaaattatccacaaccatgacattttccatgctacaactgtaggtacataagtatagtccagaaatcaaattcttagttttgtcacccttgtaaagcagcaggaacactggaaattttcccccttatatttgggatctacttgagaacctcccttcaccccacacaaaacccgactaaagaaatcatttcttttcctttctttttatttacaaagaatttttctctccaaaatctacatttgcctacttttggctctgtcatcaagtagggtgatacaaaatgtatgccaagaaaagtctgattgtttcattttttatttttttcttacttgtctgacacagtgacaggatcacagaatgtgaattttgaacagatctgaaaagttattaagttcaactccacagaggtgagtaatgtgcccataagtgtggctgaagatgagtggcgctaacacartgctgtgagtcygacccccagtccagcactctttccatgtcgtctaactcgctctcatttaccttcacataaagtgacaaaggggcctgatgcgtaacttcctccagccactccccgttcccagttattattccaaagaaatgttgctggggaaaagtgaagatgtgacttgatggggcaagctgccactctgccttccttcctatgataacttactagtaaataatgcattccttctggaatttaatttcacattttcaaaggccaaagacagcttgtagtaaatctttatacttataaaaaagcattttaaacagcataayatttataatatagttttccccttgacctccctaagaaataaaattttataacatttacttggtatcatattgtaaggcacccttggcagttttcttttattgcttatgttagagatctgatcagtgacaatctttaaaaaagatctcacagattcattagcctccacttttttctctgagaactgtagaagagttgactcaacagcccagcagggggttggcacgctggtttctaagcggctttaatgcacaattcaccagggtcaggagctgaccctcaaccttttagcttaggcactagattagcatactgaagactgctggggtggagtcacagtaactaagttgacaagactgatttataaaaccaaaatagtatcaatgttcaaaaagaaacagatctgtcccagaaacagaagtataagcacctgcagctccagcccattgcctsaagtccagttcatacaataagaaacaactgtcagggcaaccagtatatttgagaggacatgaataatgcattctcttcccatgagctaacctacactggaaaagaaagtaatcagtacaagttggattggtgggactggaatcagaacaagggaaatcagagtcagagaatgttgaattgtgctaagctgatgtattcctttcacaataaggatgcattctaggcagagggactgggaattggaaagatattactggctataatctgatgcatccattgcacctagtgaaggctcaccatatggtcagaatactcgatgcacactgatacaactctctacatccatctctgtgttagggacaaatgttactttactcttgcacagaacttggacagtcacttttaatatctgtcttwtctttttctattttcattactgataccctctgccccttctttctgactaaaactctcattcaataaaattatagtcaaatcttgcaattggaaaagtattcagacttttaaagttatatttatatatctaaatgttgctccattagggttttaattctaaatttaacctttaaaaagttatcatattttctttatttccaggttcctaggagaatgttaacagtccagacctttttcactacatcaaccacggatgattggcatataaaatcctacttaacctttacataactgcaataccaggaaacwaatatgtcaataaaaggaaacatcattcaatttttctgagaatgcattcttccatcattcctgaagtagaggtttttctataatcatgttaagaacataagctcctgagggcaggaatttctgctttgttcattgatttatcccaactgccaagaacagtggagtgctcaataaatattaaatgaataaataaatataacctataacctaaactacattcttaaaaaaagtcaacatccaggaaataagactctaaaacaatacacattatctacttaatatctcttatacagtctaccaaatttcaatacatcatcaatcattcttaaacaaaaaattctgctgaaataggataataattataaaagtgcaccatagtttataagatatttaacaaatgtctgttggtatttatcaattattttaattattctatcattccaaattttatcttttttaaaacattttattctttacatttgaaagaaagaagtatagctgggaatacatttttaaaaataagtttagagtataggttaaaggaaaggttttacctataactttattcttctttccattttttataggtgtacaaagcaaacttctaatgcactgctggtttacatttcctgtattttcagtctaaacaaaaataaaaagaacaaaacagctaaaatggtaaagagattgatttgtccattagatgccatataaactatatgacacatttgaaagcactatatattcaacttttatattagagagcattggaaagcagaaaatgtataaattataatgaagttcacataaatgcaatataaagcaatgtctactttgttaaaaatatcggaatttttttcactttaaactttccaagcagcttaataataagtaaaatataaaaataagttaaaaaaaataagtaaaagtacagtatctactatactagtgtagtaaatgccccaaataatttaacgagaggggcagaatctaaacgccacctaaaatgcaccgtgttacaaacctgtcctttaataataccactgttgctattgctatattgctaaagttctaacaatgtctccaaataacacccaaataacaaaatcatccaaataacaaaatcaaggcagctgcctcaaagtgcaatgctttcctgaagaggtgagagaaaatactataattcaaatttttcagtgtctgagaactagatatttgtagctttgaggtcaagaaaaacagacatccattttcccagagctactcactatgacagattaccaattgcatcagttcaagccacacagaaactaatttttgcaaataaggcaaaaactctagcaatattatctaaggaatgtcattgacattatgtaggtaatagctaaattacttcaaaaatagtacggtaacttattaatagacatttaaaaaggtgaaaaaagtacaaagaaaaatgtccagctacagctctcaatagatgttatgatctattttattctccttcctcagatgagggaaagcacagatcattcctaaacagtcaattctagagccagtccttcagttcaagaataactgtaagtacagatgtgatgggaaaacagccttctagcttcaagtctaaaattgggttacttactgtccagggaaatcttttatccttactgacatctgggatattaagtggttccatagtatttttgacatactgagcatacatgtaattgattttgtttgcatcatgttccctgtgaaaataacagatatgagttccctctgtgcagttaaaaaaaagcatgggcaaacagttaaataaatgattaagggagaaaaataccagccttaaattataaggcatatatacttatttggaaaatgtagctttaaatgtgtttgatgatttacaactttgtcagttaccataatttaaatgttttgaaaaaacaaaatcccacaaatttccaacaagttttataagtgtgaatggccttattctcatcgcaaatgggcatggtgatttttggtgtcatttaatgtaaactcatatgtcccctcatatcttattttcccatcagattatagaatgcctaaggtctagtgcttgtttcacttcctcattatttggtttctctatccattccaataaaacagtatcttacacattttaagaccaagggaaaaatcaaacagcttagaaaaaatttttaaagctcttctctctagttaagtctattttctttctccttctgtctttttgtcgtgtcttccttagcatctttccctttgttcagtttcctctctacaccttttttctgctttgagatgctttaagatacttttaaaattaaaaatttatcttcctcaagaaatttttatgaacttacaatatttttaccagttatgttccagtctcttgcttaacagagtgaacatgaaagattaatctgatgccagggggtacagtgtcagtgcaagggatggaaaacagaatggaacatgttttttcatcaggaaactccgtatgttcccttgtggtgatgataaattcagcaaagagggtcaggttatgggaatttattctatctataagaacatgcttattttaattgtaatatcactaaagaagtaggaaaacctaacaatagtagacatttcaaaataaaatacagttggccctctgtacccacaagtccacgtctttggatacacccaactgcagtactgaaaataaaccaaagaaaaaaaacaaaaataaaaaataacataaatttaaacaatagtacaacataacaattatttaaatagcatttacattgtattaggtattataagtaatatagagtggatgtgcataggttataggcaaatactacatcattttatacaagggactttagtgtctgcagattttggtatctgtaggggttcctggaactaatttcccaaggatactgagtgacaacagcatacatctcaggaaaaatgtccacttgttctaagtttccaaagttccaatgttttgctatcttctgtccttcccacccaacctgacccagctgcttcttgggacagtggtttcatatggcgtccttcagcgctagtgattccacaaagattcctgaaccctgtggcctggttcctggtcaaaatatttcagtcttccctttgttgtacattttactttaagtgtaatttggtcaaaccaagtactgaccacttgtctagtattatgtatacatgaaaaagaatgaaaaggaaatgacagaagagtgacataatagtaaatgaactttaaattgaatatttcttgagactaggctgagagtctgtgaaggcatgccagttaccatacacatcagacctaatacactcctgaggtcctacttcatacatattatttgagtgacactcaagaaaaggttatataaatgcagggtttagtttaataaaacaatgtttaaaactacaaatattttataaatagcaacagcctagagagaagaaaataagaagctatagtgaaaaaaagaagaaaaatgaaaaggtgaccaccaggagaatgaagtatattggagaagtaagtatccttgtaaaatctcttttaaaatgataattatcatatcaataactattattattcttcatcatcattattttaattatcatcatcattattttaagagtaggagccaggaaaaaatccaaaatggttaagcaatttgtcagagttcataaattcagacttacactagttaatatagagaaagagaagtagaaaaactacttctaaatcaacaaatacctgataccttatttaactccttgaaatttttaggttttcctgatggttactttaagtgaaaaatgagcattagatttattaaagttacatgatactatgtttgtttcttactctataagaaatgttgataaatttttagttcctgaactcaataaataaagattgaataccttctccatcagaggcacccttagcagtatatgggcgacaaacttacataggttagtaactgtcataggagcttacaatctagtagaagactgaaacagaatgaataatgtgtttaaattacatggactatttgggtagagtctagtgcagagactgccagttgtccttcaataattctcctccccttctgtttgtctggacatatatggccacccagaataaagaccacatttctcagccaccctagtggcttagtattgccatctggctaagttctagacaacaggatgtaagagtaaatgtctgtgatggcttctagtaaccttcctaagagacaggtgatacatgctgtctgtcccttctttcccagtcccccatcctactgtttaaaatgtggatataatgactggagctgcatccttgaccctgaaggaaagggccatatcctagggatgtaaggtagaaagtccaaaggtgtcttggtccccaaggtctttgtggagcacagctacagcaccaagcctgagctggctacctctgggcttttacaggagagagtaataatactgtgttcttgtttaagctatttttattttgggttttcatgatccacagttaagcctaatcctaagtgatacggtgtaacaatgcaagcaccacacgtgtggagaagatggacaggtagcacctaaatggagtggaatagggaagaggtagcattagagaaatgaattcacagttggttcagaatttttaaaggagagacatcaggaatgaaaggtagagtattccaggcaggaaaaaacaaaacaaaacgaaacagtataaaacacattgctgacatggaagagttctatgtgtaactgggaaacactaaatagttacagattgtcaagaataaaatgatgatttcaggctgaaaatgttaggctaggacagatagtgaaagattttgaaagtgtaatacaaggaatatggatctcattcttttactgatgggaatattatagtgtcctttagaatgtgcctcagagctccaattgtagaaagagtagctgaccaatgtctcaagttgctgtgctctggaagccatcaacaagtttgcactgaggtcacctctaccagggttgatcccagagaaaaagactgagcacactagggacactaaagtaggcctaatcctgggaggcccagtattcttctcacagtaaatttcagctagaggacttcccagcagccttgccaaaccttccttagaactgttcagctgtctaggatacttctgtacaactttccttccttcttcctctccttaactctgggtcagactttcgtgttggtctgatggctttcctggctccttccctctggttctcacagggtgttttctctaataaatttctgcacatttaatctaatcttggcatctgtttcttggaagacctggactaactcacacatctaaggctttttgtacaatgtgtatcaatgaactgtatatgagtgcattgttgggatgagagaattaggtacgtggagcttgaaaagataaatttctgtgctttagaattaaatgggagtcactgcaggtaatgtaaaccaaagacaaataaaaaaaaaatcaaagagacatggaaataatagctaacacttactgaatgccagaaattttctgaagcattttatatacattatcttatttgattcttagtacaatcctactaccactacagatgaagaaactgaggctttgagagattaaataatttacatgaagtctcacagctagtaagcccagtatgtggtgcaacttaaatacttacatttaaatacaatcagtctgacttctacattcttctacactgtatccacaattttttaaagtagtagtctttacttatttaattacacttatattttctaatatgataatcaataacaagtataaactaatatgtatattccaagaaagtgacctaaaaggattaattctatgtatttatcattttatgacacaaatgtgcatttgtgaatgaacataaagttaattagta

SEQ ID NO: 97264 - DNA, 12558 bp, Homo sapiens
ccaatgtagtatctgtagccatgtcccctaatggctattagtgttcatggttagtgtgttgaagatgagccaggtacataacgcggcacattttctgcaggtcagcagtaaggtttcaaggtacagttatggaggaaagaagaaaatgacacattgataacacaggtctttattcccttttgaatgagacagtttttaaaagttgatttataaatacaaaaatacattctccaaagatagtatttccaaactgttatatacccatctactcccaacatggatataagttttttaaaaaaatagttgtatataacatacatatctgccccagtgttacttcacaggcctatgccctacgggaactccactctcccagccccactttttctcttggttctcccacattcttattctcccacatccctacccacgtttgagctggaaaggatgtccctaccctaggcatgaggtatattttattctgggcaccacacatttgccccatagataacaatacacgtgatgatgtcactagtactacctttctagtatttacatacttaaaagtagtaactagaacagttatcactggaactaagaattttccccacagaggtgaacagaccaagaactaaaatttcaggaaacctgtttaatttcttttgtatctttgaaaagttagttttatatctaagatttcttcacataggttataattcatctgtatgttcaagcttttatgtaaaaatatatagtgccttcagttttaacatagtttcacatgttctcagaactgctaaattcagtgctaccagtaaggcttaataagtagttcattgaccctgtaagataggagcactcagctctgtcacaatttgttgttaaacacatcactcaatgtaagtataaaaatatttattgataaaaaataaacttataattcagcaacttgaagttccaggagcatttctgttgttcctatgtcagtaagcccttgatttttcacattaaggagggaaagctaagcatgttacttgaagtaattttttcccagtcaccatcatgttgatcctgtgcacaacgatatatgcgaggaactcttaagcttagtctttgattctgacagaggtattctatggactgctgcattgaaaagggcttgctgttttcatccaacacctctgtgttgtgtggtcttgctgtgaaaaagaagacaataccttgttttcagtttaagtaggaccactggaggatgcaattatcgggactgtttttaaaacctaaaagcacgtttctttagctgaactctgaagggacagtaaagatacagtattttataaatcaatattctgcatcaaaaagcatcccaacactttgagaggccaaggtgggaggatcgcacgagcccaggagtttgggactagccctggcaacatagtgagaccctgtctctaccaaaaattttaaaaagctgggtgtggtggcacatgcctgtagccctagctactcaggaggctgaggtggtaagactgcttgagtctgggaggtgaaggctacagtgagctgtggtcgtgccactacactctagcctgggtgacagaatgagaccttgtctcaaaaaaaataaaataataaaatttaaaaaaatccttcatttatctctacttatgtttagatagacaactgcatcctgaaataggatggattttgttcaggttaatattagaagagacctgctctgatactacatacaacagaaaggcagtttgctcctactacatacaacagaaaggaaaactaaggtggcctccctattaaacatttgttgcacatttgctgatatttatagtattttataagaaactggcatataacagcagggcaaggtggttcacacctgtagttctagctactcaggagggtgaggcaggaggattgcttgagcccagcagttaaaggctgtagtgatctgattctacgactgcactccagcccgggtgacagagtaagaccctgtctcaaaaaaaaaaaaaaagaaaaaaaagaaacggcatacaaggctgggcatgttggctcatgcctgtaatcgcgcagcactttgcgaggctgaggcagaaagactgcttgacaccaggagtttgagaccagcctgggcaacacagcaggccctgtctctacaaaaaaataaaatgcaaaaaaaattggcacataaaattaaagactgtcctgactagtgcctgaaattatgatgagtttcttcaagtatgaatatataaccaccacctggaaggttcagtaaatgccctcatcaaatacacgctacctttgcacactttgtagtatgtaagatacttgtgtattcagagtaaccaaaatatttaaaggttattggatgttaagaaaacaggcttaccttttagtgttttaaatttcatatagtttctcaatagtactattgtctaataatcaaaattattttatatttctaatctaaacaatattaagctttcactatattttctccgtaccttcatattaaatgcttgagatttactctcaacttcacatgtttgtgcatcactttctttgcagtaactttctgccccaactgtatccataatattgcttccacaattctgcgtattatagccactatccatctgacaggagaaaaaagaaaaaaatatattgtgaggaacttaaaagtcaaatatttaaataagtaaaccactataaactctcattcactacatctgaatgatcctaacatgtaatattgatcatgttgaacaaaattcaaaagtaatgcacaaatataaaaggtagtcctgcatagtactgattattgtagtcattttacaattccttccaatgaaatatatcttgtaacttccttaagaatcagtgaacagcctactgacacaatgctttcctgttattttgtgatcgtacctagtagacaaaaatgagtattacaactaacttcaccttccaacgcattttccaggcttgtctctaaatggcttgaggcatgctgcctttaaaaaagtggattatattatatttacacctagttgttcacaataatgccacatatataatggctctagatgttagttcagcttttcatgttaataaaaattgtagcatcctaagatacactgtttcagtgcaaaagagcaaaaaagaaagattctagcgaacttccagcttggaaacatttattgagtgtctaaaaaggccaggcactatctctatatatttaatatttttttctcctttcaacaaccctaatactttactagagaaggaaattaaggcttaaaaagcttaactttcacaatgtcatccagtgatgaggtgatgaagatgtgagacctaagtccaggttctgttcactgcacaacgctccatttacctgtataatgctgagcaccaaagaaagcaatccacaagggaatcattttgcatttaagccctccctgcaagttaggatcagagggaaggaaaaagctgactgtcattttgtttccctcacaaaggtacagactagcctagaaacggcactctttatcacttaataatcctgaaaaaatgttcccagatttcaaggctggatacatatctgcttactactagaggtcatgttccaattagaacaaaagccttgtgatgtgtaacatttttggggaaaagccttgttctgctatcattcaatagctacttgatcaaaaatataaatgtcagattgctcccagagattctgccaatagctcttccttctaatattcatcactgccaaatagctggcttataatgcaatactaatatgtaactggatatatatggagggaagagttactcattagtacagcaggaagtaaggcatgcggggagtttgtcccacactatgggaagagcaggattgatgagagccaagttgagatggtggctgacttcactgtctctcatctagacttctgctaatgtcaatgcctaatatgtaccaaccaggcaacagataccttgttatcccccacaggcatcaaggcaggcatcaatctcactttatagctaagaaggatgaggggacaaaaattaaaaagtcatgttctattcactgctatgtaaatcttgccttaagatcccacagcctggaaataaaagaactctaattcaaacttggttctaattgcaaactttatattccagttgggtcatggtgcctttaaatggtgtctctatgtcagtcatttaacatgcactttgttactaaatttatttttctaccacataaatcagatgtcattgtcttttaaaactttcaattggcaacagttgtgccctgtgataacattccttgacatctgggcccagcactttagcccttccctcatcattctcagtcccccttgtttgttaccattcaaaggaccttgccttccattactacttatgtttttgcttttattattattttaaactgacacacaattacacatatttatgatgtacatgatattttgatatgtttacaatatgtaatgatcaaattggggtaattagcatatccattaactcaaacatttatcattgcgttgggaactttcaaaatctgctcttcaagctatttgaaaatatacgataaattgttaattacactcaccgtatagagctatagaacactagaattactcctatcgagctgtacttttgtatccattaaccaacctctccctatccctgctccccctacccttcccatcctctactacctaccactattctatactcttctatgaaatcaacctttttagcttccacatgagggagtacatgtggtatttatctttctgtgcctggcttatttcacttaatgtcctccagttcatccatgttgctgcaaatgtaaggacttcattattttttatggctgaatagtattccattgtgtatatataccacattttctttatccattcatctattagtggacacttagggtgattccatattctggctattatgaatagtgcagcaataaacactggagtacaggtatctctttgacatactgatttcctttcctttggatatatacctactagtgggattgctggatcacatggtagttctatttttagttttttgaggaacttccataatagctgtactaattcatattcccaccaacagtgttcaggcactgtttacttatattaatcacaatgatcatgctaatatcctgtaatcctattattatccccatttaaagaagaggaaacaagctgaaagaaactgtcactttctgggatttataaagctaacagagctgggctataaactgaaatctgccattacggtttcccaagcccatgttctttaatgccatgctcgcgcctcaactaaatacatttgcacccacacccatcctggcaccctgccctcctttaaacatggaggagttactgcggctactcctatcagggttctagattctaccccctcttgcatgcctcagttccctcatttataaaacagatcaccatttgacagatgacgatatctattatatctgtaaggtattacagggattagcttctgactgtaaaatgcttggcatggtctctggtacttgaaaaggacatgtgactgatacctattaataattatattaataattatgctgcccaactcctagtttttaaaaatcttctctctcttcatttaaatgctgtatgctgtttcttctgtgttccattactggaacactaagcatgtgggagttacttataccctgttgttcaaggtcatcgccaaggtctgattgcaaaaattcaaaaaattgcaaccttaggcataaatgggttaagtaaaaacaaagtaaaaaagcaaactacaaaaagatctgactttgatgctcttctctaggtatcattttctttcccttcacaactaaactccagagttatctacacacgttatttcattacttcttctttaaccttccttccattcaccttgaggctgttcagttattaattacttttcttattagtccattagccccttttcaagcccaatgttgcttgctcctattttggcaatgctaaccattctttcctgcttaaaatgcttcatgacactgtgctttctaagtgtccctttctcctctttggctggttcttttcagtctccttcaggggctgtacttcctttacctgatccctctcaattcttcytcagagttccaaatcctggctccccgttactctcagtaaataccatccctctggttgaacttaacctacgtattcgttctgtttttgttacacaaatatttaatgagcggctattacgtgacgggttctttttaataagcactggggataaaaacatgcatgactgctgcattagtggtctgattggaaagaatgcaaaatgtgcatggaatcatgaaagcatataatgaggtctggcctggctaatgtgatctgggaaggcttgaggatgtaatcaataagttgtcaatgaaaaaaataaataggagttaactaagtaaaatgggatagaaatgctacatagcatgtgcaaaaaggccctgtaacaagagaaaacgtggctttttaaaactttggaaagctagtgggacctaaacagagaatgaaggaaacaagctggagagtagaaagaccagccttgccagccacattgcagacttttaaaattagtaccgaacgcatttcaaaagtgtagaaaataaaaaactcaatagaaaggttattatataaactggaggaaattgcccaaaaattcaaaaaaggagatttaaaaaaaaaaagatttttagaaattggagaatcaaaagttgctccagagagaacactagaagcagcagaggagaaatctaagatattattcaagaaaagatccaagaagtgaggggagtaagtttacagactgtaagggcattctgagtgaagagtataatggatggaaagaaacccgcattaaaggacatcactgaaatttcagaaccctgtagacaaagaaaaatgcctatccatgtccagggagttggggataaaaagagatcataaacaaaagattaagcactgaaatagcttcagatctctcactgaaatggaagcaatgccttcaaactctgaaggacatttctgaactctcaaatgtgagagacggacacatgatcacacatgcaatgtctttagaaatgtactcttcctcagaaagctagcagaaagctaaccatgtggcagaaatgtaatgtatgaaacatttttagtagacattatgatgttatggcccagagagtaaaactgagactgcttggggggtatcacataacatatttttacccaatagaaggaagaggttgtaatagtaagagaagttaaaaaatgaatggaatagccctgcaagtgtaattaagcatagatagtttgacaagttagtagtgactacaattatgggagaatatgctacccacggcttccaaaggttagttggattagatgatgattaaggtgtatttcaacaaaagtattttgtaattcctctatataaaaaagagagagagaagagagagagagagagagaaagtgaaaaaaggcagagagtaaaagcagcaaacaatgcctttaaggcatatacttttaagcctatatgtgcttttttctatttatgaaaccaactttagagaagctaaaatatgtaaaagtgattctagtataatcttttttgagcaatgaagctgtaagtcaggataggcaacagaagcataaaaatatgagcaaaatactatatttaattttgggtcatttagaatccttccctgagttttaacttcagcatgccaaaactgacaacactaaagccttatagagttggtgtgagaattaaatgaattaataaagtggttagaagagtgcctggtatatcaaaacactatgtgcgtattagctattattataagtcagtattaacttttggattaaagaacatggactctaaagccagactgctgggatcaaatctcagctcttccacttactagttgtatagaaactttaggtaatttacttaacctctctgaccctcagtttcctcatctgtaaaacagggataacagtacacatacctcacaggattgctgtaaaaattcaacaaagtaaaacatgtaaaggtctcagaataggacttggcacatagtaatgctacgttagtgttagatgttattgctatccccttctgactaaagtcagaacttctaaagaagttccttcaaaattctcagctcaaagaacacaacaatgaatggaacaaatgcctttccaaagtgctaattatgaagtatacgtatctgttaaatgaatcaggttttcctgttgtcagagacattgcaaaattggaaatgtataatttcatgaaaaatgttgctataaatcatgtttctaaaagaaaagcacaaaaatgcatacataaaagaactctaaggccaggcgcggtggctcatgcctataatcccagcactttgggaggctgaggtgggcggatcaactgaggtcatgagttcgagaccagcctggccaacatagctaaatcctatctctacaaaaatacaaaaattagccaggtgtggtgacgcacacctgtagtcccagctactcaggaggctgaggcaggagaattgcttgaacccagaaggtggaggttgcactgagccaagatcacaccactgcactccagcctgggtgacagagtgagaccccatctcaaaaaaaaaaccagtgctctaaactctttttatcccccctaaatcacataaaggaaaaacaaaaatgattttatttttagaatgcaaatactataccagaccttgcatgttttgggggactggatccacatgaaacagtgatgaatcctgcctgactctagcaggattgatttctctagagcaggctaatttcttttctgctcttaccttttcctactccatacaaatatcagttaatgtgaatataaaatatgccttatctgtcataattaaaataaatttactcttctcatatcacttggtattaatatttttaaaaaatattatataatactgtagtcctcatgtttaatccattatctttcttatactataatcttagaaaggataaagaacaccaaggcagtgaggaaggggctatagaatattaaataccttacctgaatgttactgctttcacaaggaatgacactgctttcagcaagaggtgacatgcacatatgagagttttcaatactgaaggcaatgccacttacaaaatcagtcatgggtaaactgccattatcaaccggctccttaatccaagtggtctcatctgctatctctataggatcaaccatatccacagtgttattgtctttctccctttcaacatcctgcaacagtgctaattctttctcagaagcactggactgattttgtgtaacagacatggcagtcacaaccaaatgtgtaccatgggtagaagcctcattactaaactgccgtaggtgtattccagcagcatccatggcgggtgatgagacatctgtggaaggaatattctctttatcttcctcatcttcaccttgagtctcaagagtaaaaggtatctgaatcactgaggtccgatactgagtaccaccactatacatctgaagtctcataggagaccaatttttaattggcgagcagccatctatataaggacttctgatacacggattagttatcccattagaatttgttccagatgaagcatcaggagaatgaacagtaaacttcctttgttctgaaaggtgggaagggaaaaaaaatcacatcataaaaacatgaaaatggaaaagtcactactaaatggtaatcatgtttcatgccaggaaaaactgcatttctgtaacagttgtgttgtttaccaaagtgaaattgtgatgtcaaaaacaatagcacaaatggaaattgctaaatttcctttgatagtgtttgatgtaaatattgctaattaaagtaactatatttaacactacagtacaaactggtgagaattccagcctttgaaggtaaactgttcttttatttaaaaatcaaagttcctaaatgttagaaggttagtgatcattttgagctctatcattaagacaaattaaaagaacctctctaataacaaatattgatagtataaaacttttaactaggtattttattatgagacatacctgagagtggagtctctcctatctgaaattcaattggtgagaaagtgggtgaagaaataggcgaaggactagttatgcttcccaagctgtatttttttgcactagcctgaatagggctagaagaaaactgcccctgtaataaaattaaatagtaaataaatgtatatggttctcttccttaactcttatgctgcatgctatttatcatggtcttcaaaacacacttataaactagtaatagttcacgagaaccaccaaaagacaccttgcaacaaagacaactaagaagattgctacaaaaattctgaaatagtatcaaatatgttagtcaaaatataaacacattgtatttgaacaaaccattaagtttcacactaagcaaccatctgtgaaaaatttttaaatttattaatgccaagccagttgtattatactgtaaatctcacacactttagtaaataacctatgctgaatttccttgagactcatgataaatctggtcatcctgtacatatctaaatacaaaattgaagagtctgacctaaaacatccctatgactaatgataacatacgaactagagttagtttctgtgaagcataatactcaaaagacaaccatccctccttctgaaagcaatctgggcagctcacaggggtgtccaagggagagaatacagtcatgagttcttagtttctgtttctggttaggccagtaaaggcccttcctcatccctcttttccacttatttactagagacagaaagcaaccatggcttcaggctgctgaaagcctaagatagaacaacaacaaaatgtgggttcaagcttgacagcatattagccaactgctttttagtatacttctcaccgaacttggtgtctgcaaggggctcctacactttacaggagacaaatctattgaataaaacatctctagtgatgtttgaacaccactgtgaggacttccgggagaagccgaaggtaaggagtcggagatgcttccgttcccatctaaaaacagctttcttctgagggatgaagaactgaggtttccaggagattgatctgcaaattcatcagctctaaaatagtcacctatatttaataataggagaaaaggcaaagctagtcattttaaagggcaattatacttctgttactcaacttttaagaagccagcatgcactatgtttgaattttttcccaaaaagagggcaaagtttaattgcatatttgatgttttacatcttaaattattccttagtttttaagtgctacattgttagtataatatcaataaaatgtttatagtttctgtctatagtaataaagttcactatgataataaggctagttcaaaccatgttcaagaaaaagagaaatttcagggcagtttccccacttctttagaaagaggcactgccacatatttcccatgttaccatttacaaaaagccagccaaacaaaacctttggttcaagttattaaaagtttaaacaaatacagtatttacctaatatattttctaaattaaaatccacaggaagagacagcaatgtctgacaagcagctggaaacaagcaaataaataaacaaattcaaacatgggataaatcaatgaaagtatacactatacaattcagcatgtgctgcccagtcaatcatctccccgtgatgttccagccaaatggaattattcatttctgcattctatcacataccctgccacctttctagaagtggtttcccacactctccgcaactggtgtaaacgtgttaatagtaaaagttaactcctggctctggtactggcacttgaaaaggaagccagcctatatctggggggagatttctcacattaaccaattttcaaaagaatgctttccaagaccagaaatcaattcacatgctttgaacaagaaaacaaaacactagtgctatttctaaaacatggctggatgcatctgttctactatacttgtttttaaaggtcagctctcatatggttattatgtagctcattgaaaaaatccaaacaggccaggcttggtggctcatgcctgtaatcctagcactttggggggccaaagtgggcagatcgcttgagcccaggagttcgagaccagcctgggcaacatggcgaaatgctgtctctacaaaaaaatacaaaaattagccaggtgtggtggcgggtgcctgtagtcctagctactgaggaggctgcggtgggaggatcactggagctcgggaagtcaacgggaagtcaaggttgcaatgagctctt

SEQ ID NO: 97265 - DNA, 46732 bp, Homo sapiens
  misc_feature (1)...(46732): n = A,T,C or G
gctaatttttgtatttttaatagagacggggtttcaccatgttggccaggctggtctcaaactcctgaccttgtgatccacccgccttggcctcccaaagtgctgggattacaggcgtgagccaccgtgcccggcctccttgttttttttctaaaacaagtactgagtataaaacaatataaaacaatatgagacggtttctctcttccctcaccagcactttgggaggctgaggcaggtggatcacaaggtcagagtggatagcactttgggaggttgaggtgggaggatcccttgagcccaggagctcaagtccagcctgggcaacatagcaagacccccatttccaattttagtgtatgtgctgccaaagcaaatactctgagaccctgtttctacaaaaaataaaaaaattaaaattagtgcttggaaaaaaaaattagtgcttgaccaggaggcaagcacacctcctcatcctctcatggatgtctgtctgtagaaagtaaatggagacagcttcattttacccaactgctccgttttaggtccgctcctgagcttctgttgttcccagccatgcaaccctgggagccgactcccggctgcagagccttgtcagaagcaggcaatgtacacagagacccaaggcctggtgtagacaggctttcacagacctgggcattttgttgaattgtttttgaattgtggtttcttatcagttcatccgatactctgttctaaccacgtagttcctcttttggatctccaaacccctttgcaggttccatctacccgaaccaaactcacttattccaacagaagtctggtgtttcttgttttttttgtttgtttgtttctttcgttttgttttttgagatgttgtctccctctatcacccaggctggagtgcagtggcgagatctcagctcactgcaacctctgcttcccgggttcaagcaattctcctccctcagcctcctgggtagctgggattacaggtgcctgccgccacacccagctaacttttgtatttttagtagagacgggatttcaccatgttggccaggctagtctcgagctcctgacctcaagtgatccacccatctcagcctcccaaagtgctgggattacagccttaagccaccgcgctcaaccagaagtctgtttaaatccatccttctccccagccacccatgagttatgtgaccttggggttgctacttaacatttcagtctcaatttcctcaatagaacaaaagttagaagaataacaaaagatagttttatttttatttttatttttattttttgagatggagtcttgctctgtcacctaggctggagtgcagtggtgtgatggtggctcactgcaagctccgcctcccggattcacgccattctcctgcctcagcctcccaagtagctgggactacaggcacccgccaccgtgcccagctaatttttttaatttttagtagagacggggtttcaccgtgttagccaggatggtctcgatctcctgacctcgtgatccgcttgcctcggcctcccaaagtgctgggattacaggcgtgagccaccatgcccagcacaaaagataatttcttaatcccatgcatttgagtcttaaaaaaatattctatataattccaaggtcaaagaagaaataacaaagggcatttttaaaaatgctagaactgagtggtggtgaaattgctgttgaaatgtgtttgttgcactgatggaaatttataaatgtaaatatttatattaaaatataaaataatgggccaggcatagtggctcacacctgtaatctcagtactttgggaggccaaggcgggagggccatggagcccaggagttcaagaccggcccggtgtacaaagtgagacccagtctctagttaaaaaagagggggagtgggccaggcacagtgtctcacgcctgtaattccagcactttgggaggccaaagcaggtggatcacccgaggtcaggagtccaagaccagcccggccaaggtggtgaaaccccgtgtctactaaaaatacaaaattagcttggtatggtggcgggagcctataatcccagctagggcaggagaatcacttgaacccgggaggcagaggttgcagtgagccaagatcatgccactgcactccagcctgggcaacaacagagagacttcatctctaaataaataaataaataaataaaagaaaatacaaattttttaaaaaaggtactgtggctgggcgtggtggttcacacctgtaatcccagcactttgggaagccgaggcaggtggatctcagatcaggagttcaagaagagcctggccagcatggtgaaaacctatctgtactaaaaattagcctggcatggtggcaggtgcctgtaggaggctgaggcaagagaattgcttgagccccggaggcagaggttgcagtgagccgagaccacaccactgcactccagcctgggcaacagagcgagagtctgtctcaaaaaggaaacaaaaaaaaaagtacctccaaattatggtagggtgtccatattaagaaggtagaaaaaggtcgggggaagtggatgcctgtaatcccagaactttgggaggctgaggcgggtggatcacctgaggtcaggagttcaagaacagcctggccaaaagggtatggtgaaaccccatctctactagaactacaaaattagccgggcgtggtggtacatgcctgtaatcccagctacacaggagtctgaggcaggagaatcacaggaaaccggcaggcagaggttgcagtgagctgagatcgcgccattgcactccagcctgggcgacaagagcaaaactccatctcaaaaaaaaaaaaaagaaaaaatgaaaaagaatttattgaaatgtgcagtctgaaaactgctcctgcacattttcattcatccttcctattccctccatccctcaattttttttttttttttgagacagagtttcgctcttgttgcccaggctggagtgcaatggcacgatctcagctcactgcaacctctgcctcccaggttccagccattttcctgcctcagcctccagaatagctggaattacaggcatctgccactacgcctggctaattttttgtgtatttttagtagagatggggtttcaccatgttggtcaggctgatctcgaactcctgacctcaggtgatccacccgcctcggcctcccaaagtgctgggattacaggcgtgaatcaccacgcccggcccctcattttcttttttttctttctttcttttttgtttgtttgtttttgagacagagtctcgctctgtcgcccaggctggagtgcagtggcgcgatctcagctcactgcaagctccgcttcccgggttcacgccattctcctgcctcagcctcccgagtagctgggactacaggcgcccgccaccacgcccggctaattttttgtatttttagtagagacggggtttcaccgtgttagccaggatggtctcgatctcctgacctcgtgatccgcccgccttggcctcccaaagtgctgggattacaggcgtgaggcaccacactgggccccctcactttcttattctttctaggataggcaactgagcgcggcagtgaagagctgggcttccggaagctgacagctgtttgtgatcttcaagacctcagacaggttttctaaatatgccttgccttcattttctcaaggaaagtgaaaaatgggtaggatcatggcaatcactactgtgtagcaatgtttagaggacttaataagtaaacacagggtcaagcatggtggctcacgccggaaatcccagcactttgggaggccgtggtgggaagattgcttaagcccatggggttgagaccagcctgggcaacatagtgagacctccatctctataaaaaatacaaaaatctagtcaggcgtgatggcgtatgcctgtagccttcagtaagctatgattgtgccactgcacaccagcctaggcgacagagtgagaccctgtctcaaaaagaaaaaacgaaaagaaatatagatgtacatatacatatgttggttctaaaacatgaaaaaggctgggcgcggtggttcgtgcctgcaacccaagcactttgggaggccgaggcgggcggatcacgaggtcaagagtttgagaccagcctggccaacatagtgaaaccccatctctactaaaaatacaaaaaaaaggctaggcgcagtggctcatgcctgtaatcctagcactttgggaggccgaggtgagcagattacctgaggttgggagttcaagaccaccctgtccaacatggtgaaaccccatctctactaaaaataagaaaattagccgggtacagtggcacgcgcctgtaatcccagctattcaggaggctgaggcaggagaatcgcttgaactctggaggcggaggttgcagtgagccaagattgcgccactgcactccagcccgggcgacagtgccagactcagtctcagaaaaaaaaaaagcaaaacaaacaaagaaacatgaaaaaaagctataaaacccaacttttttctttttttttttgagacggagtctcactctgtcgcccagggtggagtgcagtggtgcggtctcggctcactgcaacctccgcctcctgggttcaagcaattctctgcttcagcctcccaagtagctgggattacaggcacccgccaccacgcccgactaattttttgtatttttagttgagacggggtttcatcatcttggccaggctggtcttgaagtcctgacctcgtgatccacccgccttggcctcccaaagtgctggaattacaggcgtgagccaccgcgcccggccaaaacccaactttttagtcttatttatatggtgtttttttttttttttttttttgagatggagccttgctctgtcgcccaggctggagtgcagtggcgcgatctcggctcactgcaagctccgcctcccgggttcacgccattctcctgcctcagcctcccgagtagctgggactacaggtgcccgccaccacgcccggctaattttttgtatttttagtagagacggggtttcaccgtgttagccaggatggtctcgatctcctgacctcgtgatccacctgcctcggcctcccaaagtgctgggattacaggcgtgagccactgtgcccggctatatgtttacaaaattaatactgccagccaggcacggtggctcacgcctgtaatcccagcactttaggaggctgaggctggcagatcacctgaggtcgggagtttgagaccagcctggccagcatggcaaaaccccgtctctattgaaaaaaatacaaaaattaaccaggcgttgtggcgcatgcttgtaatctcagctactcgggaggctgaggcaggggaatcacttgaagccggcaggcggaggctgcggggagccgagatcgtgccgttgcactccagcctggggaacagagcaagactccattaaaaataaaataataataatactgtgaatgtgaaactgatgaacttggtgcttttcatgcgtctcatagttgacgtgtcattgatatttcacttgaaatacggttggatttttattaataatatacctggggtgatgggagaaggtagccaatcacagctgaggcttctaagcggtgattctcagcctcggccgcaatcacagttatctgggactctcgaaagaactccagggtctgggcagtcccagtgtaaccaatcaagcagaatctctaggcgttcgtgctttgaaatgaggctccacataggtaagtttaacaggcagtcaagatggaggaccacaggtggagatccggaagctcaggtgaaggaccgccccccaacaccccccgcccccaaaagacctctcagtaattccggtggatacaggaagtgctcagcaacgattacgccccgagggccaatcacagggctgcggccgagaragaagccttawtagagctttctcaacctgcagccctcatctccgccggcgagtagggccaggtgttgggaggtgagtagctctccggcagctctgcaacttcatttctttatttctccattccacagttggtaaaatttctccttttatttcatatattttttttctgagacggagtctcgctctgtcgcccaggctggagtgcggtggcgcgatctcggctcactgcaagctccgcctcccgggttcaggccattctcctgcctcagcctcccgagtagctgagactacaggcacctgccactatgcccagctaatttttttgtatttttagtagagacggggtttcaccatgttggccaggctggtctcagtccgcctcggcctcccaaggtgccgggattacaggcgtgagccaccgcgcccagcctttttttttttttcttctcttttttgagggtcttactctgtttcccaggctggagcgctgtggcaggatctcggctcactgaacccttgacctctcaggttcaagcagtcctcacgcctcagcctttgaagtagctgggaccgtgggagggtgccaccacatctgttctggctaataatattattattaccactgtttgcagagactcactagatgtagggtcttaatatgttgccgaagctggtctctaactcctgggctcaagcgatcttcctgcctcagactcccaaaattctgggattataggcaggtgccaccgcgcccggcctaaatcttttcttctgttagaaattaagtggttctgcctgtctcagtggctcacgcctgtaatcgcagcgctttgggaggccgaggcgggaggatcacctgaggtcgggagttcgagaccagcctgaccaacatgtagaaaccccatctctactaaaaatataaaattaggtgggcgtggtagcgcatacttgtaatcctagctactcaggaggctgaggcaggagaatcacttgaacccgggarggcggaggttgcggggagcctagatcataccattgctctccagcctgcgcagcaagagagaaactgtctcaaaaaataaaataaaataaaattcagtggttctgactggggaaagagtagcagatgcttagatctagagagactctagttaaggttggctcataagaggatagttgtgtgtgcttttatttctgttctcttgggggatttaggatagagctatagagagctccaaaaaaaaaaatatattggaacaggtcagatgctgtggttgctgtgtgtggagtcctgggcagtgctaaggttttgtgtctaatgagtcctcttaacaagaaggtattgttttttattcactgaggtgagggagcctcttagcatcattctagtccagcttccggacctgagtcttatgcaaatacctatgccagttgccattctcacgctattcacagctatcatataaagaggtgttataccctttctgtaaagtttttgttgctactgctatttttttttttttttttttgagacaaagtctagctctgtttcccaggctggagtacagtggcgctatctcagctcactgcaacttccacctcccaggttcaagcaaytctcgtgcctcagccttctaagtagctgggactacagccgcctgtcaccaacctggctaattttcgtatttttagtygatatagggtttcactatgttggccaggctggtctcaagctccagacctcaggtgatcctcccaccttggactcccaaagtgctgtgattacaggcgtgagccaccgcacccggccctgttgttgtttttaaaatagagacagggtcttaagttgccaggctggtctggaacttctggactggagtgatcacccacctgagcttcccaaagtgcggggattgcaagcgtcagccaccacccccagtgttgtgtttttgtttgttttaccaggctggagtgcagtggtgcgatcacagctcactgcagccttaacttccctggctcaggtgatcctcccacctcagcctcctcagtagctgggactacaggtgcatgccactatgcccagcacaattttttttttttttgtatttttttgtagagacagggttttgccatgttgcccaggctggtctcaaactccaagcaatcctcccaccttggcttcccaaagtgtttggggttccaggtgtgagccatggccccccggccagcttcagtaaagtaaaagccacacacctgtgtcctgagaccaggctccaccactaagttatctttaagcctttttttttttttgagacagtttcactcttgtcgccccaggctggagtgcagtggcgccatgtcagctcaccacaacctctgcctcccactcccaggttcaagcgattctcctgcctcagcctcccaagtagctggaactacaggcacctgccaccacgcccggctaattttttgtatttttagtagagacggggtttcactgtgttagccaggatggtctcgatctcctgacctcacgatccgcccgcctcggcctcccaaagtgctgggattgcaggcgtgagccaccgcgcccggctgtgtgtttgcattatcatattcagcccagttttcacgaagtttcttgtctcctgggtgatccacgtagctccccasttccttatctgatctatgcttgtcctttcatkgttgtgttactactttgctataatgagagagtgttttcgctttataggttaacttttagaacctgagcagcccctcagggaaaaccctgacagtagctggttattttgcaattagaaaaactagctgggcactgaggcaggtgaatcacgaggtcaggagttcgagaccagcctggccaacttggtgaaaccccccatctctactaaaaatacaaaaaaattagctgggcacagtggtgaatgcctgtaatcccagctacttgggaggctgaggcaggagaattgcttgaatccgggaggcagaggttgtagtgagccgagattrcagcactgcactccagccagggtgacaaagtgagactccgtctcaaaaaaaaaaaaaaaaaawatacaaaaagtagctgagcgtggtggtgggtgcccataatcccagctagtcrggaggctgaggcaggagaactgtttgaacctgggaggcagaggttgcagtgagctgagatcgtactactgtactccagcctgggctgcagagtgaaactatctcaaaaataagtaaataaaagtaaaatgagttgaggtcttgctctgttgcccagatgggagtgcagtggcacaatcaaggctcactgcagtttcagtctcccaggctcaagcaatcctcccactgcagcctcctgagtagctgggactacaggcatgtaccaccacccactgctaacttatttttcatggagatgggggtctcactatgttgcccaggctgggagtttgttcttgaagaagcagggtagatggtgagtgtccttgttcgtggcacagcaggaactggcatttgagacaggastgctaatcacyatccctctccactcctcccttgattgtcatcacagctcccacgtgggacaagatggtgtcttcggcrcagatgggcttcaacctgcaggctctcctggagcagctcagccaggatgagttgagcaagttcaagtatctgatcacgaccttctccctggcacacgagctccagaagatcccccacaaggaggtagacaaggctgatgggaagcaactggtagaaatcctcaccacccattgtgacagctactgggtggagatggcgagcctccaggtctttgaaaagatgcaccgaatggatctgtctgagagagcaaaggatgaagtcagaggtgagyggaaatcggtccacactgtgtcctaggaggaagcaggcgtcctctccaggactttagaaattcagaaggccaggcgcgctggctcacgcctgtcgtcccagccctttgggaggctgaggcggttggaccacctgagggtcaggagtttgagaccagcctgaccaacatggtgatgaaacagcatctctactaaaaatacaaaaatttgctggacgtggtggcagacacctgtaatcccagctactccrggaggctgaggcaggagaatcacttaaatctaggaggcgggggttgctatgagccgagatcacgccattgcaccccagcctgggcaacaagagcaaaattctgtctcaaaaaaaaaaagaaatggcattgaggcttggagagggactgcttgttctgaatgcaggtgctggatcttcataaaccctggtgtctgtcctggtccttattttctacctacttctttttttttttttttttgtccttttatttttttattttttattttattattattattttttttattatactttaagttttagggtacatgtgcacattgtgcaggttagttacatatgtatacatgtgccatgctggtgcgctgcacccactaactcgtcatctagcattaggtatatctcccaatgctatccctcccccctccccccaccccaccacagtccccagagtgtgatgttccccttcctgtgtccatgtgatctcattgttcaattcccacctatgagtgagaatatgcggtgtttggttttttgttcttgtgatagtttactgagaatgatggtttccaatttcatccatgtccctacaaaggacatgaactcatcattttttatggctgcattgtattccatggtatatatgtgccacattttcttaatccagtctatcattgttggacatttgggttggttccaagtctttgctattgtgaataatgctgcaataaacatacgtgtgcatgtgtctttatagcagcatgatttatagtcatttgggtatatacccagtaatgggatggctgggtcaaatggtatttctagttctagatccctgaggaatccccacaccgacttccacaatggttgaactagtttacagtcccaccaacagtgtgaaagtgttcctatttctccacatcctctccagcacctgttgtttcctgactttttaatgatcgccattctaactggtgtgagatgatatctcatagtggttttgatttgcatttctctgatggccagtgatgatgagcattttttcatgtgttttttggctgcataaatgtcttcttttgagaagtgtctgttcatgtcsttcgcccactttttgatggggttgtttgtttttttcttgtaaattattttctacctatttctatcgctttcaggtatcgtacagttggcctaacatatctgtggatttaaccaatcctagatcaaaaataatgggggcaaagacaattaaaaataacaatacaataaaatgcacatgaactatggttatttaactcttcttgagagaggatctcactctgtcacccaggctggaatttagcagcacgatctcggctcactgcaacctccgcctcccgggttcaagcgattctcctgcctcagcctcccgagtagccgggattacaagcatgtcccaccatgcctggctgatttttttttttttttttttgtattctaaatagagatggggtttcaccatgttagccaggatagtctcgatgtcrtgacctcatgatctgcccgcctcggcctcccaaagtgttgggattacaggcgtgagccaccgcacccagccagcaagtgcatttagaactactctactttctaccccataacttttttttttgtttgtttgagacaagtctcactctgycacccaggatggagtgcagcagcacaatctcagcttattgcaactcccgccccctgggttcaagtgtttctcctgcatcagcctcttgaatagctaggattatacaggcacctgccactgtgcctggctaaattttgtattttaatagagatggggtttcactatgttggccaggctggtcttgaactcctgaccacgtgatcaacccgcctcagcctcccaatgtgctggrattacaggtgtgagccgccatgcccagctacacttttttttgaaacggggtctcgttttcttgctcaggctggagtacaatggggcaatcacagctcactgcagccttgacctcccagacttgagcaatcctaccactatggcctcccaccacacctcgctcattcttgtatatatatatatttttgtagagatagggtttcaccatgttgcccaggctggtctcgaacttctgtgggctcaaccgatcctcctgccttggcttcccacagtcctgggatcagaaacatgagccacagtgcctggccagtgcagctttatttacagtaaccaagatatagagtcagtctaagtgaccatcagtggatgaataaaaaatgtgcccgttgggtaccctgcctactgcctgggttatgagattgttgggaccccaagccttaaaaaggaaacatggtaggccgggcacagtggctcacgcctgtaatcacagcactttgggaggccaaggcgggtggatcacttgaggccaggagtttgagaccagtcaggccaatgtggtgaaaccctgtctctactaaaaatataaaaaaatcagccgggcgtggtggcacactcctgtagtccyagctacttgggaggctgaggcaggaggattgcttgaaccagagagtcagaggttgcagtgagccaagatcgtgccactgcgctccagcctgggtgacagcaagactccatctcaaraaaaaaaaacaaacaaacatggtattaattacacaatggaatactcctcaaccttaaggaactcctatctttttatttaaaaattgccagttttatttcagctagagatcactttttagcataatgtttcctgtctttaacaatgggtgagggtttttttttttttttttttttggtttggtttggattttggttttgcttttgagtcgaagtttcactcttgtctcccaggctagagtgcaatggcgcgatctcggctcactgtgacctcctcctcccaggtttaagtgattctcctgcctcagcctccagagtagctgggattacaggcgcctaccaccatgcccgctaatttttgtattttagtagagacagggttttaccatgttgaccagactggtctcgaactcccgacctcaggtgatctgcccacctcagcctcccagagtgctgggattacaggtgtgagcaaccatgcccggccaagggtttttaactttagctgacctccggaggttacaagtttgaaaacggcaggaggaaacccagagagttgtaaacttacgaaggtctgggctctgaaaaagatacaaattttctttccatgccaatagcrctcacacagacatggtgaatgttcctgaaacccgccggactttctgtaagaagtgtggcaagcaccacccccacaaagtgacacaaggcaaggattcttggtatgcccaggggaagtagtgttatgacaggaagcagagtggctatggtgggcagactaagccgattttccggaaaaaggctaaaactacaaagaagattgtgctaaggcttgagtgccttgagcccaactgcagatctaagaatgctggctattaaaagatacaagcagccaagcgcggtggctcacgcctgtaatcccaacactttgggaggccgaggtgggcggatcacaaggtcaggagtctgagaccagcctggccaaaatggtgaaaccccatctctactaaaaatacaaaacttagctgggcatggtggtgtatgcctatagtcccagctactcaggaagctgaggcaggagaatcgcttgaacctgggaggcagaggttgcagtgagccaagattgtgccactccagcctgggcaacagagtgacactctgtctcaaaaaaaaaagatgcaagcattttgaactggaaggagataagagaaaggaacaagtgatcsagttctaartgtcatcttttcttttatgaaggcaataaaatcttgagcttatggtaaaatgcaaaattttccccccttctcctttttcagaagcagctttgaaatcctttaataaaaggaarcctctatcattaggtaagttacctcatttataacttttattcttcatgtgagatctggggactcsggcctttgttttaaggagaatgtgctgagcactaagaatgcaaagaaatgccggacttagcatccctgctcccagggcggagctggtctcscaggtgcgtagcagtaagacctgggaagctgaaacacgatcgcgtttgttggaaatctataaatacatacaaagcggggaagggtaagcttggcctttgaatctggataagstagagacttttcttttttgagatggaggcttgctctgtcacctaggctgaagtgcagtggtacgacctcggctgactgcaacctctacctcctgggttcaagcagttctcctgcctcagcctctagaatagctgggattacaggtacctgccaccaggcccggctaattttttgtggtgtttgtagagatggggtttcaccatgatggccaggctggtcttgaactcctgacctcaagtgatctgcccacctcagcgtcccaaaatgctgggattatgggcatgagccaccaccacacccggttttgtttttttttttttttttttttttttgaaacagggcttcactctgtcacttaggctggagtggtgcaatcatggttcactgcagccttgacctcccaagctctggtgatcctcctgcctcagcctcctgagtagctgggaccacaggcacttgccaccatgcctggctaatttttttcactttttgtagagacagggtcttgctatgttgcccaggctggcctcraattactaaactcaatcagtcctcctgcctcaccctcccaaactgctggggtacaggtgtgagccatgacacctggcccttaccagctacttatatcctgaagattattattatttttttwttttttgagatagagtctctctctgttgcccaggctggagtgcagtggcgtgatctcggctcactgcaagctccgcctcccgggttcatgccattctcctgcctcagcctcccgagtagctgggactacaggcgcccaccaccacgcctggctaatttttttgtgtttttagtagagackgggtttcaccgtgttagccaggatggtctcratctcctgaccttgtgatccgcccgcctcggcctcccaaagtgctgggattacaggcgtgagccaccgcgcccggcccctgaagattgtgttttgagatggggtcttgctgtgttgctccggcttgattgcagtggcacagtcatagctcattgcagcctcaaccttccaggctccagagatcctcttacctcagcctcctgagtagctgggactacaggtgtgcactgccacacctgactaatatttgtatttttggtagggacagtttcactatgttgccagatatggtgtcaaactcctggtctcaagtgatcctcccaccttggcctcccaaagtgctgggattacagacatgattcaccacacctggccatgaagactttttttttttggacaaagtctcactctgttgcccaggatggaatgcagtggcatgatctcagctcactgcaacctctgacctccgcctcccggttcaagtgattctcttgcctcagcctcccgagtagctgggattataggtgtctgccaccaagcccagctaatttttgtaattttagtagagatggggtttcaccatgttggccaggctggtcttgaactcctgacctcgtgatccacgtgcctcagcctcccaaagtgttgggattacaggtgtgagtcactgcgcctggtctcatgaagaccttttttgagacagagtcttgctctgtcacccaggctggagtgcagtggtacaatctcactgcagcctccgcctcccaggttcaagtgattctcctgccttagcctcccaagtagctgggattacaggcgcctaccaccacgtctggctaatttttgtatttttagtagagacagggtttcaccatgttggccaggctggtytcaaactgctgacctcaaatgaactgtctgcctcagcctcacaaagtactgggattacaggcatgagccacctcacctggtggtgaagactctaaaggctcttctcagatcagcctttgtcctgaatttcacatgcccgtgtccagttccctccccagcatcttttcaggagttccatggactcacctcttcattatccagggttaagctgcagatattgttattaggattccaccttgttctctctytttytttttttttttttttttgatacggagtctcgcttgctcttttgccaggctgaagtgcagtggagcgatcttggctcactgcaatctccgcctcctgggttcaagcaattcccttgcctcagcctcgcaagtagctgggacttacaggtaacacaccaccatgcccggctaattttttgttttagtagagacggggcttcaccatgttggccgggatggtctcgatctcctgacctcatgatccgcctgccttggcctcccaaagtgttgggttacaggcatgagccaccatgcccggctgattccaccttgttcttacattctttcccagttcattttaaatttatctacctcatcagaaactagggggttaggcctggcaggcagatcacctgaggttgggagttcgagaccagcctgaccaacgtagagaaaccctgtctgtactaaaaatacaaaattagccaggtatggtgrcacattcctgtaatcccagctactccggaggccgaggcaggagaatcacttgaacccaggaggcggaggttgcagtgagccgacatcacaccattgcattccagcctgggcaacaagagcaaaactacatctcaaaaaaaaagaaaaactaggcagttaatcctcaaagcctttccagtggccttatgcgtgagtagtttgtgtgtgtgtgtgtgtgtgtgtgtgtgtgtgtgtgtctttcacaccatgtgttctgaactacttaggaattctcaccagaaaggcacataaacctgggatcatggcctaatgtactttcacttttacatccagtaccttatcaacgtcctttttagtacctaatctaggcttcactactgagactcaggggtccaacttgagccatcttggagtcccactgccagcacagcaacaggcctgtaatgccgccctttttctccagggataacacggaaagaacgaccacctctagacgtggacgaaatgctggagcgcttcaaaacagaagcacaaggtgggtgtcaggacctccaatgttggagtcagctgaggaagccccccgttcttgctgctatctcctgttcctttgaagaaccccatctctctccaatcttttcctccactattcttaatgtgcccactgtctcctggagaatgccaacctcccttccrtaagaatagagggaagaacgaacgttgcagagaattagaactcagtttgtagaaagttaggagcacagcgcagagagtttttgtttttgtttttgttttgagacagtttctctgttggccaggttggaatgcaatggcgcgatctcggctcactgtaacctccacctcccaggttcaagcgattctcctgattctcctgactcagcctcctgagtagctgggattataggcacctgccaccacacccagctaatttttttttttttttttgagacgaagtcttgttcttgtcacccaggctggagtatagtggcaccatccctgttcactgcaacctccgcctcccagattcaagtgattgtcctgtctcagcctcctgagtagctgggactacaggtgcatgccaccacgcccagctaatttttttttgtacttttagtagagacaggtttcaccatctcattcagggtggtctcaaactcctgacctcaagagatctgctccacccacccccaagtctcccgaagtgctgggattacaggcgagagccaccgtacccggccttctttaaattatttaaaagttgacaggtggccaggtgtggtggctctcacctataatctcccagcactttgggaggctgaggcgggtggatcaagagatcgagaccatcctggccaacatggtgaaacccaactctactaaaaacacaaaaattagccgggtgtggtggcacccgcctgtagtcccagctactcaggaggctgaggcaggagaatcgcttgaacccgggaggtggaggttgcagtgagccaagattgtgccactgcactccagcctggcaacagtgcgagactccatcttaaaaaaaaaaaaaaaaaattgacaggcataaatgtatttatggtacattgctcagacaactttaatataaacaacttacagagaaaattgagtcttttgggtaggtgacttgcctgagctgactttgtgataggttttttctgttttttttgtttttgaaatagagtctcactctgtcatgcaggctggagtgcagtggccccatcttggctcactgcaatctctgcctcctgggttcaaggggtcttcctgccacagcctccccaggtgctgggactataggtgcccaccactatgcctggctaacttttgtgtttttagtacagatggggtttcaacagggtagccaggttggtctagaactcctgacctcaagtgatccacctacctcggtctcctaaagtgctgggattacagctgtgaaccaccgcacctagcctgtgatcagtttcagatcagccttgcttactccacattccctcttatcttcctggtagcatttttgtyttttcttgagaaagagttttgcccttgtcgcccaggctagagtgcaatggtgtgatctcggctcgccacaacctccacctcccaggttcaagtgattctgcctcagcctcccgagtagctgggatcataggcgcccaccaccacatctggctaatttttgcatttgttagttttatttttagtagacagggtttcaccatgttgggcaggctggtcttgaactcctgacctcaggtgatccacccacttcrgcctcccaaagtgctgggattacaggcatgagccaccgtacctagcccacattgacttttgatacagcaagtatttcttgctatggctctgtataatagaggtgagtaacttggttgaaggaattgtttgccctgttcatctctctagacacggccaatgtcattcctggcacacaatctttttttttcttgagatggagtctcactctgttgcccagactggagtgcagtggtgcaatcttggcccactgcaacctctgctacccaggttcaagcgattctcctgcctcagcctcccaaatagctgggagtacaggtgtgtgccaccacgcccagctaattttttgtattttagtagagacagggtttcaccgtgttagtcaggatggtctggatctcctaacctcgtgatccgtcygcctcagcctcccaaagtgctgggatgacaggcgtgagccactgtgcccagcctagcacacaatcttgacaaagaatttcggtgcgacttggggtactgtggtgcctgctctatcatcatgcttcagcaggaaatgtgggtgaatagtgcctggtggcatggcaggtaaagaaatgttttgttttgtttttttttttgagacagtcttgctctgtcacccaagctggagtgcagtggcgcaatctcggctcactgcaagctccatctcccgggttcacgccattctgcctcagcctccccagtagytgggactacaggcgcccgccacacgcccggctaattttttgtatttgtagtagagacagggtttcaccgtgttagccaggatggtctcgatctcctgaccttatgatccacccgccttggcctcccaaagtgctgggattacaggcgtgagccaccgcgcccagccgcgggtaaagaaatttatgaagacaatcgtaggtaaaggaaggcagatttattggagaaagtaggaaaagacattggcagagagaccccagcgggcaggttgtcatgagtagctcactgccaggagaccaaagcttcctgcagattttatagaatagggcttgggctgattgataatgtcaacagggggtttaacttgcggtcttctttcagcagaagtgtttgataaactgaggcgtttcatggcaaacagggagtttgtgagctctgtgtgtgatctggccaggaaggccaaacatcttgggccgtatctcctggaccataaaagcagacctggcccagtgcagtggttcatgcctgcaatcccagcactttgggaggctgaggtgggtggatcatctgaggtcagcagttttagactggcctggccaacatggcgaaaccccatctctactaaaaatacaaaaattagcctagacgcagtggcacatgcctgtaattccagttacttgggaagctgaggcaggagaatcgcttgaacccgggaggcggaggttgcagtgagctgagattgcgccactgcactccagcctgggcaacagagtgagactgtctcaaacagacctatagctgacctgtttcctcttgtttgtatgccctgaaccatggaggaaagcttatttatttattttattgagatggagtcttgctctgttgcccagggtggagtgcagtagtgcgatctcttactacaacctccatctcccaggttcaagcaattctcgagcctcttggcctcccaagtagctgagattacaggcatgcgccaccacgcctggctaatttttgcatttttagtagagatggggtttctgtgttggccaggctggtctcgaactcctgagctcaagtgatccaccccacctcagcctcccaaagttctgggattataggcatgagccaccacacctggccggaaaacacatttgtagcttatttgctttatctgatcccgtgccccccctcccccccgccccatcagcctgcctccttttctctaattgggactccacaggaaatacacctgattttgtgtcaatctcacatgagtttgtattttgtagcgtttacagaaacgaaaggaaatgtcatctgcctgggtaaagaagtctttaaaggaaaaaagccaggtctgtaccatatcttcctgcagggagcttgggatcagatttctctttataaacttgaagtcctcttaactttcctatgtaacacaaagcatttatttatgtatgtatgtatcgagacggagttttgctcttgttgcccaggctggagtgccgtggcgtgatctcgactcactgcaacctccgcctcccaggttcaagcaattctcctgcctcagcctcccgagtagctgggattacaggcatgcgccaccatgactggctaattttttatttttagtagagacaaggtttcttcatgttggtcaggctggtgttgaactcccaatgtcaggtgatctgcctgcctcgacctcccaaagggctgggattacaggcatgagccactgtgcccggccaacacaaggcattttgttattttggttttccctatgggtaactgattgcatcctctctcccttccctcctcaccaatgataaagacaaagacaataggtgcaggtatatattgaagacgaagttccgggagatgtggaagagctggcctggagatagcaaagaggtccaggttatggctgagagatacaagatgctgatcccattyagcaaccccagggtgcttcccgggcccttctcatacacggtggtgctgtatggtcctgcaggccttgggaaaaccaygctggcccagaaactaatgctagactgggcagaggacaacctcatccacaaattcaaatatgcgttctacctcagctgcagggagctcagccgcctgggcccgtgcagttttgcagagytggtcttcagggactggcctgaattgcaggatgacattccacacatcctagcccaagcacggaaaatcttgttcgtgattgacggctttgatgagctgggagccgcacctggggcgctgatcsaggacatctgcggggactgggagaagaagaagccrgtgcccgtcctcctggggagtttgctgaacagggtgatgttacccaaggccgccctgctggtcaccacgcggcccagggccctgagggacctccggatcctggcggaggagccgatctacrtaagggtggagggcttcctggaggaggacargagggcctatttcctgagacactttggagaygaggaccaagccatgcgtgcctttgagctaatgaggagcaacgcggccctgttccagctgggctcggcccccgcggtgtgctggatcgtgtgcacgactctgaagctgcagatggagaagggggaggacccrgtccccacctgcctcacccgcacggggctgttcctgcgtttcctctgcagccggttcccgcagggcgcacagctgcggggcgcgctgcggacgctgagcctcctggccgcgcagggcctgtgggcgcagacgtccgtgctycaccgagaggayctggaaaggctcggggtgcaggagtccgacctccgtctgttcctggacggagacatcctccgmcaggacagagtctccaaaggctgctactccttcatccacctcagcttccagcagtttctcactgccctgttctacrccctggagaaggaggaggrrgaggayagggacggccacrcctgggacattggggacgtacagaagctgctttccggagtagaaagactcaggaaccccgacctgatccaagcaggctactactccttyggcctyrctaacgagaagagagccaaggagttggaggccacttttggctgccggatgtcaccggacatcaaacaggaattgctgcgatgcgacataagttgtaagggtggacattcaacggtgacagacctgcaggagctsctcggctgtctgtacgagtctcaggaggaggagctggtgaaggaggtgatggctcagttcaaagaaatatccctgcacttaaatgcagtagacgttgtgccatcttcattctgcgtcaagcactgtcgaaacctgcagaaaatgtcactgcaggtaataaaggagaatctcccggagaatgtcactgcktctgaatcagacgccgaggttgagaggtgagaaccrtttcactctaccagtcgttccatctttagcctcatcccatgcccccttaggaagaggccagagcctcctatgcactgtggcttagggtcaggaattccctcttgttggrctctttgtttgtttttgttttgagatggagtcttgctctgtcgctcaggctggagcgcagtggcgcgatcttggctcmctgcaacctccgcctcccgggttcaagtgattcttctgcctcagcctcctgagtagctgggactacaggcgcctgccaccttgcccrgctaatttttatattttcattagagacgggatctcagcatgttggccagtctggtcttgaactccgcctgacctcaggtgatccacctgcctcagcctccaaagtgggattacaggcatgattcaccatgcccggcccaaatatatttttttaagacagggtcttgctgtgttgctcaggctggagtacagtggtgaaatcagctcactgcakcctcaaacttctgggttcaagtgatgttcctgagtacctgggatgacaggtattaagtgtgcaccatcatgyccagctaacttaagtgggggtttttttttgtgtttttttttttttttttttttttggaaagacaaaatctcactatgttgtccaggctggtcttgaactcccaaagcactgagattacaggcatgagttaccacacgccctgcctgaatatttcttattgatatgtatagatatgtatattcccaatctttttttttttttttgagacggagtttcactctttttcccaggtcggagtgaagtggctcgatctcggctcactgcaacctccgccccaccaggttcaatgattctcctgcctcagcctcatgagtagctgggattacagccacccacgaccatgcccagctaatttttgtacttttagtagagacggggtttcaccatgttggccaggcaggtctcgaactcccgacctcaggtgatccacccgcctcagcctcacaaagtgctaggattataggcgtgagtcaccgtgcccggtctatattctctatcttttatcaatgatgtgcttagcattttaacttatttttaccctctattggatttttgtctaagaagaataggttctttctcctgtgatgcttcttgggtgttgagttgtctgatggtggtgctaataagtgattacatggtccagctttcaattgtactcatttgtcaggggtatatgcccagagaaaccctaaatacttcagcygtgatggacacacatttggtgtaaccctttyttctcttccctrtagatcccaggatgatcagcacatgcttcctttctggacggacctttgttccatatttggatcaaataaggatctgatgggtytagcaatcaatgatagctttctcagtgcctccctagtaaggatcctgtgtgaacaaatagcctctgacacctgtcatctccagagagtggtgtaagtagaaactaattcatgaactcaaatccttagggtatgaaaatggtacaatgttaacatcggagcaatattcagattcctgtactagactcttaagtgctcgagacacagggaattgagagagtcctgtccttaaatttattttgtgggataatcgtataaagtaatttctaggggctgggcatggtggttcacacttgtaattccaacacttcgggaggccgaggcagacagatcacttgaggtcaggagttcgagaccagcctggccaacgtgacaaaaccctgcctctactaaaaatacaaaaattatccaggcgtggtggcaggcacctgtaatatcagctacttgggaggctgaggcaggagaattacttgaacccaggaggcggaggttgcagtgaaccragatcctgccactggactccagtctgagtgacagagcgaractgcgtctcaaaaaaaaaaaaaaaaaaaaagaaaaagaaaaaaagggccgggcacaatggctcacgcctgtagtcccagcactttgggggcccaaggtggggggatcacttgaggtcaggagttcaagaccagcctggccaagatggtgcaagaccctgtctctacgaaaaatacaaaaatttgccaggtgtcgtggcaggtgcctataatcccagctactccggatgctgagggtaggagtcgcttgaatccgggaggcagagtttgctttgcagtgagccgagatcgcgccactgcactccagcctgggcaacagagtgagactccatctcaaagaaaaaaaaaatctgtaaagatggacaaaaatttaaacatggaaaaaatagttcctaaagtttaaatatatcgagcccctggtttccatttaagtacgatacaggtgtacacactaaagatttcactttcgttytcttttccctaggttcaaaaacatttccccagctgatgctcatcggaacctctgcctagctcttcgaggtcacaagactgtaacgtatctgacccttcaaggcaatgaccaggatgatatgtttcccgcattgtgtgaggtcttgagacatccagaatgtaacctgcgatatctcgggtatatctcttaatcattaaaatccttcatcatacaaacataagctaccacaagcttatgtggcaattttgtgtaaataagaaaaagttcgttattctgactagaaacagtactaagggcagatgacccaggatgcagcatgrgctgaacttgagtttcnacttgccttgaacagtaaacaccctggacaaccatacgtgaggaccctgaatccaaagaaactcccagaatctttatcatctttttttttttttttatgragtcttgctctgttgcccaggccaaagtgcaatggcacgatcttggctcactgcaacctctgtctcctgggttcaagtaattctgctgcctcagcctcccaagttgctgggattacaggcacccgccaccacgcccggctaatttttgtgcatttagtggagctggtttygccacattgccaggcyggtctcgaactcatgacctcaggtgacctgccctcctcaggctcccaaagtgctgggattataggcatgagccaccatgcccagccagagtccttatgttttggttttggttttggttttttctttttcttttttctttttgagatggagtctcgctctgtcacccaggctggagtgcgttggtatgatctcaggtcactgcagcctccacctcccaggttcaagtgattctcctgcctcagcctcctgagtagctgggattacaggtgcacaccaccacacctggttaatttttgtattattagtagagatggagttttaccacattggccaggctggtctcgaactcatgacctcaggtgatctacccccccacccccaccccaccccgccgtcggcctcccaaagtgaggcatgagccaccgtgcccagcccagaatctttatcttctatcagagatcattcactcatggttcatgcttctcctgtatgatgattcagaataccagctattgacatttttcaagcaagaacccttcargaacatcaagttgccccttttctgttagtcctctggtttgagagctctccccttgggaagctgtccagtggctgcccaggcgatgagaacctacatgcatcatggggttccatgaagcctcacttggccacactggtgtagtaggtggtcattggcctcaaattattgccctgggccaggcgcagtggctcacgcctgggaggccgaggtgggtggatcacttgaggtcaggagttcaagaccggcctggtcaacatggtgaaactctgtctctactaataatacaaaaattagctgggcatgttggcgcacgcctgtagtcccagctactcaggaggctgaggcaggagcatcatttgaacctgagaggcggaggttgcagtgagctgagatcacaccaccgcactccagtctgggcaacagtgtgagactgtctcaaaaaaaaaaaaaaaaatcttggctgggtgcggtagctcatgcctgtaatcccagcactttgggaggccaaggcaggtggatcacaaggtcaggagttcaagaccagcctggccaacatggtgaaaccccacgtctactaaaaatacaaaaacattagctgggcatggtggcgcgtgcctgtaatcccagctactcatggaggctgatgcaagagaattgcttgaacctaggaggcagaggtagcagtgagccaagatcacgccattgcactccagcctgggcaacagagcaaaactccatctcgaggacagaaaaaaaattgattgctctggctctactgatacaatcttaggctgcttaatgggatcttagttgaataggatgctgtacatcttacaggtattggaaggttgaatgaaaccaagcccatgcattcaatagtggctgctatcattactaaccgttgcaattaccctcttttctttttgcctgagaataatgggatgcagggtgagggggaatattgggtgaattaaagatttgggtcactaatttctttctttttttctcaagatatagtcttgctctgtctyctaggctggagtgcagtgccacaatcttggttcactgcaacctctgcctcccgggttcaagtgattcttctccgtcaacctcccaagtagctgggattacaggcacccacctgtatttttgtatttctagtattttgtatttctagtagagacagggttacgccatgctggtggccagggtggtctcaaactcctgacctcgggcaatccaccacacccagctaatttttggtatatttagtagagccggggtttcaccgtgttggctgggctggtctcgaactcctgacctcaagtgacatccatcttccaaaatgctgggattacagccatrtgccaccacgcccagctaattcttgtatttttaggagaaatggggtttcatcatgttgttccggctggtcttaaactcctggcctcatgatccacctgccttggcctgccaaagtcctgggattacaggcatgagccactgtgcccagccactcatttcttatgaatttattctaacacrttttccggatgaacagggcaccttgaaacataggttagtgggctgggtatggtggcttctgcctgtaatcccagtactttgggaggcctaggctggtgtatcgcttgaagtcaggagttttttgttttgagacggagtcttgctctgtcgcccaggctagagtgcagtggagtgatctcggcttactgcaacctccgcctcctgggttcaagtgattctcttgcctcagcctcctgagtagctgggactacaggcacgtgtcgccacgcccatctaacttttgtatgtttagtagagccggggtttcaccatgttggccaggatggtctcaaactcctgacctcctgatctgcccacctcggcctcccaaagtgctgggattacaggcatgagccattgccccggccaaagttaggagtttgagaccagcctggccaacatggtaaaaccccatctctactaaaaaatacaaaaattagccaggcaagatggcatttgcctgtaatcccagctactcaggaggctgaggcgggagaatctcttgaatctaggaggcagaggttgctgtgagctgagatcgcgccactacactccagccagggcgacagagcataaataactccctttcaaaaaaccaaacaatgaaacataggttagcggagtctgcatccaacattagagtcagattgactaagttctgtatttccagctgattcctgggcgatgttggtgccactggtctgaccaccctttgacaactgctgctccagataattcaagtcggggtataacacaaccagtgagatgtaaaccaaagacgattccacggttagattctcaagaatgacttgttctgccrggcgcggtggctcacgcctgtcatcccagcmctctgggaggccgaggtgggcagatcacctgagattgggagtttgagaccagcctgaccaacatggagagacccccacctctactgaaaatacaaaattagctgggcatgktggtgcatggtgcatgmctgcagtcccagctactcgggaggctgaggcaggagaatcacttgaacccaggaggcggaggttgctgtgagccgagattgcrccacctgggcaacaagagtgagactcagtctcaaaaaaaaaaaaaaaaatgacgtggtcctatttctcccacaggttggtgtcttgttccgctaccactcagcagtgggctgatctctccttggcccttgargtcaaccagtccctgacgtgcgtaaacctctccgacaatgagcttctggatgagggtgctaagttgctgtacacaactttgagacaccccaagtgctttctgcagaggttgtcgtaagtctctcctctcttmcagagcagctgtgctttcgatctggggccacagacgagcaatggtcatgcctgacttggctgtatggaacctctygctgatgtgaacacctgttcccatgtttagatccaggccgatggcctgtgaattttgttcttctctcattcctattccttcataggatcaccagtgcatgatagaaggtggggagttcacaagaaggggcttttggatgctggcacttgtggagctagccgggaaggttgaagttggacmtgtcaaccgtgttgccatttgtgattcttttstaggttggaaaactgtcaccttacagaagccaattgcaaggaccttgctgctgtgttggttgtcagccgggagctgacacacctgtgcttggccaagaaccccattgggaatacaggggtgaagtttctgtgtgagggcttgaggtaccccgagtgtaaactgcagaccttggtgtaagtccgtgctggctgcctgtgtgcgtgggtgtatatgcacacgccccccacctccgggtttgagtagggtggttatgagaacacttaattcctctaaaagttccaagcatgatgctaatgacaactggtaagacctgggtagatgatggtaggaaaaaagtataagtagtagtagagtagtagtaatattctatagggatttggggaatgtagctggttttcgggtttttttttttcctctttatgtatgtatgtattttagagatgggatctcgccgtgttgcctaggctggtctcaaactcctgagctcaagagatctgcctgccttggcctcccaaagtgctagaattacaggcatgagccatgtcaccccatgctgtgttttctcttaatctgtgttcttagaactataactgtaacataaattgcaygcaattggttgtaaatggaatcatttacttattttttaatgaatgatttgcaaatcaggtagtcttctgggccagtgtacgctcagactcccaatggaagctattggaagctacatgctcaatgtgatcctcctkttaatactaaaatcacaggacacgtggcctggcatagtggctcacgcctataatcccatcaccttgggaggccgaagcaaggcagatcccttgagggcaggagttcaagaccagcctgcccaacatggtgaaacattgtctctctactaaaaatacaaaaattagtcacgcatggtgggacatgcctgtaatcccagttactcaggaggctaaggcaggagaatcacttgaacttsggaggtggaggttgcagtgagctgagatggcaccactgaagtccagtctggccaatagagcaagactctctcaaamaaaaaaaattataggacaaatctttagaaaggaattggggcctggcatggtggctcatgcctgtaatctcagcactttaggaggcgggcagaacacctgaggtcaggagtttgagaccagcctggctgatgcagtgaaaccctgtctctactaaaaatacaaaaattagctaggcgtggtggtatggtcctgtaatcccagctacttgggaggctgaggcaggagaatcgcttgaagtcgggaggttgcagtgagccgagatcgtgccagcctgggtgacagaacgagattgtctcaaaaaaaaaaaaaaattgtatctgcactgatggtttctgttcagagattcgattttatgttaacatctctggtattttttttttttttttttaagatggagttttactcttgcccaygctggcaatggcatgatctaggctcactgcaacctccggcttcaaggaggttgattctcctgcctcagcctcctgagtagctgggattacaggcactcaccaccacgccgggctaatttttatatttttagtagagatgggatttcaccatgttggccaggttggtctcgaactgacctcatgatccgcccgcctcagccttccaaagtgctaggatttacaggcatgagccactgcgtccagccatacatatctctggtattctttgtctctaacatcacctccaacagttaggaactgtcctcttcctatgaagtaactaatctaggatatgtacctggcatctgaaaactacccacttaaatttaatgacatattcagttcatggctggagacgatgagtagaaggaaaggattcttcccacacccactatatctaggccctgaaacaytaaaaaagaagtcccacaagcagtgagatgtcaccgactcactaactgtatcttcaaatgaatgtctagtttttttggttgtgtgtgtgtgtggtgtgtggtgtgtgtggtatttttttgggggggggggggttttcttttttttttttttttggttttttttttttgatagtcttgctctgtcgcccaggctggaatgcagtggctccatctcagctcactgcaacctccacctcctgagttcaggtgtgattctcctgcctcagcctcccagggattaaggtgcatgccaccacgcccagctaacttctgtatttttagtagagacgagttttcaccatgttggtcaagctggtctcgaattcctgacctcaggtgatccacccacctcagcctcccaaagtgctgggattacaggtgtgagccaccgtgccggccccctcaattcaactttttgatccatgcccctattttgctaagttgtcaacttccctttagtcttatgtgggttttcctccattacagtcatggaagtttctagaaggccgggtagggtctttgagaggccgaggcaggtggatcatgaggtcaggagttcaagaccagcctggccaacatggtgaaaccctgtctttactaaaaatacaaaaattagccaggcgtggtgtcggagcctgtaatcccagcttacttgggagggtgaggcagagaattgcttgaacctgggaggcggaagttgcagtgagctgagattgtgccactgtactccagcctgggtgtcagagcgagactgtctcaaaaaaaaaaaaaaaaaagtttctatacattcataaagtttcaagatttgggggtgtgttttcacttctccatcgtcatggactccaatctgccatctatttccaaggcccttccaggtcctgtgtccctcagctagtggtatgcttcacttgggacccagagatacatgggcattatagttcaaattataattaagtttagaactctattgagacagaagaaagaaaacagagctaaggtgaaatatctctgataatctgtgttggttaatatctaggatcctagtaccagatatgttggagtgtgagctggtgtcttctgcctgtaagacactacctctctagcaactgaatttagcaaatacaatcgtaatcccagcatgttagggaggccagggtgggcagatcatctgaggtcgggagttcaagaccagcctggccaacatggggaaaccctgtctctactaaaaatacaaaacttagctgggtgtggtggcacgcgcatgtgtgtacacacacacacmcccctgtaatcccagctactcggaaggctggggcacaagaatcgcgtgaanccaggaggcggaggttgaagtgagccaccgtgccagctgagaatccttyttacttctccaacttctgttggccacctgcattccttggcttgtggcccttcctccaacttcrgcagagcatcttcaaacgttgccctggctcccttatcacgtcacctcctgctggctttgactctcagctccctcttatgaggatccctgtgattgctggacctacccaaataaaccaggatataaaccatcttaagatgctcagtcacctctacgaggtcccttttgctcgcaggtgccaggagttgggacttggacatctttaggggaggccattcttctgtccaccacaccaccccatgattccatttccatgtcaccactgtctctaagtgtgtctaacccayggctcaagagtcaaaggtgcatcacagcagtgagaactcacaggttcgggtttgctttcttcctgtggttgatttctaggctttggaactgcgacataactagcgatggctgctgcgatctcacaaagcttctccaagaaaaatcaagcctgttgtgtttggatctggggctraatcacataggagttaagggaatgaagttcctgtgtgaggctttgaggaaaccactgtgcaacttgagatgtctgtggtgagttaacttataagttcaacttcctatacttacaccttactgaatctgtggctagtgtaaaataatcagtgaagccgacttcccaagttatataattgagaggacctttatagagtcgatcgagcatttactaggatggttaaaggaataagttctagtctatgtctaagtttttgtttttttttttcttgaagttttgctcttgtcacataggctggagtgcagtggcgtgatcttggctcactgcaacctccgcctcccaggttcaagcaattctcttgcttcagcttcccgagtagctgggattacaggcgcccgccaccatgcccagctaattcttgtatttttagtagagacagggtttcgccatgttgaaggttcatctcaaactcctgacctcaggtgatccgcccatctcggcctcccaaagtgctgggattacaggcgtgagccactgcgccaggccctatgtctaagttctagtctgtgtyatgcaaagaacacctgtgaaattttaaggatacagtgcctcaagccattcagccaaaagccactgcccagcaccccacattcagagaggtgggaattgggccaggcacagtggctcatacctgtaatcccagcacttygggaggccgaagcgggcggatcacttaaggtcaggagctcaagaccagcctggccaacttgaaactccatctctactaaaatataaaaattagccgagcrtagtagtgggtgcctctttttttttttttttttttttgagatagtttcactcttgttgcccaggctgtagtgtaatggcgcgatctcagctcactgcaacctccacctcctgggttcaagtgattctcctgccttagcctcccacatagctgcaaataaacaggcatgtgccaccatgcctggctaattttgtatttttagtatagacggggtttctccatgttggtcaggctggtctcgacctccggacctcaggtgagagccaccgtgcccagccagtaggtgcctttaatcccagctacttgggaggctgaggcaggagaatcacttgaaccctggaggcagaggttgcagtgagctgagatcctgtcactacactccatcctgggctacaagagcaagactccatctcaggaaaaaataaaaaagaggtaggaattagatatcgtgccagaaaatgctggctctatcagcaggtgagtggtctcaacttggctatcttacaaatmccttgtgagttagctacaatcagatgcacttgaacctggaatcctatctgggaggcaatcttaaaagaatttgactcgggatgggcaaggtggctcatrcctgtaatcctggcattttgggagtccaaggcaggtagattgcttgaggccaagaatttaaaaacagcctggccaacacaatgaagccctgtctctactgaaagtacaaaaatccgctgagcatggctgtgtacctctgctcccagttactcaggaggctgaggtgggaggatcacttgagcctgggaggaagaagttacagcgaattgagatcacgtcacctcactccagcctgggtgacagtgagatcctgtctcaaaaaaaaaaaaaaaamaaaaaaaacaaaggcgcctttttaatcactcactgacacgtgtagaggmgcaaaaagtttgagttgctggttggcccaggaggtcaaggctgcagtgagccaagatggcgttaccacactccagcctgggcaaccgagtgagaccgtgtttcaaaaaataaagtggcagggtgcagtggctcatgcctgtaattccagcactttgggaggccgaggcaggtggatcacctaaggtcaggagttcgtagaccagcctgtctctactaaagagacaggtgaaaccctgtctctctaaaaccacaaaaatcaggcrggcatggtggcacatagctataatctcatctacttggaggcacgagaactgcttgaatccaggaggcagaggctacagtgagccgagatcatgccacagcactccagccctggcgagagagcaagactgtctcaaagaataacttcaaagatggaagttatttaacctctctgctcaaaagcctcagtgcttccctatgtcaatccaggtaaaatcctatattgacgatggcttcagggtcttctgtgagctggccactgcttacctatgacctcatcttgacaatcctccctgtctcactcatgcccgctgcctggatgttctattttacgtgtcagtcacatgtatcttcagggcctctgcacaagctatttctctgcctggagaactcccccccgagctctatgactcggtctcttcaccccctcacctccaaccattgtagccagaacccccagttattccctgtaccccttgcccttcagaacccctcatcgcctccatattttcctgttagcagatgagccctgagggcggagacgttttgtttgttttttgagaccggagtctcactctgtcacccaggctggagtgcaatggcgcgatctcggctcactgcaacctccgcctcctgggttcaagcgattctcctgccccagcctcctgagtagctgggattacaggtgcctgtcaccacgccyagctaacttctgtatatttagtagagacacggttttaccrtgttaggttggtcttgaactccttgacctcaggtgatccatccacctcggcctcccaaagtgctgggattacaggcrtgaaccaccgtgcccggcctgagacttctgttggtcatgcagatccccaacacacgagggtgggcttggcttgccggagggcatcgatcagcactggctgcattaacgtgttgatttctgtgtttccccaggttgtggggatgttccatccctccgttcagttgtgaagacstctgctctgccctcagctgcaaccagagcctcgtcactctggacctgggtcagaatcccttggggtctagtggagtgaagatgctgtttgaaaccttgacatgttccagtggcaccctccggacactcaggtatgatccatttacttccccatcaggctttctccagagtggtaggtttaggggaagcataatgacatggacctgctgtaggagactgatctggtagctggattacaggttcccgccatcacacccagccaatttctgtatttcacttggagaaacggggtttcaccatgttggtcaggctggtctcaaactcctgacctcaggtgatccgcccgcctcggcctcccaaagtgctgggattacaggcgtgagcaaccgcacccggcyaccttttttttttttttcctttgaggcaagaactcactatgttccccaggctggagtccagcagcacaatgatggctcgctgcaggctcgctccagctcctgggctcaagcaatcctgcctcagttcctgagtaggtaggtttataagcatgaaccattgcacccagccacggctgccgtctacctgctcatgatagccatttgtcactgggctgtgttttgtttgttgcattttgtcagggttttggggttttgttttgttttttctttctttttttttttttttttctgagatggagtctcactctgttgcccaggctggggtgcagtggttgctaactgcaacctccacctcccaggttccagctattctcatgcttcagcctcccaagtagctgggattacaggcatgcaccaccacacctaggtaatttttgtatttttagtagagacagggttttgccatgttggccagggtggtctcaaactcctgacctccgtgatttgcccacctcagcatcccaaagtgctgggattacaggcatgagccaccgcacccggcctgagttgtattttgataccatggcatcaaagaaccaagaagccccttcctaggaatgtgggaacttcagaaattctcacaagcaatatactctactgctggcttaaaataatctttatgtagaagaaacatagattacttgtttatttaacatgaaactcagcctaagatactttgtaagtcaaaagacatatggacactaagggtttttttaagctttaagtttgtttgtttgtttatttattatttattttggagacagttttactcttttttttggggtgcatcttttttctttttttttttttttttcctttttttttttttttttttttattgatcattcttgggtgtttctcacagagggggatttggcagggtcataggacaatagtggagggaaggtcagcagataaacaagtgaacaaaggtctctggttttcctaggcagaggaccctgcggccttccgcagcgtttgtgtccctgggtacttgagattagggagtggtgatgactcttaacgagcgtgctgccttcaggatctgtttaacaaagcatatcttgcaccgcccttaatccgtttaactctgagtggacacagcacatgtttcagagagcacggggttgggggtaaggtcacagatcaacaggatcccaaggcagaagaatttttcttagtacagaacaaaatggggggctgacccccccacctccctcccggacagggcggctggccggttagaggggctcctcacttcccattaggggcggccgggcagaggcgcccctcacctcccggacagggcggctggctgggcggggggctgacccccccacctccccgcccggccagagttttactcttgttgtccagcctggagcgcaatggcgctatctcggcttactgcaacctccgcctcccgggttcaagaggttctcctccctcagcctcccaagtagctgggactacaggcatgtgccaccacacctggctaatcttgtatttttaatagagacagggtttctccatattggtcaggctggtctcgaactcctgacttcaggtgacccgcctgcctcagcctcccaaagtgctaagattacaggcgtgagccaccatgcctggcctgcatctcctctgtttaactggtactccggggtccactgagtagaagttgccaaagtgggtgatagagcgggtaagcaggtattagagctatagcccagctgtactcagcaattccattttctgtgtatgataatcaacaagcatctcaaactgcacaatggctatataccattacaaggttaacctgatgttatgtttttctctatcagatcaacatggttgagaataagaggaatgaaaaaaaggattaaaaagagaaatgaaagtctttaatattacattttattatttacttcatttattttttagacaaaaatctcactctattgctcaggctggagtgcaggggcccgatctcagctcactgtaacctccgcctcccaggttcaagtgattctcctgtgtcagcttcctgagtagctgggattatagggatgcaccatcacacccaactaacttttatatttttagtagagatggactttcaccatcttgcctaggctggtctcaaactcctgacctcaagtgatctgcccacctcactctcccaaagtgctggcattacaggcatgacccaccacatctggcctcattttatatttaaaaataaaaaataagcaaatcaagccaggtacagtttaggcaacatggtaaaaccccaactctactaaaaatacaaaaattagctgagcatggtggcaggtgcctgtagtcccagctactcgggaggcagaggataggatggcttgaacccaagaggcacaggttgcagtgagctgagatggtaccactgcactccagcttgggcaacagagagactgtctttttttttttttttttttttttttttttttttttttttgagatcgcccaggctggagtacagtggcacgatctcggctcactgcaagctccgcctcccgggttcacaccattctcctgcctcagcctcctgagtagctgggactacaggcgtccgccaccacgcccggctaattttttgtatttttttagtagagacagggtttcaccgtgttagccaggatggtcttgatctsctgacctcgtgatccaccygcctcagcctcctaaagtgctggsaattacaggcatgagccatcacgccccacctgagactgtcttttaaaaaaaaaaaaaaaaaatcaatgtggaacactcctttgccacctagaataatcaggaaaggtgacccatgccctgtgcctccttaacagactttcaggtacttgggaatttgaaacaaatctccttgatgcacaaagtaaccttttcttcccccattgtaccccaggttgaaaatmgatgactttaatgatgaactcaataagctgctggwagaartagaagaaaaaaacccacaactgattattgatactgagaaacatcatccctgggmagaaaggccttcttctcatgacttcatgatctgaatccccccgagtcattcattctccatgaagtcatcgattttccaggtgtkggtgaactgcctgtgactcctctcctccccsgcccctacccctcagggataatgagttcattgctgggctagatgttttagccatgattctgcctctgttttatacctgcacacrtccttatctttgttacatatgaaatatctgtatcacgggtatattgagagaaataaaggtgagagcattcacaaatgaagctgttacttaataatgggctttgacaagttagagaaaagatatcttactgggtagaacctggggggtgggggaagtgacagtgtttaattgcattgatttctattgccttgtcaatctttgccttgccttggtatttcctttcttttttcttttcttttttttttttttttttttagactgagtttcactctgttgcccacgctggagtacactggcacgatctcagcttactacaacctggcaggttcaagcgattctcctgtctcagcctcctgagtagctgggattacaagcatcccccaccacacccggctaaatttttttgtatttttaatagagatgaggtttcaccatgttggccagtctggtctcaaactcctgacctcaagtgatccacccacctcagcctcccagagtgctgggattacaggcatgagccactgtacccggcttttttttttttctttttctttttcctcaagcatgagtgttgctctgttgcccaggctggaatacagcagcatgatgatagctcactgcagcctcaagctcccaggttcaagcgatcctccagcctcagcctcctcagtagctgggactacaggtgcacaccaccaaaccaggccaatttttgtgggatttttttgaagacagggtctcactatgttgcccaggctgatctcaaactcccaggcgcaagtaatattcctgcctcagcctcccaaagtgctaggattacaggtgtgaaccactgtgcctagcctgtcttgttacttgttgacctgcgtggatcactgcctgctgagtattacttgccagaggatttctcctaccaatctacaatattttaggtgcttcggtgtagctcatatatgaccatgtcattgctctgattttgctttttaaaaattctaacttaaaatagaatctcggccaggcacggtggctcacacctgtaatcccagcacttcgggaggctgaggtgggtggatcacgaagtcaggagttggagaccaacctggccaacgtggtgaaaccccgtctctactaaaaatataaaaaattagccaggcatggtggcacatgcctgtaatcccagctacttgggaggctgaggcaggagaattgcttaaacccaggaggtggatgttgcactgtgctgaagactgcactactgcattccagcttgggcaacagagtgactccttctccaaaaaaaaacaaaatctcatggtatgcatagtttttcactatagagtctccattatttccttgtgatacagaattccaaattcaacaaagcagcagtgcaagctctacgctgtaaaaccacaaacaaaacgaactgtactataaagacaacactagttggcaaagttgcttctcatggggagactttgttgctgtctgtgtttactggatgagcaaacaaatggacggtaagggggaaaaagaacagtacaaatttttattaaacactaatcatgtttttttttgtttgttttgagacagtttcttcttgttgcccaggctggagtgcaatggcacgattttggctcactgcaacctccgcctccccgggttcaagcgattctcttgcctcgacctactgagtagctgggattataggcatgtgccaccaagcctggctaattttgaatttttagcagagacggggtttttccatgttggtcaggctggtctcgaactcccgacctcaggtgatccaccagccttggtctcccaaagtgctgggattacaggtataagtcaccgcacctggcaacatttttttcttttttttttttttttttttttttttttttggtggcagaatcttgctctttcacccaggctggaatgcaatggcacgatctcgggtcactgcagcctccacctccccagtttaagcagttctcccatctcagcctcccatgtagctgggaccacaggtgtgcaccactgcacccaggtaatttttgcatttttggtagagatagggttttgccacgttgtccagactggtcttgaactcctgagctcaggtgatctgcccaccttggcctccccaaatgctgggattataggcatgagccaccacacctggtcaaaagtagttttaatatttaaatttaaaactaaaaaagttaatctctcttcctactttcatttcttcatcaggggctattggtttattcccaccgactagatccaagttctctgatactacctttaaaccactccatcactttccagttccactgcatacagtgtgggcttctgaggtttcctggttcaaggtgtccttgttcaatgcggcatgggtcattccctgagcattttttttttttttgacagtctcgctccattgcccggtttggagtgcagtggtgtgacctcggcttactgcagcctctgcctcccaagttcaagcaattctgcctcaggctcccggataatttttgcatttttagtagagacagggtttcaccgcgctggccaggctggtctcgaacccctaacctcaagcgatctgcctgcctcggtctcccaaagtgctgggattacagacataagctaccgtgcccggcctccagagcatctttattctcagtttcagcgggaagaagggggaaggttggtaaaaagagaggcacaaagtttaaaaaggacattgcgtgaagaaactaaaggtttctccttctccacactattgacatttgggatcggatcactactcgttgggaaacgtcctgtacatttccagggtgttcggcaccatccctagcctctaccccctagataccagctcacatcctcacagttaacagtgatcaaaaatgtctctgggcagtagaaaatatttcctgaaatgcaaagttttcttaggttgagaaccattgtaatctagccccatctttagagaagaaattgagtaacggatctacatccattgaggaactatcgacaccccaggggcccatgaaatgtaaactcgcactcacaattaaccatctttctccaacgtgtgtatttcatgtagccacactctcagatgcccacccccatgacctacaagtcctaaacagggaaacctgtggcacatgggttcatgtgtgtctgaatctatacgttcagagatgaacaagtactgctctccctatacctgtgaccactcgcctccgcccatcactgaattctgaaaatgtggcctcaggctcacagcagcattagcacttgcttgctctggatctcatcacattgatgatcaagaacaaagtattcactgggttctctgctaaggatacaaaaaaaaccattccacaattccacggccatgtttgcacccaggaaccacgagggctgggttagcccagatggtgggcttgggaaatgttcctggagcaaaaaaaagagccagaagtcatgagagcctgaccccctcccccaacgcgcacacacacacaccactctctacctccaagcctcattttcaggcttctcaaagctaaggtcactcccatgagctaagccgcgcttttctcaatcctcagctcttccacaagaataggaagaactctctcctgttcaagatcctgtggctcagctgcagctctggaagaaagaccccggtgagggtcttgcttttcacaatccccaatcccagaccacatcctgtgccccaaaacaacttccatggtaaccacatccttcaggaagtgaagtcaggcaggaagtcaagtcagaagacggaatgggctgggcatggtggatcgcacctgtaatcccagcactttgggaggcagaggcaggtggatcacatgaggtcaggagtttgagaccagcctggccaacatggtgaaaccctgtctctactaaaaataccaaaagtagccaggcttggtggtgcatgcctgtaatcccagctactctggaggctgaggcaggagaatcgcttaaacccggaaggcggaggttgcaatgagccgagatcgcaccattgcactccagcccgggggacagaaaaaaaaaatgtagctgagcatggtagtgcacgtctgtgatctcagctacttgggagtctgaggcaggagaatcacttgaacccaggcggtggaggttgcagtgagccaagattgtaatagtccaatgtgttcaccttgcccactgcctagacagagctgattcgtcaagacagggaatcgcaatagagaataattcatgcagagctggctctacgagagaccagagttttattattattcaaatcagtgtctcccagcattcaggaagagtttttaaggataacttggtgggtgggtgggaagccagtgagccaggagtgctgtttggtcagggatgaaatcgtgggagccaaagctatcttcttgcactcagttcctgagtggaggccaaaagataagatgggccagtttattgatctgggtggtgccagctgacccatcaagtgcagcatctgcaaattaagcgctggtcttagaagcagtttagggagggtcacaatcttgtagcctccagctgcatgactcctaagtcataatttctaatctcgtggctaatgttcgtcctacagggccaatctagtccccaggcaacaaagaggtgtgctttggaaaagggctatcatctttgtttaaactataagtttctcccaaagttcagcctatgcccaggaatgaaaaaggacagcttggaggttagaagcaaaatggagtcagttaaatctctttcactgtctcagtcataattttggaaaggtggtttcaagctggcacaactgcactccaccctaggagacagagcgagaccctgtcaaaaaaaaaaaaaaaaaacaagaagtgaagtcaagataggaggtaaattcggaagacaggaagtggtggtagaagacaagaagtgaagtcatacaggaagtaaagtcagaagacaggaagtgaagtaagaagacaggaagtggttgtagaagacaggaagtgaggtcatacaggaagtaaaatcagaagacaggaagtgacgtcaaaccaggatttgcagtcggaggcaggcaagaagtgaaatcagaagacgggaagtggctgaggggaacgtcttttctctctcctgctcagcccgaagtgaacaggtagcatcaggtgtgccatttcagtgactgggcacagcccaggcacccacatctctctgcagcgcctattcttggaacaccagagacctctacactattttctgttgcttttttccttcattttcagagatgagatcctggattgaatgacttgaattactatggaaagtgattgaccaaggtaagtcacaactatcttgttctttaattttggtgttgtttgttatgacttgttagccgtctagcactcatagctttgcatttccactctgcattacttgtatttttattattttgtgatattcgtaataatttattataaaactgtgttatttttggatatttttaagttaaaatgcgattttttaactaagtggcagtatgcaaagcaagtggttcagaactctcccccattaataagtcttctctcctgaaagaaacaattttgagacttcctgttcttaattctgtttaacagcatacttctaaaagaaaaagtgtatactgttattatttattgtgttacaaaaatatacacgcacctttcatgcacgtccgtgtgaagagaccaccaaacaggctttgtgtgagcaataaagcttttaatcacctgggtgcaggtgggctgagtctgacaagagagtcagcgaagggggataggggtggggccgttttataggatgtgggtaggtaaaggaaaattacagtcaaaggggggttgttctctggcgggcagagtcggggtcataaggtgctcagtaggggagcttttgagccaggatgagccaggagaaggaatttcacaagacaatgtcatcagttaaggcaggaacaggccattttcgcttcttttgtg

SEQ ID NO: 97266 - DNA, 29338 bp, Homo sapiens
  misc_feature (1)...(29338): n = A,T,C or G
gctcttttctcctacgactgactctggaagagtgaggagctgctggattctatcagcagttcaacagtgccctatataaccagctctcaactcactcacccccagctgtttggtctatggatgacaatttcgaggtgaacaaacaacatcctgtttggacagctgctactctggctaaagatggtaaaaatcagtcagctcagtgagctgaattgcatgctctttttctagctgctgatttatactagaatgatggcaataactgattttcaaagaatcatagtatgtgtcccaaagtgttccacaggagtgtgatattgtgaaatatatatttgatcagttgaacagtggtagaagccccctgtttgggtttttactgactcctgggcagtgaccagtgtcttggctgtacactcaggcaagaggacaatagccacctggcttattaacgggatgtccatatggggcacagccctgtggagaggtgaaagatgccttgaggtagaacaggttcacgcccatcagaaaaactcccttccagtctctggaggtggctggagtcaccaagtggattttttttgtgtgctcctttgaggtggtcgcctgggtccgtgaaatgagtgaacaaggcggttctgcagcagtgcagagatgggctgaatctagccatgcccctcgggctcaaaatgccaataagaactgttctgtcgctgggtgcggtggctcaagcctgtagttccagcactttgagaggccgaggcagatggatcacctgagtttgggagttcgagaccagcctgaccgacatggagaaaccccatctctactaaaaatacaaaattaccggggcttggtggtgcatgcctataatcccagctgaggcaggagaattgcttgtacccaggaggcagaggttgcggtgagccgagatgatgccattggactccagcctgggcaacaagagtggaacaacgtctcaaaaaaaaaaaagaactgttctgtctgccagcaagagaaagagagactgcccatggctgcgaggtacattccctggtgggaaagctcttaacataagtggcaagtgagatggatgctggcagccctggggggctgcatctaggtcttgacaggaatagacactgtctctggactgggytttgtttgtktkgtagaagatgcaaacactcagagtgccattaaaaaaaagaaaaagggccaggcatggtggctcatgcctgtaatcccagcactttgtgaggctgaggcgggcaggtcacctgaggtcaggagttcaagaccagcctggcaaacatggtgacaacccgtcactacaaaaatacaaaaaaattagccaatcccagctacttgggagcctgaggtggaagaatcacctgaacccaggaggcggaggttgcagtgagccgagatcgtgccattgcactctagcctgggagacagagggagactctgtctcaaaaaaaaaaaattaaaaaaaaaaacagaacaggagatactgcatgaatcttgatggccaacgtcattgcttcagaaaaaagagcactctgtacagcccataatgtccaacaatgggcagagaggcatcctcttcagagtcataatttggcacagaattggaacaggcaattcaaacgctggttgtctaaaacgggggaggtgaaagcagaagggctggtgatagagtttggatctgtatctccaccaaattgtgtgttgaattgtaatccccagtgttggagctggggcctggtggtaggcagttggatcatgggggcaggtttcccatggatggtttagcactattctctttggtattgtactcacaatagtaagtgagttcttgtgagatctggtcatttaaaagtgtgttgggccgggcatggtggctgatgcctgtaatcccagcattttgaaaggctgaggtgggtggatcacctgaggtcaggagttcaagaccagcctggccaatatggcaaaaccccatctctagtaaaaatacaaaaagtagccagcgtggttgtgggtgcctgtaatcccagcgacttgggaggctgaggcaggagaatcacttgagctcaggaggcagagccaagatcactgtgatcttgcagtgagccaagatcacactattgcactccagcttggatgacagagaaagactctatctcaaaaaaaaaaaaaaaaaagtgcacagcacctcccccagtcattctctctggctcctgctcctgccatgtaagagaacaactgctcctccttcatcttctgccatgattggaagcttcctgaggcctcaccagaagcagaagctgctatgcttcccatacagtctgcagaacagtgagccaattcaacctctttccttgtaaattacacaatcccattgcttctcagccttttggctaagatcaagagtaaattacccactctcagatatttctttatagcaatgcaagaatgaactaatatagctggcttgcacgctttgtgagtgtgcactcatacttagcatgagtggtctaaaggagtggccttccagatttttctccatttttttggttgatctggggaagagggggtggggaggatgctgacatgaccatgaaatttttttttttttttcccgagacggagtcttgctttgtcacccaggctgcagtgcagtggtgcaatctcagctcactgcaacctctgcctcccagattcaagcaattctcctgtctcttcctcccaagtagctgggattacaggcgcatgccaccaggcccagctaatttttgtatttttagtagagatgggttttcaccatgttggccaggttggtctcaaactcctgacctcatgatccacccacctcagcctcccgaagtgctgggattacaggtgtgaaccaccgcacccagcccaatgaacacttcttgaatgaatgagacagtgaagaagactaccagaacaagagcagatcaaaggtgaataagtgagtagtagcttctgattaatcctcatcagcaaccaacataacccagggcttatagatttctctatgtaatatgctactcacacgtctacggaaagagagagagagagaagcacatcagtcaaccaattatcaaaagttactgtaaatctgctgtgttggtcttgtattacaatctttagattacactactattttatttcaaacaggactggtagaaacttcttcatgcctttgcaaccaaaggcctttagtcctataaaactgatcaccttgttgcttggccaagtaccaaccttagaaagttatgcagtgaacaccatctgacttagattagttgaaaagtaactggatcaatccccctttaccccaaacatctaaacggaacaattttcttttcttcaggatgcagcgtaatcctcaaactgcagagccacttggtgatgaagccaggatcgcagtgcatttgacaacttaatgcaactttttactagcacttaaaactcagatatgaaatctatacttgatcttttctgcttggaattggccagattagtggttctgccccggcatacaacaaaaggctctcagaaacactcagggtcgctaaccaattaggagaaccaacagagctcgacaaacagacaagagggagaagggcaccgccttccaccccgcccgcttagacagcctttcaactctgtccactttgaggatgtgtaggatgatccaggtaatcatgacatctaccttaacttcaaggtagaaattaaggcttgagggcacttatttggtgccttattcagttaattggaagattatatggtaatttcactgctcataataattaaaccttttttttcactttagggatgataatgacatttggagagtagcactataaacgtcaaacatctattttggagatgattggatttaggagcaggacaggtttgctgtacacttgaccgaacatgctttgttccccaaagcagcaaaaaagccacagcctggaagtttctaaaacttgaagcagatgtaagtggcaaatccaaaaagccgtgcctagagaacaggtcgggtgaccggctgtatctattccagcctccccattggctcggtggaggacttcggacaggtctctcagtttcgccttctttggtttcaccttagaatgaggggaagtcacagcatttcttcctttgtatttcacagaaacacagtcagcaaatgtaaagaaatacgggcgcccacatggtgattatgctggcctggtctcaagcttcatattcatccttaattgattcccagacacactcgccagtgacctggctccgcttcactgaatggccccaagggtccacgctttcttaattctcctgtggaccctttattcactccccctcatccttcctttgctgacggtggttgcttctgactgccccaatcttttttttctttttcttttttcttttttttttgagatgtagtcttgctctgttgcccaggctggagtgctgtggtgagatctcagctcactgcaacctctgcctccccagttcaagcgattctcctgccttggcctcccgagtagctaggattacaggcatgtgccaccacgcctggctaattttttttgtatttttagtacagatggagtttcaccatgttggccaggctggtctctaactcccaacctcaaatgatccacctgccttggcctcccaaagtgctaggattacaggcatgagctaccgagcctggcctcaatcttatgcttactattcttaatctgttgcctcattttatagccacagctcaggtgacagctgagggattaccttcatctgtctctgagcctctaagacttctattttcttcaccactctccaggaatctttttttctagctcttggttgctggccatctcctggacggttcagttgaaaatctgacctccagttcattggtgcatctacaatcaatcctcattacctgcagattctgtagctgcaaattcacctgcttgataatgtttctttatagcccctaaatcaatcccagtggggctttcctggatgtgcaccaagtgctgaagaggttgaatggctgatatgcacggtcccagcagagctccatcgaggaacctctgccttttggtttccgctcttataccataaatgaatgcccttttcttggtcgttttggttttttttttgagacagagtctcactctgtcaaccaagctggagtgcagtggtgtgattgcaacctctgtctctcaggttcaagcgattctcctgcctcagcctcccgagtagctgggactacaggcctgtgccgccacacccagccaatttttgttttttggtagagatggggtttcaccatattggccaggctggtctcaaactcctgacctcaggtgatccacttgccttggcctcccaaagtgctgggattacaggtgtgagccaccatgcccagccagggttctcttaaatataatggaaagaggagaattggaatggcagagagagagaactaggaccctgaatgaatgaatcaagttgagttggagagaaactgtatttataggaaagttaaggctctgagtttggaggccaagcagggtgggggtgagcaaagccgtgagaaggaaagcagggcttcaaaaagcagctgctccttcttgatagacgcagagaggaaacagcaaagaccggggtccatgcagtcttatttgtagcacttgaataacttggtgcttagagtcccaaggcctccagctagtgatccagagatgccattagagggcaaaagcactcgctgatccctcatttgtcacccagaagacctggtatggccctggttttaaggacaatttagtcaattgcttattgtatatcacaagatgaacgctgggagagaggaaatgcagggtctgtagggagagggcaaaaacagctacatctgacccaccccagagacgaggaaggcttccaggtgggaggtgatgccaggaggtaaccaggtggaaatcaccctcaagtagcagggacaggtgtgcaaaagctcagagggagcttctccaggatcagcagagctcgaatgtagggtgtgaggctgtcacagaggctggagaaataagcagtgccttgctaagaagtctgaattttatcctgaagggacatgggagttactgcaggctggtaagcaggggggtgatattggttggattgcaatgcagagaaaccctgggttggcctgcgtctgatggactggagagacccttgaagaaatcagggtacaggcagtactccggagtagaaatgaggaaggtgccacctgagaccacagcagtggggaagagtgtaagagggatggaaattgagatgaattcatgggtgtttggcctgtgcagtcacacaggrccccatgctgagagggaccctgagcttggcttaatgctttgctgttaccgtcttaaaattcctcctcattttatgtttgagtctatgttttgttttgttttgagaaagagtcttgctctgtcacccaggctggagtgcactggcaccatctcagctcactgagatctccacctcccaggctcaagtgattctcctgcctcagcctcccaagtagctgggactacagccacctgccagcacrcctggttaatttttgtatttttagtagagagtgggtttcaccatattggccaggctggtcttgaactcctgacctcaagtgatctgcccacytcagcctcccaaaatgctggtattacagacgtgagccactgcacccagtctgaatctatgttttatcagtgaaatccaatggggcaatagaacatgtgcatgggcagatgagacaccaacaataagagttacccccatcccttgccactgcactccccatggcgtgtctgctgtgccctgagcatagaatcttggggggcccgcagtgcatgggagtccagcaaggctccaagttagcataagggaagcctactatgtccacaacggagtccgtgagacatgctgacagcaccaagaggtcacgctttctcttattatagaatcagaattgaaaaccaagtcaatggcattctaagaaacaggaacaaacaaggaaccctctcccagccttttctacccatctgattccctgtagtagccagccacttccactggaaatgatgacacaggagaagcaaagataacagagtcatagttatttttcctttcaattcttccttacacatcagtaagccaaaggtagagagtggtggtagattgtataggtgtgaaaaagtgaaataaaaacagctgaatggcgagtgtggtggctcatgtctgtaatcccagcattttgggaggccgaggtgggtggatcacaaggtcaggagttcgagaccagcctggccaacatggcaaaaccccggctctattaaaaatacaaaaaataggagggtatgttggcgggctcctgtaatcccagctcctcacgaggctgaaggcaggaaaatggtctgaacccgggaggcagaggttgcagtgagcagagatctcaccactgcactccagcctgggcaagagagcaagactctgtctcagggaaaaaaataaaaacaaacaaacaaacaaacaaaaacagctgaattagtttcctgyaacatctcactgtttctgtgaggcaaaaaaatcccacatgcaaagtacaaattatgtcatttctgtgattccacatttgagtccaatgttcctgttgaaatctggcattgcacaatataaagaggaacagtataatccatgctggtaatttaaaatgttatttttttttttttacttagaaggacattaaataacaaatgaaagcatcatgataaattgagacacagagaccacagaggaaagaaaatgctgtatatgttaatacttcagcagtgcttttcctctgatttttgaataagggggcccatgttttcatcttgcactggaccttgcaaattctgcagctggtcctgactgtcaagagagggatttagccattaaatcakcaggggttggtcgtggggatgtggggtacaggaagatagaggatttaggcatggctgcagggttttaagctggtgrgactgttggctgggaaatctaggaaatccagcattgaaggacaggctttgtgaatctgttgtggatgggctgagccttcrgtggccatggggcaacctgcctgggaggagggcgagcagcagttcatcagcataggtggtgaatgaggctcaggaggggctactgaggccggaactgtgggcagggatgctggggaaagcagacatttaggagatgggacaacagctgggtatgatggctcacacatgtaatcccagctactcaggaggctaagacaggaggatagctcgaggccaggagttcaagatcagcctgcacaacatagcgagaccccctttcccccccacaaaaaaaaaattactgcaaagtaaaaatacaaaaaagagatgggacaacaaagaaggcctcataaaagagatggagaggaaggggacaggaggaaaggggagagggaaggcgacagccagaggcaggcatgagaggttccctagagtggagtttttattatctcaagtgaccatgagcaaactactgaacctgtctgtgctgcagacatcatggataaaatgaagacgaaatgaagacaataacaacagcacttatgggtggggcagttgtggtgaagattcaatgaagagtttatatgggaagggctcagaatgctgctgtattaaatgcctcaggttgctataacaaggtaccacaagctgggtggcttagaactacagaaatgcatcgtctcacacctgcaggccagaaggctgagatgaaggcgttctcagggccatgctctctctgaagatgctagggaaggatctccctccgagcttccrccagctccttagcttgtggcagcagaagtccaatcttcacgtggccttctccctgtgtgcatctgtgtccaaatttcccctttccatatctatatctatatctacacacacacatacacatatatgtagtgtgtgtgtgtgtatatatatatatatttatgtatgtatgtatgtatktatttatttatttatttattttgagacagaatcctgctctgtcacccaggctggagtgcagtggtgcaatcttggctcactgccacttccgcctcccgagttcaagcaattatcctgcctcagccacctgagtagctgggattacaggtgcctgccactatgcccagctaatttttttgtatttttagtagacacaggtttcaccatgttggccaggctggtcttgaactcctgacctcaagtgatccacccgcctcggcctcccaaactgctaagattacaggtgtgagccaccgcacctggcctatttattgttttttaaagatgggagtcttgctatgttggccaggtttggttttggaccttagcctcaagtgatcctcctgcctcagcctcccaaactgctaggattacaggcatgagccactgtgcctggcctattttatttattatctttttaatagagatgggagtctccctatgttggccaggttggtcttgaacctcggcctcaagtgatcctcttgcctcagcctcccaaagtgctaggattacaggcatgagccgctgcacctggccaatttcccctttccataaggacacccattatactggataaagcccactctatcaacctcattttaacttgactacctttgtaatgactatctccaaatatgtcacgttttgaggtactgggggtcaggactccaagaagtcttttgtgagagaggggatgcaattcaacccacaacagtgctctgctctgttaaatgttcacctttatgaataagacgacctccacgagttgttttcttcaaaggtatgaggcagagaccagtgagggacaacctgagggtggggaacctaaattttcatggccacaatctccacaacaacccaatgtttctcccgcagcacttagcagcccaggtgaaggtaaatacaagaaggagagggaacaaagatgagggagggacacatcctgataatgcrccaaagacaaccacaggcaggaatactgatggcaacgaggcagacagggaacactgcccattgctctgcctgcctcacttttgttcaggggccaccaggaggcctgaggtcccaggtggacagaaatcaccacaatcccctcttgtccccaaccaacatatgcacaggaggcaaaccaacttttgatcatttattgaaacaaataagaggttaatctctgggtaaaaaggccttgtttgccagcagctcagrggatgccttcaagctgacaggcactagtgcactttgaagtaggaagcatcacataggttctggagataagcaatagataaacaacgggagttaccagaagtgtcgagccaggcatcaccttaacagaaattattcctggagctaatgtggaagtcagtaatcccaagagaaaagacagaggtgggcatggtggctcatgcctgtcatctcaacacttcgggaggccgaggtgggaggatcccttgaagccaagagttcaagatcagcctgggcaacagagtgagacctcatctctagaaaaactaaaataaataaaataaattagccaggtgcagtgatgcacacctatagtcccagctactcaggaggctaaggcaggaggattgcttgagcccaggaggtcaaggctgcagtgacctatgatcacatcactgcactccagcctgggcaacagagcaagaccctgtctctaaaaataagagaacagaagacagatgaagcaaagtgggccaaaacttagaaaaagggaattgctctgttttagatgaaggattgtgaaacaaaattttcaagagcagaaatgaaacacctgtctaccacagtgtagccctcagcaaaaccacaagttggcagactctgactctcccacacccctctggctaaccccaaaccccttctagatagaatgttctccttcctcttcatcctaatgccaggagcaagtttggtggtgcgttccccacacctgcgccctttgccaaagctccaggttccaaagcctttctttcttctcttctgctttaaggcttgcttaccctgagttcaagacccttacagccttgttagataaatggctacataagatgattggttaatcagagcgagtatggctgatgatggcttctgcaatataatgcaatgaacccgcacccaccttcactgaacgatcaacattcactttggtgtaatgggataaaccatcagcatgtccctcctgatgcgatgcacagagaacatgacaccattgctgtgataatcccacctcaaatgcataagaatatcaccgccaagaaacatcagccaaatccaaagtaagggacaatctatcaaataaccatcttgcgttcttcaagaatgccaataccatgaaagataaagaaaaaccgaggagctgttccaagctaaaagggacctacagagacacagcaactgaaaataatgcatgatctgggattatcgtttgctccaatgtacatcattgggttaactggcaaaatctgaatgaggtccctacattagaaaaccttattgtagcagggttagtttcctgattttgmtattgccttggttatataagacaaagtccgtgttattaaggaatacacaggaatatttaggggtaaaagataactcatctgccacttagaaaataataaagcaaatggggtaaaatggtagcactggggaatctcagcgaagggtataaatgatgtctttgtactattcttgcaacgcttctgtgtctggaaaaataataataaatattacatgtttaataactaaatgaatgaaaaagtgtgcaaggtttctgcaggtgtcaaccttggcgatacaacaggatcatctcagaagctctgcatgaatatcagtgcccaggccccaacccagagattcatagtcagttagctgggggtgaaactccagacatcggcacgtgtgaaacacaccccaaggtcattctagcgtgaatccagaataataagaagaaagcttagcctttagtgtcattgggtgacaggaaagttctaggctggggactttctgagccccccatgtctgcttggtttgagatctgatcttgggggcagcatggtgacacaaaacaggagtacagttgtgggtccagtcttggtccttcctctaataagatgggagacattgggtcagatcccttgcctgtgccaagcctgggttttctcagctgtggaatgaggttaaccaggaagtgcctcagaggccaatgtgcattcaaggaagaagatgcccagctcagatatggtgtggctgtgtccccacccaaatctctaattgtagttcccataatcaccacatgttgtgggagggacctagtgggaggtaactaaatcatggggtgggtctttctcctgctgttctcatgacattgaataagtctcacaagatctaattctttttttctttttttgagaccgagtctcactctgttgcccaggctggagtgcagtggtgtgatctcagctcactgcaacctccacctcctgggtttaagcaattttcatgcctcagcctcctgagaatctgggacaacaggcgtgagccatcatacctggctaatttttgtatttttattagagatggggtttcaacatgttggccaggctggtctcaaactcctgatctcaggtgatccacccaccttggtttcccaaagtgctgtgattagagatgtgagtcactgttccctgcctgatctaatgattttataaaggggagctcccctgcacaactctcttgcctgctgccatgtaagatgtgacttttttcctcctccaccttctgccataatcatgaggcctacccagtcatgtggatctgtgagtccattaaacctctttttctttataaattacacagtctcaggtatgtctttattagcagagtgagaaaggactaatagagtaacccttaaacccccggaccccaaaatggagttgcygcaggatggaagtctgaaatccttgtgatgtccagctggcagaaaggaatttggatgagtagggctggccaacttctggtattgctggtgggtcctgtcattgtgtgggtgactccttgcacccctggcccttcataggactaaattctgggagggttcttgggaaaggggctagagaaggcaagaggacatcaatcttcttccaggcagtaggaaggcaagctggagaggccaagctcccaagtaaatggaggcacctccactggcccctttgtgaggcacgcttgacctgggttttacggaaagaaagtgccctcaccaaacggtgcaaaacaaggccccaggctccacacctgatcccaggtgcccccctctgccctgccctagactcacctaaagctgtactgcccagagtcatggcctcaggccacacatggctactggccacttgagatgtggccgtctcagttgagatatgctgttagtgtaaaatatacactagatttccaagccttcataagcaaaaagaaaaacataaaatatctcattaagaatttttaagtattcattaatgttgaaataataatattttgaatatagtggttaaataaagtttactaggagaattcatttcacgccttttactttttctaatgtggtgactaaattatttaatattacacatgtggattacattgtatttctattggatagctctgttctaaagtctgcacattgtccttttgtggcttatttccttgataattttattaaaattaaattggggggccaggtgcagtgactcacatctgtaatctcarcattttgggaggctgaggcaggtgggtcacctgaggtcaggagttcgagaccagcctggccaacatggtgaaatcctgtctctacttaaaaatacaaaaattagccgggcatagtggtgcgtaactataatcccagctacgcgggaggctgaggtaggagaatcgcttgaatcctggaggcagaagtagcagtgagccgaaatcacaccactgcactccagcctgggggacaagaacgaaaatccatctctaaataaataaataaataaatagaaaaacaaaattgagggccgggcacggtggctcatgcctgtaatcccagcactttgggaggccgaggcaggaggattacctgaggtcaggagttcgagaccagcctggccagcatggtgaaatcccgtctctactaaaaatacaaaaattagctgggctttgtggtgggtgcctgaaatcccagctactccagaggctgaggcaggagaatcagttgaacccaggaggtgaggttgcaatgagctcagattgcaccaaggcgctccagcctgggcgacagagtgagaccctgtctcaaaaaataaagaaagaaataaaaataaattgaggaaggactgagcatgcaaaatagaatcagcctttgaccctgaataccctgcagtgagaattcccctgtggttctcaggcttctgtaattccagcaaatacactctttcctcaggttcactaaaatgcagatattgtgagataatgctcatttctcacagattgcttgaataataataatgatcattacagtaatttacaacttaatagtcaatactgcctttttaacccagtctgtgagactgaatcgtaaacgtgacattctttgaagtaaagctctcaattaatataccagactgcataaactctaataacttacctttccatggaaagagaatatgtgggtattctctttgaagacaaatggtggagagtagactctcatcaaagaccctctggcagtaatgagttgcattcgggaaggttccagaaggttctgtggaagtctgcagtttgggattggttctcaggtgtctgtctaactgctttctaaggatgaagactcctggttcatgcttcagctccacccacaggagcaacagactgacattcctccacataataacagacccaggcagtgcagagccatgtggggggtcttatctgtcctgttgtccacagtctggttttatcttagacccagcctggtgcaattcatgttgtgtattggcactccacttaagtttcctgtttgtaaaaagcctctttcattcggtgatttctcagggctttaggggaactttctggaaagcaggaagaaggaaataaaggttgttttgctgaggatgggtgacattgggcgcgggacccaaatgagtggtttgagaagaaagtagccttcacgctggactaatgcttggcaacattatgggaaaatttggggaagctgggagaggagggggcagagtttccttcccagccagccagggggtccaggcagttttggtcctaggacatctctctgtgcattcccaagtaattgcaaggctttttcttgtcatcgtctgagacttggattccccaagcgtccttcttttcctggagcctctgagtcctctattcctgaggcctttcttcagcacccccaatagccccgccatgatttcattgcagggctgtgaccgtctacgacaaaccggcatctttctttaaagaggcacctctggacctgcagcactggctcttcatgaagctgggcagcacacactctctgttcagggcccggtaggcctcccatcctcagctgccttctctcctgctcgccactgccctggcctctccccttctcgctgcagacctgggaaaccactcatccaggggttggcaaactaaggctacaggccagtctcctgattttgtaaatcaagtttcattgggacacaacacactcattaacttctgagttgtctacagctgcctttgagctacaatagcagaatcgcgttttgcaacagagaacctgtggcccgcaaagcctgaagtatttactctctggccctttaagaaatgtttgtggacccctgcactgtcttactctcctgtcaatgggttcccagatctgtggcaggatctgtggacctgtgtgtcccctggggtgtctcatggggctaaggaggggacctttgtgcaggtccacacaccctgaggtgtgcccctgggtaagctggggtggtgtgggagggcatccctgcaccctcatcttgagtccaggggatgataagacagtaagtcccgtggagaaaaggaatgagtcagtcttgtttgctgttgtaatcttagcacccagcaacaatattagagaaagcaagcccaggcctcggatggcaggggtggcctggtgctgctgatgtggccaggcaccccaaccgctgggagcctgcaggcctcgccatggcaggagatgcccgtccttggtcctgggcctgctctgtggcctctcacaggctttttttctgctctttcatctcagaacctgaggatccagccacggagcggtcggccttcatggagcaggatgctgggagcaggctggtgacacgtctccatgagcagccagccctgctggtcagcagcacgagctggacaggtctgcaggacccctggggcacatgggtttggtgtgacgggcacctggccaacctgtgttctcctcacctctgccagtcctgcatgcccccaccccgtcacagtctcagtgagaaggggagggtgtgtgacctggaagagaggtgtytagtaacaggaccctgacattcaattctcttctcatagaggatgaagacttctccatcctgctggaagctttagaaagtagctgtgtggctgcggtgaggagctctgggcttgtcgggggccactgagctgtgagctgcttgcctggcctgcagcatgttcctgagctggaccactgggtggggcagcctggggacagtgggggtggtggaggtgggccgccctgaatccccagttgggtcattgagtgaccaggccctcaggctgaaatgccccctccaggagagtatctcacagaggatggtggcctccccaccagagcagtgctctttctccaccttaccaggtgactctggctattgtttatttaaaaatttttttctgaatgggcatggtggctcacacctgtaatcctagaactctgggaggctgaggcaggcagatcaccctgaggtcaggagttcgagaccaacctggccaacatggcgaaacctgtgtctactaaaaatacaaaaagtagctaggtatggtggtgggcgcctgtagtcccagctacttgggaggctgatgcatgagaattacttgaacctgggaggcagagattgcagtgagctgagatcgcaccattgcattccagcctgggtgacagagcgagagtctgtcagaaaaaaaaaaaaaaaaattctatcagaaattccatgtagaattgtttctttttttaaacacagagtttgaacaactgactcttgacggacacaaccttccttctctcgtctgtgtgataacaggtaccgcctgggaccctggctttctgtttggttgggggatggcggagggggcggagcatgcagtctttaccctgtgcttcccacgatcttgtctccttaatcctcactgcagctctctgccatagggtcttatattgcttgacatgggggaaactgaggctcagagggtttcacagcagggcagggagcccagatttgaatctgtagataccaaactttttactttttcagtagtttccaagcatcttctttttgttgttgttacgtcattggtgtcttttttttttttttttttttgagatagagtctttgtcgcccgggctggagtgcagtggtgcgatctgggctcactgcaaactccgcctcccacattcaagcaattctcgtgcctcagcctcctgagtagctgggactacaggtgaccaccacacccggctaatttttgtatttttagtagagacagagtttcaccatgttggccaggctggtcttgaactcctgacctcaggtgatccacccgtcttggcctcccaatatgctggaattacaggcatgaaccactgtgcccggccatgtcattggtgccttaaccgagcctcttaatttttcaaatggaagagcccctgtcccacagttactgctgctgagccctttcaaggtgactcagtgaggagggagaaaagcggaagcggtgtgggaagaggcggggtctgggccagctgctggtcctgctctcctccttcttctggcctctaggctcccaggagtggtttggaacccgcgccatgtgctctggaggctgtgtcagggaagggggagtcctcgtgtcccctgcgcacaacacagacagaaggctggatccacccagtgggcggtcgggtgccaggccagtgcttaccccgccatgtttgcagcccgaggccagctggctgcaggtacagggctgtgcgtcaggggtcagcgtgcacacacccctgcaggtcttggggctcctgggttgcttctggaagggcccacatggggcctgactggagctgccgaggagtggagcttctgggaaagggatccctcctaggggggagtgtcttgggcctggggccacgtggcagggacagagacgggtccatggcagtgtctcctcttctctgtgaaggcaaacggcctctgagggagtattacagctgcctcatccaccagaagcatttccagcatatccaggtctgcaccccctggctggaggccgaggactaccccctgcttctaggtgagaggccagcaggaggctcagggaggaggcggggccttaagcagggggaacggggtgggcgggatgtgctttttctgaaaaggtggctctggaggccacttgggcacgggaccttrgctctggctgaactcccaggaggaggctacttcctggtgtgccagcccctccctgccagttggccccagaggccgtttaccaaggcgtttgaggaggccacgtcctttcagcctgccacgccctccattcagtcctcttccttcctgcaggagggctgggcctggggttggggccactgttgcccaggtgtgggagggcagtggctttgggaggtacaaggatgatgtgtcaaacagcgtcgcctctcccagtgagatggttctcctttgcctccgtctctttccccattgattcctccaagtggggagtcgtgtcttggtcctgatgcgtctctagagctgcatgttccggctttgagtgagcagagcagttggaggctgagggccttttcctggcaggactctccagctagtctttgttttagacagtctcgctgcattgcctaggctggagtgcacgatctcagttcatgcaacctctgtctcctgggttcaagtgattctcccacctcagcctcctgagtagattacaggattacaggagcccaccacaacacctggcttatttttgtatttttagtagaaacagggtttcaccgtgttggccaggctggtcttgaactcctgaccttaagtgatcctcctgccttggcctccctaagtgctgggattccaggcatgacccatcatgcctggccccagctagtctttagaaatgttaagctatatggctttattttcacagtgacagctggtttgtggtgggtgtgctgtggtttattattattattattattagtattagtattagtattattagtattttgagatggagtttcactcttgtagcccaggctggagtgcaatggcatgatcttgtctcactgcaacctctgccttcccaggttcaagcgattctcctgcctcagcctcctgagtagctgggattggaggcacctgacacgacgcttcgctaattttgtatttttttagtagagatggggtttcaccatattggccaggctggtcttgaactcctgacctcaggtgatccacccgccttggcctcccaaaatgctgggattacaggtgggaggtgaacttgggaggtggaggttgcagtgagctgagattgtgccactgcactccagcctgggtgacagagtgagactctgtctcaaaacaagacaaaacaaaacaacaacaacaaaaccaaattgtggttatgtagaaaaagtgtcaacttatgttttcagatgtcccagccaggccgtgtggctgcttggccagcttaagccacttgtgcttggtgatatcgggggccttatgagattttcactcccctccggggatgttccctcactgtgctgggaggatttgtgttcccaaggcagagaccagcgttctgaccgcacccctcttgcctagcatggtcggtggacctgggtgtctgtctgcacacgtcctccagtggcctggacctgcccatgaaggtggtggacatgttcgggtgctgtttgcctgtgtgtgccatgaacttcaagtggtaggagcagaacccgaatctttctggggatagcttcacaaatccaccgctgagggggaagcagtgcagagcgagatgcccacagtgaggccctgtccctcggtcagtccagcacacactggaggccaggaggaggagccctgcatttgctgtggctgggctgagcctcattgaagtagttgcttccatttagagctcatgttatatttaggttggtgcaaaagtaatcacggtttttgccattaaaaatgacaattacttttgcaccaacctaatatgaaaaaaaaagcatcttaaatactagaactccannnnnnnnnnnnnnnnnnnnaaaaaagcatcttaaatactagaactccactcggggcttttgctcctggagtagaattggcgggaattgcctgcaggcttacatggttttctttgttgttttctctcccaccatgtcccttttggccaagcttacgtggtgggtttgaatcagttgaatgagtgtcatgctgtggcctcactccacccagcatagacgggtgtttggaagggtggcactagaggagattctagaagcagtagcctcagcacaagttgagcccttggcccctgctcaggagccggcccctggatgggattcagggatgtgagcccctcgtgtgatctgagctcagggaatgtcaggatcaaacctggtgccctagaaaagtcatcttttatgtgctgagccagtctccagggggttgcctttacttattccatggccatggaattaagaaaaacatgcaaaaataattcttcagtccttgaagagcatgcagcacagaaggtacaaaccctccttaaggctccctcctcaaatcgctttggccattttgatgtgcaccagcgccccccccaggcctttgtaccctcagatgccaagtctaagaaccagctcctggaaaccacacccccctgttccaacccccagcctggcttgagcgtggggtgggtgggagccctggtgggcaccacagcggtctggtatcttctccaggcagctctcaggctcccttggttctctctgcagtttacatgagctggtgaaacatgaagaaaacggcctggtccttgaggactcagaggaactggcagctcagctgcaggtagccacgtctgccaccacgcccgggtgkgcagggttctggagactggcacygagccacgctccctgatccctgcttctcacagccagggtgggaccatgtggggtctggtggaaaagctagggagggagcagaggtcacagatgctggccctctctgctgccccgttttggtacagtaggctcgggaaagttaggacacaccccctcctgccctctggatttatggagctgacactccacaaatgatgctggagccgggtgggtcgggctgcagtttaggaagtgatcaggatcaggtaggtgtgtaggtaaagggagcttctgggaccagccttgaaagatgggcggaattctgcaaaggttacttgtttcttattgctaaaagtaatacatcattcttgccaacagagtgactgggaggattttcagtaaaggtccaggtcggaagtcatttagactgggtgccccagtctctgtcagaaccatggtactctgttgtggtgtgaaagtagccacagatcgtctgtagattaaggggtgtggttttgttccaataaaactttatttagaaacacaggctgtgggctggatttggcctgcaggctgtagtttgtgatccttgattcagacagtttagcaaggctgaaaagaacaccgacagccactcattacccacagatgggtgggactgtgttggccagaggccgagaggagggtgctcacaggggaacgtacagcatgtagaggccggaaggtgctccagggcaccaagtgtgggaaagtgggacatacaggtaagtttccaggggaagtttccggaaagcataatgtcaagttggaggcggagcactgctggggcgtgaagggtcttgagttcaagtgagggagttaggggcttgggaggggttgttattgggtcggggacctggggtcatccaggtggtgacctgggatggggttgggacaggcaatgaggtaagctctgctctttatttttttgcagatgcttttctcaaactttcctgaccctgagggcaagctaaaccagttccggaagaacctgcgggagtcgcagaagctccgatgggatgagagctgggtgcagactgtgctccctttggttatggacacagaactcctgggccagaggctaaaaccccagggcccctgctgtccttcccgcagcttcttctcggagtctcagggcaaatcctttcgagtagcgcctcccagtggccagaagctgatatgacggcagtggtgccgcctggtgaatgaattggttctgtgaccggggaagctgtggttggccctgatttcttctctggaggctcagaaacgcttcctgtcttcttctgttcttcacgccccatgctcctgctagagtattactgttctgtgacttccctgtgacctctgcagtactccttagcctgcgtttggtctccaggtgccacctttctgccgtgttcctaacatgttgattcctgtcttgaaaaaagcacctgctgcaccataagcccagggatgtggcagctgcagcgggcttggctttgtgaggaaccgagtgtgtccacgttgggggaacatcatacttgatacacacgtttttatttgcacaaagaaattgctattttcggagccagaattttcatgtctgatttatggtgattttccttttttttttttttttttttatttaataaatctcctatttattctgtttcctcaaagttacgaatgttattttctttcttttttttttttttttattgatcattcttgggtgtttctcacagagggggatttggcagggtcataggacaatagtggagggaaggtcagcagataaacaagtgaacaaaggtctctggttttcctaggcagaggaccctgcggccttccgcagtgtttgtgtccctgggtacttaagattagggagtggtgatgactccttaacgagcatgctgccttcaagcatctgtttaacaaagcacatgcttgcaccgcccttaatccatttaannnnnnnnnnnnnnnnnnnnnnnnnnnnnnnnnnnnnnnnnnnnnnnnnnnnnnnnnnnnnnnnnnnnnnnnnnnnnnnnnnnnnnnnnnnnnnnnnnnnnnnnnnnnnnnnnnnnnnnnnnnnnnnnnnnnnnnnnnnnnnnnnnnnnnnnnnnnnnnnnnnnnnnnnnnnnnnnnnnnnnnnnnnnnnnnnnnnnnnnnnnnnnnnnnnnnnnnnnnnnnnnnnnnnnnnnnnnnnnnnnnnnnnnnnnnnnnnnnnnnnnnnnnnnnnnnnnnnnnnnnnnnnnnnnnnnnnnnnnnnnnnnnnnnnnnnnnnnnnnnnnnnnnnnnnnnnnnnnnnnnnnnnnnnnnnnnnnnnnnnnnnnnnnnnnnnnnnnnnnnnnnnnnnnnnnnnnnnnnnnnnnnnnnnnnnnnnnnnnnnnnnnnnnnnnnnnnnnnnnnnnnnnnnnnnnnnnnnnnnnnnnnnnnnnnnnnnnnnnnnnnnnnnnnnnnnnnnnnnnnnnnnnnnnnnnnnnnnnnnnnnnnnnnnnnnnnnnnnnnnnnnnnnnnnnnnnnnnnnnnnnnnnnnnnnnnnnnnnnnnnnnnnnnnnnnnnnnnnnnnnnnnnnnnnnnnnnnnnnnnnnnnnnnnnnnnnnnnnnnnnnnnnnnnnnnnnnnnnnnnnnnnnnnnnnnnnnnnnnnnnnnnnnnnnnnnnnnnnnnnnnnnnnnnnnnnnnnnnnnnnnnnnnnnnnnnnnnnnnnnnnnnnnnnnnnnnnnnnnnnnnnnnnnnnnnnnnnnnnnnnnnnnnnnnnnnnnnnnnnnnnnnnnnnnnnnnnnnnnnnnnnnnnnnnnnnnnnnnnnnnnnnnnnnnnnnnnnnnnnnnnnnnnnnnnnnnnnnnnnnnnnnnnnnnnnnnnnnnnnnnnnnnnnnnnnnnnnnnnnnnnnnnnnnnnnnnnnnnnnnnnnnnnnnnnnnnnnnnnnnnnnnnnnnnnnnnnnnnnnnnnnnnnnnnnnnnnnnnnnnnnnnnnnnnnnnnnnnnnnnnnnnnnnnnnnnnnnnnnnnnnnnnnnnnnnnnnnnnnnnnnnnnnnnnnnnnnnnnnnnnnnnnnnnnnnnnnnnnnnnnnnnnnnnnnnnnnnnnnnnnnnnnnnnnnnnnnnnnnnnnnnnnnnnnnnnnnnnnnnnnnnnnnnnnnnnnnnnnnnnnnnnnnnnnnnnnnnnnnnnnnnnnnnnnnnnnnnnnnnnnnnnnnnnnnnnnnnnnnnnnnnnnnnnnnnnnnnnnnnnnnnnnnnnnnnnnnnnnnnnnnnnnnnnnnnnnnnnnnnnnnnnnnnnnnnnnnnnnnnnnnnnnnnnnnnnnnnnnnnnnnnnnnnnnnnnnnnnnnnnnnnnnnnnnnnnnnnnnnnnnnnnnnnnnnnnnnnnnnnnnnnnnnnnnnnnnnnnnnnnnnnnnnnnnnnnnnnnnnnnnnnnnnnnnnnnnnnnnnnnnnnnnnnnnnnnnnnnnnnnnnnnnnnnnnnnnnnnnnnnnnnnnnnnnnnnnnnnnnnnnnnnnnnnnnnnnnnnnnnnnnnnnnnnnnnnnnnnnnnnnnnnnnnnnnnnnnnnnnnnnnnnnnnnnnnnnnnnnnnnnnnnnnnnnnnnnnnnnnnnnnnnnnnnnnnnnnnnnnnnnnnnnnnnnnnnnnnnnnnnnnnnnnnnnnnnnnnnnnnnnnnnnnnnnnnnnnnnnnnnnnnnnnnnnnnnnnnnnnnnnnnnnnnnnnnnnnnnnnnnnnnnnnnnnnnnnnnnnnnnnnnnnnnnnnnnnnnnnnnnnnnnnnnnnnnnnnnnnnnnnnnnnnnnnnnnnnnnnnnnnnnnnnnnnnnnnnnnnnnnnnnnnnnnnnnnnnnnnnnnnnnnnnnnnnnnnnnnnnnnnnnnnnnnnnnnnnnnnnnnnnnnnnnnnnnnnnnnnnnnnnnnnnnnnnnnnnnnnnnnnnnnnnnnnnnnnnnnnnnnnnnnnnnnnnnnnnnnnngctcctgctagagtattactgttctgtgacttccctgtgacctctgcagtactccttagcctgcgtttggtctccaggtgccacctttctgccgtgttcctaacatgttgattcctgtcttgaaaaaagcacctgctgcaccataagcccagggatgtggcagctgcagcgggcttggctttgtgaggaaccgagtgtgtccacgatgggggaacatcatacttgatacacacgtttttatttgcacaaagaaattgctattttcggagccagaattttcatgtctgatttatggtgattttcttaagaaccagaactgctggcagaaagggggcacccacacgcttagatagccgatgtcttattagagggcactttgtggttcctgatttggaaattaacactctccaaacattccagtccaatgaaagttttatccgctttcccatataaaaattcttcccacgagagtgacttgattctcacgatcctgttggagtcgtgtgtgagtcctacagtgtgaggttcagcattgccatctccaagtgctctccttagggaaacagtttctggtcatgatgagcttccgcttcccatgtgatcctggcccggcctggaaacagaacacgtgtttgaggatggcggtgtttggggacaggacatgagcattttgtgtggggctgctaggacaggcctggcggggtggggggtgtccaagtcagtttacttggttcacaggttcccaggcccacccaggtgcctagaattggcctccaggatgggacaagaaatctggttttgcatagaaatggctagcagcaggcaccgtgctgctgtccactctctgcctgcgtccatcctagcacttggcacagcgggacagaagcagagatctgaacccacatctacctggctgctcagtcaacccactcttcacaaagcttagaaagccgccgggtacagtggcttacgcctgtaatcccaacactttgggaggccgaggcgggcggatcacttgaggtcaggagttcgagaccagcctggccaacatggtgaaaccccatctctacaaaaatacaaaaattagccaggcatcatggtgggtgcctgtaatcccagctacttgggaggctgtggtgggagaattgcttgaacccaggaggcggaggttgcagtgagctgagattgtgccactgcactcaaccgtgagtgacagagtgagactccatctcaaaacaaacaaacaaacaaacaaaaaaaaaccgcacacaccacacacacacacacacaaagcttagaaggggctggtgttctcagaagcacagatgtctgaagagccgttagccagaatgattcttttttttttttttttgagatacgatcttgttctgtcacccaggctggagtgcagtggcacagtcattgctcaccacagcctcgactcctgggctctagcaatcctcccacttcctgagtagctggcatgacaggtgcatgccaccatgccagtaatttttttgttttgtagagatggggtcctgaacgcatggcctcaagtgatgctcctgcctcagcctcttttattatttttttttagacggagttttactctgtgccccaggctggagtgcagtggcgaaatctcagctcactgcaacgcctcccaggttcaagtgattctccttcctcagcctcccgggtagctgggattataggcgtgcaccaccatgcctggctaatttttgtgtttttagtagagatggggtttcaccgtgttggccaggctggtcttgaactcttgacctcaagtgatccactcacctcagcctcccaaagcctcagcctcttacagtgttgggattacaggtgtgagacactgtgacctcggatgattttcaatcacagttttttgttacaagtggaaaatgcgtatttttaaaaatgaagtagcacagacatgaacgtgtagaagtctctataatcctgccaatggcacctgttcacgtgtatatcagggatatacaatattttggcctccatgggccacgttgaaagaagaagaatcgccttgggccacacataaaatacactaatgctagcgatagctggtgagctaaaagaaaaaaaatcacacaaactcctcatactgttctaagaaagtttacagatttgtgttgggccgcaggttggacaagcctgctgtatatatattctaggttttcccctataggtatacttatgtgaaaatgatgattgtgataatttttttttgagatgaagtcttgctatgttgctcaaggtggccacaaactcctgggcttaagccatcctcctgtctcagcctcctgagtagttgggaatataggtactcaaaaccatgtgtgggtgattattattagtttttaaacaaaaatgggtcggggcgcagtagctcacgcctgtaatcctaacactttgggaggctgaggcagcagatcacttgaggtcaggagttcaagaccagcctggccaacatggcgaaacctcgactctacaaaaaatacaaaaattagccaggcgtggtagcacgcgcctgtagtcccagctactcaggaggctgagatgggagaatagcttgaacctgggagttgcgaggttgcagtgggctgagatggcaccactgcactccagcctgggcaatgcgaaaccagactctgtctcaaaaaaaaaaaaaaaaaaaggttggtaggggcttatgctatgtgtgctgtttggcacttttttcacttaaaagatattgcaggtattttttcatgtaagtatctgaagaaagacttcctgtttttttttttgttttttttttttgttttttttttttttgcctttttgagacagggtcttgctctgttgcctaggctggagtgcagtggtgagatgagggctcactgcagcctccacctcctgggatcaagccatcctcctacctcagcctcctgagtagctgggactacaggtgtgcgcaaccacacctggctagtttctgtatgttttgtggagatggggtcccactatgttgcacaggttggtcttgaactcctggcgtcaagaagtcctcctgccttagcctcctaaagtgctgggatgacaggcctgagccccgcgcccagccagcctcctgtgcgacgttttgcgggactctgtcgtggaacccagtatgccttcgtgtgctggcttgtttgttggctctgtagttaacgggctgccccacgtgggcaggcattggatcatccgtgtctctgtgtgcaggcagaggctgctgcaggtgcatctgtgcacatggctcccaggaggggctgtgctcagggggagctggagcagaggctgatggcattggggggcttgggtgtagtgtggaggcatgagagccaggtggccgggctgcagtctgcgggagttcaggggtcgcttggcctctgtgtgtcctagtgtctttgtcagtgagatgggacaaggacagcacaccctcacaggtgctgggggctgacaaatgtcaggtctgaggacagttgctggcacactacggggccagttccccttctttacagtcaccctgctcgtcttccatcgactgggtgctcaggacagtggcatggtggatccgcctgtatagcctgtgctccagcatcctgcag

SEQ ID NO: 97267 - DNA, 73875 bp, Homo sapiens
  misc_feature (1)...(73875): n = A,T,C or G
attataatgacctaatatttagaaagtaaagaatcaaagtaaaaccttccttaggtctataatacactaggacaactttgattgctgagagaaagctccaggatgaacatacttgtacgattcttgcttaaataaatgctagtgtacaaagatgagtttataacaggtttagattacgatgatatagaataagattagttccacagtccagaattggcctctgatgagattatatgccctacacactactttggctttcaaagtttacttttaggtactaggcaataatcttaaactccatttcaactttaatcagaaaccataaggtggttaaagaaaatgtaatttctgtaattaccaaagctgttacacagatttttttccttcccaatgccagcagaaaagtgggttacacagattttgatagattttcaaaagcattaggtgaactgattcacactaatcaaaatgacaaggaactgatttatacataagtatgctcatttatccgttataatgagaactgtcaaactgatcagattcttaaaagcaaagaatggttttgccttgccaagacctcagacatcatctaatctaacccattcacagattccaaagagaaggaaaatggtaatcagagagtttaagaattttttagtatactcctgtatggatcagagaacgcactctggaaggctggcctaatttgaatgcctggcaagaagaatatccctattatgaaaaaagacaaatcatataattaagattatccaattctttttggtttgaatctgtattaaacaatattctaaattttcgtttggttctctggatagatttccctactagaagaaaatgagctgactaatccatgtaggtatcctggattgtttgtagcctgtgttaataaactaccaatctggcttatgcattgatctttagtggtatagatatcaactcatggagtctgatccctcatgactttttttttttttttttaatgagacagagtcttgctctgtcgccaggctagagtacaatgtgacctcggctcactgcaacctccgtctcctgggttcaagcagttctcctgcctcagcctaacgagtagctgggactacaggcacacactaccatgcccagctaatttttgtatttttagtagagatggggtttcaccatgttggtcaggatggtctggatttcttgacctcgtgatccacccgcctcagcctccaaaagtgctgggattacaggcatgagccaccacggtatttattttttttgagacagaatctcactttgtcacacaggctgaagtgcagtggcaccatctcagctgcacttattacaacctccgcctcctgggtttgattctcgtgcctcagcccgccaagtagctgggactacaggtgcatgccaccacaccaggttaatttttgtatttttagtagagacagggttttgccatgttgcccaggctggtctcgaactcctgagctcatgcaatctgcctgcctcagcctcacaaagtgctagcattacaggcacgagccactgtgccaggcccctcatgacttttaaaaaacaattaaaagaaatagaactttggtaaaatagtaaaaatggacagaattttgaattatatgattcaattaaatagaacagtattctatttgaatctgtattcaaatagtattcttagccatatgaaataaatttttaaaaattatttattctggccaggcacggtggctcatgcctgtaatcccagcacttcgggaggccgaggaggctgaatcacctgaggtcaggagttcaagaccagcctgatcaacatgacaaaaccccatctctactaaaaatacaaaattagcggggcatggtggcacatgtctgtaatcccagctacttgggaggctgaggcaggagaatcgcttgaacccgggaggcggaggttgcagtgagctgagatcgtgccatgttgcactccagcctgggcaacaagcacgaaactccatctcaaaaaaaaaaaaaaaaattattgattctgaataatgttcatatggttcaaaattaaatctgttgtaacaaggtacacatgagaagtctcactccaaccccttccttatctactttgctatcccctactttgcttccacacaagcaatccgttttcttgtatatcctcccagctacaagtaaatatacatatatattctaataatcttgtctttctaaattcaatagaataccatatatactattaacacctggcttttttcacttaattaaacccagtatatctagaatacctaaagagtagaatctcaaagtaatgttggaccagaggatctttaaggttaccacttaatctcctagccaaaaggttattagggcagcctttactcttaatctcaaccaggacaggttctgctaacacatttattaaatgtagaatcagtgtctactcgttgcagctcctgggcttaaggagttcatagtttaataaggcacagccaggctaacagttatttgctgctgctccctgctgtatccttgactcctagaatagcagcctctcaatgattattaattgaatgaatgagtaactctccacaagggcgtctctttttgagatgaagacttctgtgtaaatagctttagttcagattgccgatcatagtatttttgcagtaattgaccagaatactatcaactttttttttttttttctgacacaaggtctcactctgttgcccaggctggagtgcaacagcacaatctgggctcaccgcagcctccgcctcccaggttcaagtgagtctcccacctagcctcccaagtaccaagtacctgggactacaggtgtccgccaccatgtccagctaatgtttgtattttttctagagacaggttttcaccatgtgggccaggctggtctcaagctcctgacctcagttgatccacctgcctcagcctcccaaagtgttgggattacaggtgtgagccatcgcatctggccaagttctttttttgagttacctaaagaacttcagcatgtttccccagagttacttcttatctgccttgattgtgagaccacatttcaacttgctttacatacatcagctgggatagactactgatggcaggtgaacttgtatcacagaactggatgtgttttacacaagctttattttgggtattctcgccttgctatttcccatgaaatacggcttaccgatgacaatgggagaatcaatgaaaaggctgatgtacaatctgtgcaagtccaaataaatgctcacttggaagtttcaataaaatcttcaataagctttaacatggagtttgacatagtgttagtgacacactttgcatgacacagatgtctgccaactccattttctatttcttttttctttttgagacggagtctcactgtcaccgaggctggagtgcagtggcaccatgtcggctcactgcaacctccgtctcctgggttcaagcaattctcctgcctcagcctcccgagtagctgggattacaggtgcccaccaccacgcccagctagtttttatatatttagtagagacggggtttcaccatattggtcaggctggtctcgaactcctgacctcaggtgatccatccaccttggcctcccaaagtgctgggattacaggcgtgagccactgcgcccagccccattttcttttctttttcttttttttttttgagacgtagtctcgctcagttgcccaggttggagtgcagtggcgcaatctcggctcactgaaagctctgcctcccaggttcatgccattctcctgcctcagcctcccgagtagctgggactacaggcgcccgccactacgcccggctaatttttttttgtatttttagtagagacgggatttcaccatgttagccaggatggtctcgatctcctgacctcgtgatccgcccgtctcggcctcccaaagtgctgggattacaggcgtgagccaccacgcccggcccccattttctatttctacttttatgtaccctctggccctctattctgctgtcagagacataggagtgtttccttattaaatgggttattttgaaatgagtttttacctctgtattttgggagagtcacaacaaaccaaaccgttccaaaactactcttcatgtaaaatttcataaattcaaataaacattccaacccagaaggggtcactaacaaataacaaatgccctactacaatctaaacggaatataatccttctagccccagctctctacagcatattttgcataggtacccaggagctaacgatgggcattatagttggatacatcagcttcacacattttaatcatttccagaaattaaacagtaaaagatgcctgaccagagaaaaatatttaatcagtaagaaagccggtattaattttatgtctaagggttatcatgtaaagctgtggaagtaaacaagaaggaagatggattatgcttatccagttatagattttgttagaaaaaggagtacagcaacgggagaagaaatgagatcttttcaatcagggttgtctaccccttaccttaaactggatcctggccactaataagcacatctcagagcagacagtcagctctttcatttccagaacccccctgaagaaagactactgttctccatttcttaagggatttgaagaaactcaaaggctcactgtgtctttgaggtctgtcgatagacagctactgctctgtatgcccatgaatagatccctaccagcgaacccctcttttctctatactagaattcctaaccctactaagttatcttcctatatatttataggacgtataatttttcaagatctcacacaaacatggtctcccgaggcacccaggaaaggccttccccgacatcaaacagagcaattctgtggtgtagggggccaacaatggattccaggacatcccggacagatatcacggcagtcttagtattttgctctcaagagggctttctggcttcgtttctctttggtttcttaagaggggcggcatgagaaaagcaggagcccctcaggtgagcagactcttaaacacaaacaaaagactacgactctgcggccaaaatgaggtccccaacgagagaaccgcttcctgtggtgggcgttcggctttggaggcggcagggaaatctcatccaagtcaggaaagtgggtaaaggcagaaagagaaggggctggaagactcacgagtcttgaataagaagcccagacgaccacatccccaggacagcagttccaaaatgcggttcccgccctaagccccaaaaagacgaaggtcgtgagacgggaagcccgggacccagcgcagcgagcgaccgggagcagcgcgcacaccccagccccgctccctccacatcccgcccagacctgggagcatcccgcccgggcggcggggccagcctgggagcggcgcttacccacttcccagcagcaagcgcagggaccgctcctatcccgatcgttcggacagcaccttcctacgggccgcgctgccgcagcttctccacccgcgccccgctcgatctgagctccctctcggcgcacgcccctccctcaggctgccacgcgttacactctgagtcccgggcctgagcccgtatttaaaggcttttgcctgcgaaggcggaggcttcattcccccgcagccaggccctcctggattctgccctcagctgcttcctagctccccctcccgctacacaaggcccagggccaggtccctatttccttcacggctcaggggcggggagactggggctggtcctggctgggagggcctgccccgcccctggcctagctgggcaaatccgctttggccagctcagcggctccgcccctaccgcgagcggcgctgggcggggctgcgtgcgtggcgtgtccgctggaccaggggacgggggcgcgccgcaggtgtaggagctttgcgcgcctacctggcggtcgtgggtcgaggaggggtcaagaattgttgtctagcagccctctccccgctgccctgtcctggccgaggcaaaggccgcgtgcgctccgcgtctgccaggctttagggctgcgcggacactgggtgggtggtgggccgaggcgaccggaaggtcctggccgcctttccggtctcctcagcaccctggagcgccgccctcgggtttcggtctcctggatctgcgggtcggtctcggcgggcggattactcctcgcccacaacctcgaggccccgrggtcaaccgcgccctccgggccggcaacccagggtttagtcagattcctcctgacccaccgcttctgggaaagaggcgcctcccgtcaggaggatgctgagttcctcatgactggaccagtgagtgtccactccctggtccctggcgagagaggcgggacccccacgccctcctggcgctctttgcagagatgttcctcaggcccaatccgggatttgggatgtctgtgcgtgctgtggagcagagagtttgcaacatgtaagtgccgtgcgtgaggaagagtaaaattaacctatggagcctgctcatttttaatgtggagggcagttccgttcctttctttcgccgcttcgaggtcattttaacactcaaatctaacatataagaaaaaaagccaggcataatcatggccttttatttccctcattaaggattacatcaggtgacataagccattttaacatacatcatgaagaaagtgattagtaatttataaaggcacattaaaataccatataaattacggttttcttgataggatcatgatggtgactttaagaaagtggttgaatgtggatgaaacagtttgctgtggattgtagcacgtgtggcaggatatgtaggcttgttggttggttgttttgagacggagtctccctcttgtcgccgaggctggagtgcagtggtgcgatctcggctcacctcaacctcctccttccagattcaaacgattctcctgcctcagcctcccgagtagctgggattacaggcgcccacaaccatgcccggctaatttttatatttttaatagagaccgggttttgctatgttgaccaggctggtctcaaactcctgacctcaggtgatccgcccgtctcggcctcccaaagtgctgggattacaggtgtgagccactgtgcctggccagtatatgtaggctttctgcattctatgcagttcagttcattcatccaacaaatatttaatgcctgttgtgtgtcagacgttatcctaaagactgaagatgcaaaagggattaagactcaattcctttggccaggcacggtggtttacgcctgtaatcccagcactttgggaggccatagcgggcggatcacctgaggtcaggagttccagaccagcctggccaacatggtgaaaccccggctccactaaaaatacaaaaagttagccgggtgaggcggtgggcacctgtaatcccagctgctcaggaggctccctgttgcagtgagccgagatcacaccactgccctgcagcctggggaacagaacgagacactgtctcagaaaaataaccaaacaaaaaagactcatttccttcttgcaaagctcacaggttgggtagaagagatatgtaaacaagtaattgcactagatatgacaagtacatctttttgaacatacatagatttaagttatctaatacagtttgctttgtaataaaaaccacttatcttagtcccttcattttgaattcaacatttttctatttagtattcacctcacattcttttttagtattttggtagaatcagactcttcaaaacggttaataggatttcagaaattaagtcaattttcagtgccagctagaatggacctttggatttaggacagaggttctccaaatgtgagctggggactgtagacaatctccgaggttctttctgggatccatgaggtcaaaaagttttcatgtgttacttgcttttttcactcttgttctctcagaagtrtacaatgaagttttgtggagactataatgtgctatcaaagcaaatagaattaagctgttttttaagtcagatattagagatttacaaaaatgtaaaacaatgccaatcttatcttttgtttttaaaatatagtaatttttcattaaaatatgatatttatgttaacatgtaatgggcttattgtcaattttaaggaattaatcttttatatataatttatcagttttcatttctaatatggtaaataccaatagttacaatccacatgaaaaaaacttctttgagtcttcaatttttaaacatgccaaggggtcttgatactacaaactttgagaactgccaaggtaggctagttattttcaaattatgtttcatggagccctgaatcctctggtagtgtgtcagaaatctgtgaggatagagaatcagtaggaagttaaagacaaggctctgggttcccacatctccccrtcttctctaatggcagttcaatttttctctgtttatctggttttttgttttttgctttttgttttttttttcttgagacggagtctcgctctgtcatccaggctggaatgcagtggtgcaatcttagctcactgcaacctccacctcccaggttcaaaagattctcctgcttaggcctcccaaatagctgggactacaggtgcgcaccaccacatcacgctaatttttgtgtttttagtagagacagggttttgccatgttggccgggctggtctcaaactcctgacttcaggtgatccacctgccttggcttcccaaagtgctgggattacaggcatgagccatcatgcctggcctgtttatctgctttttgtatcaattaggtggagactctcaaacttcaattcttgactactgtgtacctacaggctcaacaccaagtggaagctgccaaggcttggggcttccaccctctgaagcaatagcccaagctatgcctcagccccttttagttacagctggggcagctgggacacaaggcaccaagttcctagactgcacacagcagagggatcctgggcccggcccacaaaaccattttttcttcctaaacctccaggcctgtgatgggaggagctgccatgaagatctctgacatgcccgttttccccattgtcttggtgattaacattcggatcttccttacttatgcaaatttctacagctagcttgaatttctcctcagaaaatgagattttcttttctgtcatgttgtcaggctgcaaattttccaaacttttatgttctgtttcccttaaaaactgaatgcctttaacagcacccaagtcacctcttgaatgctttgctgcttagaaatttcttctgtcagataccctaaatcatctctctccagttcaaagtttcacaaatctctatggcaggggcaaagtgccgccagtctctttgctaaaacataacaaaagtcacctttgctccagttcccaacaagttcctcatctccatctgagaccacctgattggatttcattgtccatataattatcagcatttttgtcaaagccatttaacaagcctctagggagttctaaactttcctgcattttcctgtcttcttctgagccctccagactgttccaacatctggctgttaacccagttccaaagttgcttccatatttttggatatctttttagcagtgcctcactctactggtaccaatttactgtgttagttctttttcatgctgctgataaagacatacccaagactaggaaatttacaaaagaaagaggtttattggacttacagttccacatggctggggaagcctcataatcatggtggaaggtgaaagtcatgtctcacatggcagcagacaagagaagagagaacttgtgcagggaaactctcatttttaaaaccatcagatctcatgagacttattcactatcacaagaacagcacgggaaagacctgcccccatgattcaattatcatctgccgggtccctctcacaacatgtaggaattatgggacctacaagatgagatttgggtggggacacagagccagtcatagtaaggtattgtttgggtaaaacataagcctttctttcctttctttttttttttttacagggtctcactttgtcacccaggctggaatgcattggcatgaacacgtctcactgcagcctcaacctcccaggctgaagtgaccctccaactctgctttcacagtagctgtgatatggtttggctgtgtccccacccacatctcatcttaaaacccagtgggaggtaattgaatcatgggggcaagtctttcctgtgctgttcttgtgatagtgaataagtctcatgagatctgatggtttttaaaagagttytggctgggcatggtggtgggcacctgtaatccaaactactagggaggctgaggcagagtgaattgcttgaacctgggagaaggaggttgcagtgagccgagattgcaccgctgcactccagcctgggcaaaattgaagactctgtctccaaaaaaaaaaaaaaggagttcctctgcataagckctctctctttgcctgctgccatccatgtaagatgtgacttgctcttccttgccctcactatgattgtgagtctttccccagccacgtggaactgtaagtccaaataaacctctttcttttgtaaattgcccagtcttgggtatgtctatcagcagcatggaaatggactaatacagtaaattggtaccagtagagtggggtgttgctgaaaagatacctgaaaatgtgaaagtgactttggaactgggtagcaggcaaacattggaacagtttggagggctcagaagaagacaggaaaatgtaggaaagtttggaacttcctagagacttgttgaatggcattgacaaaaatgctaatagtgatacgaacaataagatccagtctgaggtggtctcagatggagatgaggaacttgttgggaactggagcaaaggtgactcttgttatgttttagcaaagagactggtgacattttgcccctgcccgagagatttgtggaactttgaacttgagggagatgatttagggtatctggtggaagacatttctttttttttttttgtgacggagtcttgcattgtcgcctggggtggagtgcaatggtctgatctcagcttactgggttcaagcaattctgtctcagcctcccgagtagctgggattacaggcgtccgccaccacgcccttctaattttttgtatttttagtagagacggtttcactatgttggccagtggaagacatttctaagcagcaaagcattcaagaggtggcttgggtgttgttaaaggcattctgttttgactgggtgcggtggtgcacacctataatcccagcactttgggaggccgaggagggtggatcaagaggtcaggagttcaagaccagcctggccaatatggtgaaaccctgtctctactggaaatacaaaaattagcttggcatggtggtgtgcgcctgtagtcccagcttctcgggaggctgaggcaggagaatcgcctggacccgggaggtggaggttccattgagccaagatcatgccactgactccagcctgggcaacagactgagactctgtctcaaaaaaaaagaaaaaaaaaaaggcattcagttttataagggaagcagagcataaaagtttgggaaatttgcagcctgacaatgtgatagtaaagaaaatcccattttctgagaggaaattcaagctggctgcaaaaatttgcataagtaccaaggagccgaatgttaatatccaagacaatggggaaaatatctcccagacatgtcagaggtcttcatggcagcccctcccatcaacaggtccagaggcctaggaggaaaaagtggttttgtgggcagcacccagggtccccatgctatgtgcagcctagggacttggtgccgtgcgtctcagctcctccagtggtgactgaaaggggccaacatagagctcgggctgctgcttcatggggtggaagtcccaaatcttggcagcttccatgtggtgttgagcctgcgagtacatagaagtcaagaattggggtttgggaacctccatctagatttcagaagatatatggaaatgcctggatgcccaggcagaagtttgctgtaggggtggggccttcatggagaacctctgctagagcagtgcagaagggaaatgtggggtcggagcccccacacagagtccccgctgcggccctgcctgatggagctgtgagaagtggaccaccgttctccagaccccagaatggtagatccaccgacagcttgcaccgtgtgcctggaaaagctgcagacactcaatgccagcctatgaaagcagcctggagggaggctttaccctgcaaagccacagaagtggagctgcccaagaccatgggaatccacctcttgcatcagtgtgacctggatgtgagacatggagtcaaaggatatcattttgaagctttaagatttgactgccctgctggatttcagacttgcatgggtcctgtagcccctttgttttggccaatttctcccatttggaatggctatatttacccaatgcttataccaccattctatctaggaagtaaataacttgcttttgattttacaggctcataggcagaagggatttgccttgtctcagatgagactttggactgcggacttttgagttaatgctgaaatgagttaagacttcggaggactattgggaaggcatgattggttttgaaatgtgaggacatgagatttgggaggggccaggggtggaaggatacggttgggttctgtgtccccacccaagtcttatcttgtagctcccataacccatgtgtcttgggagggacctggtaattcaatcatgtgggctggacgcggttgctcatgcctgtaatcccagcactttgggaggccaagggggagatcacttgcgatcaggagtttgagaccagcctggccaacatggtgaaaccccatctatactaaaaatacaaaaattagccaggcacggtggtgggcacctgtaatcccagctacttgggaggctgaggcatgagaatcacttgaacctggaggcggaggttgcagtgagccgagatcgcaccactgcactccagcctgggcgtcaaagtgaaacttagtcttaaaaaaaaaaaaaaaaagaagaatgggagtgggtctttcctgtgctgtcctcatgatagagaataagtcttacaagatctgatggttttaaaaatgagagttatttctctcttctcttgtctgccaccatgtgagtcatgcctttcaccttccaccatgattgtgaggcctccccagccacgtggaactgtaagtccaataaacctctttcttttttttttttttttttttttttttgagacggagtctcactctgttgcccaggctggagtgcagtggcgcgatctcggctcactgcaagctccgcctcccaggttcacgccattctcctgcctcagcctcccgtgtagcaggcattgtcacaggcgcctgccaccacacccacctaatttttttgtatttttagtagagacggggtttcaccgtgttagccagggtggtatcgatctcctgaccttgtgatccgcccaccttgggctcccaaagtgttgggattacaggcgtaagccactgcacccggcaataaacctctttcttttgtaaattgcccaggtatgtctttatcagcagcatgaaaatggactcatacaatgatccattacctagggtaaaattctcctgaatgtcaaacaaagagataaactacatttgggttttggktaagtcccctgtaatgatgaatcaagaatcctcaagtctgtcttgccacccatttaatacgtatttttgttaaggctgaagtttagagttagaatcaggacattttggcctattgagaggttctgaattccaacagaagatgccatgtaaatcagtgaatttgattcttttaaaagcaacttacaaaatttacaagatgtattcaataaagcagtttagctttggtatatcaaaccttataatgaaccatttttcccacttcatcttatgcaatgtttaatattttctatttttgtcaaggatattaaacctacacctggaaacatattaaatgccaacttaaaatgtgagaagtttggcagaactcagacccattcttccaatttccaagctgtttaatcacactgattcagacactccggatagcagctgggattgtagttatctttatgctttgagctctctagttttgtctrcacatcttataaaatatcccctcctcattctcctctagctggaacactaacccaatggatgttgtggtgaactttctttgaccaggcagagaagtgcagcattgggtggaccatgcacaaccagtttgagaagcactgctctaggggttgggggagcaacaatagaaagagtgtaggttctgaatacctgaagcatacattttagctctagactgcttatattgttgttacatgaaagagaacttttaatctggtttaaaccactggatctctttattccagcaagtgaatctatatccaactaatatttactcccagtctgttctttctcacccctctttcccttactataaaccttttctatatcaatttatatcattagttgctcagcccacaaaccagatgtcacttttgttttctcttttccttcccattcatagccaggccatcgttgtgacttattggctgtacctccaaaatatatcccagatctgatctcttcttataatttgtactgctacaaccttagtcaaagccactaatatctcttatctgaactccartggtttactagttttctgcctctcttcttgacacaattcatctttctacatagcagccagagtaagataaaatcataaatcagatcatataacttctaccccctgtaccaatggctatcttttatactcagaataaaatccaaaacctttatttggcttccaagatcctacaagatagagaccttacttctcatcttgtacccatcatttgatcttcagtcccttgaaaatgccaagtctatttccatttcagggcctttgtgcttgttactattgtttcttttctcttggaaaactgcccagatctttccttagctgaattattcagatcccaactcaaatatcatctctttagaaaattctttcagaaccaggtgtggtggtgcacacctgtaatctcagctactcgagtggctgaggctgatggatttcttgagcccagaagtctgaggccagcctgggcaatatagcaagatcctgtcaaaaagaaaaaggtatctcaccatgattatattttaatttcccttcagcaattagaagtccctgaaattaatttaccttatttgttggcatttgttggcattgtgcaagtaatgcttgcacccaggaggcagagtttgcagtgagctgagatcacgccactgcactctagcttgggcaatagggcgagactgagtctcaaaataaataaataaatacataaaataattttagagacagagtcttgctctgttgcccaggctggagtgaagtggtgggatctcggcttactgcaacctctgcctcctgggttcaagcgattctcctgcctcagcctcctgagtagctgggattacaggcgtgcaccaccacgcctggctaaattttgtatttttagtagagatggggttttgccgtgttggtcaggctggtctcgaactcctgacctctgatctgcccacctcggccttccagagtgctgggattacaggcatgagccaccatgggcccacaaagctattttacttagcattttttttcccgaggctaaattgggaactactgacaatactattgacaatactaaatatatttttaaattattttacttatttttgagacagggtctcactgtgtcacccacgctgtagtgcagtgaaccatcaccactcactgcagtctcacccttcctgaactcaggtgatcctcccacctcagcctcctgagtagctgggactacaggcatgcaccaccatgcctggctaatttttaaaattttttgtagagatggagtttcgccatgttgcccaggctggtctcaaacttctgggttcaagtgatgcaagtgtctcagcctcctaaagtgctaggattacaggcgtaagccactatgcccagccttttattttattttattttatttatttattttttgagacagagtcttgttctgttgcccaggctagagtgcagtggtgcaatctcagctcactgcaacctctgcctcccaggttcaagcgattatcatgtctcagcctccctagtagctgggattacaagtgtgcaccacacgcggctaatttttgtattttttgtagaggcagagaggcagggttttattatgttggccaagctggtcttgaactcctggcctcaagtgatctgctcaccccggcctcccaaagtgctgagattacaggtgtgagccaccatgcccaccaacctattttttattttaaaaaattgacagcatactaaatgtttgtaatgcaaatgataaaattgctacaatgaaaacaagaagttgagaattagatgaagagttgattaagggaactatgagtcactgtgttagagcatgtatattatgaaaattatagcagaagtgataaagggtgacaattgttacctatcttcaatcaaaagctctttgaatatctttcttttttttaattttatgaattttttttacagagacagggtctcactatattgcccaggttggtctcgaactcctgggctcaagggatcctcttgccttggcctcacaaagtacctggattacaggcatgagccacagtgcctggccctctttgaatatctttaatgcttttagagattagcatcagagaattattaatactagagggcacaaggaattagccattgccagtggacacctacataggtgtgactatgtgactcagttttaaaaatgtgacacaatgaaaaaattccttggatgttatggaggacgaaaattttgtaagtcctatccattctttaatggagaaactaaaatttacaatattactttatttagcccaagattttcttaagctttgtattttctaattcagctttggcttacagaatcatgcttgaagtttgagactgccagctttcaacaggcagttactagtgaaactctttggaaagatgagaagatgttgacataagtgtaatgtgagacaaagcaaagtaaaatgtaatttttaagaaaatgttgccgggtgtgatggtggctcatgttgctgttggttgctatgggagtgaacgaagggggacgaatgcagaaatgaagacaaagacaaaaagagtatttttggaagaaggggtcaggggactccttgcttctagtgggcaagggccctgagcttctacagcccttcatatttattaggtagaaagagcagggagggagaggtaacagttggtcagctgcttgatttatcacaggtacacataattgcttcctttgtacaacaggcttcagatgttactatagataatcacaaggaacactgcgcttggggcatgactgccctcagcaacccttctggcggcagacacagttgttagttttccaacatcctgctttcatgagaacagttttctgtttgctcatatagccttcagtggtatactgagttggtcacgaccttcattctttcggcctgtaacatctccccatttttgtttttgcattaattgaataaaggtaattgcaggttgtgcagctctcaattgccgtttggtggtccagctgattttgcagactgttaacaaaaaacaaaaatataataacattaatcccatagttacaaaaaagacattgagatgctatttgaagtaggtcccagggttaaggctgtctaaaccttgctggaattctgcccaagcttttaaagagggctgaaacgcttgagtctgcttattcaagttaaggattttactttgtaaatcattaatatcaaaagtaacattgaatgtgaaagctccctgtaaatgggcttttacaaggctcaatggatattcactttggttatataccaaattggtcacacaaatatgagtatgattaaaatgacaacgcattgctgctgcaactgcaaactttgtacttgttcccctagccatagaacagtagtctttaacattgccacctctgtttgtatttcggtgttaattttattttgaagcatccatgcctggtcgactgtgcatgtccagttttccacatattgagctgtttgaatggagctgtgcgttgctgctgaggacaacacaacagaggttattaatgtaactaaggagactataacaaaaattatcatgcctaaggctctatgagcacgatgagtaagcggagtaaaaaggagtttcataagatgtaaagcgggggtggctgcccaaggctaagataaatttacaggaattcataatccaggaacatgacctagaattgttagggtggatatgtcatgtgtttgtattgtgctatgattaaggcaatgatacagttgacaggaatcacaagtcaattgggcatcatctacctggaggtgggttttttttgctgctaagaaaatataaggattaaaaacaaattgtaaattgagtggtaatattttctacaagggtaacattaaaactgtgtttagcacaattactattattggatagtgtcccaatccaaatgctgccattcataaatgggagtgctgctttccatattgactcctgaattggacctctctttccttgataatgccattgaggcaaaggtgagctaaagcatgtgctgtgtcaagcaatttgggcagcagattgagattgaattgcaatgtgatgtagtgggagatgttaaagttttgccaccagttccagcaaagttaatgccatgaggtctgatgctcatgtctcccaaccaaatgaccatggggaccccagtaaataatgtctcccattagcatggactgttgtctagctagggagcyaagacacggggtccaaggagggggattagaattatcaaagggagcccattctatataattaatacaatttgggtgatggggccgggagtgattagtaactacaccagtaatattagtagaactaaggcccaataggtacgtaaattttccatggtaactcaaccatgcctgggattgaattgcaaggcaactgcagttgagcagtgtatcctgggtgatgcataaagaaaggccctccaatggagtggtataattgataccattgttctgagagtctaattgctctgtgtcagggggagttaagggtcccggtgcccatgctccttgatcatgatatatctcaggaggagtgtcaccccggtcatactaccggggggttaggaacataagcccaatatgtttttgcctctgcacagggaaaacatagcacacaggatatcatagctagcatggccataaacatggagtcaggggtttttgcctgaccctgatgctccagcagtttctcatcttcttgtgtggttttcttgatctgtaaaacacaagcataccctcatccccatgtcagtaaatctaccaggcctttccattgtccttcttccagggatttccataatacttttgggtaaactttcctttttccctctaacatttgccagtgtcattctaccggagtcttattatctgtaccaggagttaaaaaatttaaagtaaataatgctaaatgtagtattgtttgaggtggtaactggtctcctatacctcctttttgttttttcagcgcatgttgtaatgtttgatgtgcctgctctataattccttgtcctcgagggttataaggaattcttgttttgtgagtgactgcctataactgtaaacaattttgaaaagcatgactaacttaagcaggtccattgtcagtttttaattgtttagggaccctcatatcggcaaatgacaacagacaatgtcattggacatggccagctgtttcacctgtttgacatgtagcatgcagcatatgagaataagtgtctatagtcatatgaacatagctaagtttgtcaaaggctgctatatgtgtaacatcaatttgccagatttcatttggagctaagcctcgtgggttacatccttctaccggtataacaccagggacatgctgacaagtggggcaggcttgcacaatagctcgagcctggcttcgaggcagatgaaacatacaagtaagggcagaggtgttttgatgcagtaatgcatgagaggcttcagcttgctgaaacacagaaccaatcaatttatctgctctatcattacctagaggtagtggtccaggaagttgtgtgtcagagcgaatatgagaaatttgaaaaggagcagcatgagagcaaacagctcgctgaagtcttagaaacaagttaaacagctctggttctagggtgcttttaatagtagcagtctcaatgcgactggctacatttacaacataggctaaatcacagacaatattaataggagaggaagcagtgagctgtaaaacctgaataactgccattaattctgagcattgagctgaaacaccagggatttttattgttttaatatgcttaggtccataaatagatgctcagactttggaagagccgtcagtgaaataagtctggccacctggaataggcttgtgatgagtaatcacagggaggataaaagggtaaactttataaaattgcaaaactttgtctgatggataatgattatctattattcctttgcttcagccaacatcgtagagcgatgaagctcagttcccacatcctgacaagctttgataaaatttcctaagctttttatacatctcacagatgccaatgcatgtttacagtccgtgtttgcattctcaaaagctagttaaggttagcatttctgtagccatggtaagagaaatctgacacttcactgcctatggtaatcttgcaagaaaatgtgcatagagctcctgtgaccctttcatgatatgtaagagattgtactgggaccctttcctctggaattgtggcccaggtgcgtttaacagccaaggcacactgcttacaagcagcgtctgggagtgctatttgatgttctaggtctgaataggggccactgcctaacagcatcctctgtaatgtctctgtgtccagcagcacgattctatctagcctggtctgcacacagttcttgccaatttaaataccatatcaggtatgcactagcagacaaacaagtgcaagccaaatgctttacatcaaagggtggaaggcgcatagcgccaaatagattctagcagtcctaaagtaaatgggctttgtattccattattaactacactagcttttaattccttcagcaacttaaattctagtggggtgtgttcatgaataaactgctgtggattatgtggatcaggccttacggaaataggaaaagctcaaggtcctaagggttctccagccatagcagtagagtgtaaagttctttgtattggggtctctatttctgctactgaaggaggcggttcagatgtttctgctactagagggggtgacacaggccaattttcatcctcctgctcctgtttattatttttaattggcgctgttgagagaacagaaagattctttcaaattttttgactctgaacatgactcctgctgtctagcagaataagaaatgaataatggcaggatgaactaaactccaaatataaaaaagaaaatagccaaattcttcccccatgttaccctgattcagaaacttcccgttcccagtacctctttagggcactgaccttatatcagctgtcagcagactcgtcgcagggtttctcattctcgttcttcttgtcagtgtcagtttctctgctccagcagaccttcactcacgtccctgtcctaggtgccagttgtcgctgttggttgttatgggagtgaacgaagggggatgaatgcagaaacgaagacaaagacaaaaagtatttttggaagaaggggtcagggggctccttctagtgagcaagggccctgagcttctacagcccttcgtatttattaggtagaaagagcagggagggagaggtagcagttggtcagttgcttgatttatcacaggtatacataattgctttctttgtacaacaggcttcagatgttcctatagataatcacaaggaacactgtgcttggggtgtgactgccctcagcaacccttctggcagcagacacagttgttagttttccaacatcctgctttcatgagaacagttttctatttgctcatatagcctccagtggtatactgagttggtcacgaccctcattctttcggcctgtaacaggctcatgcctgtaatgccagcacttttggaggccgaggcaagaggatagcttgagctcaggagttggagaccagcctgggcaacacggtgaaaccccatctctgcaaaaattagcctggtgtggtggggtgcgcctgtagtctcagctgcttgtggggctgaggcgggagaatagcttgagctccaggggtcgaggctgcagtgagccataatggtgctgctgcattccagcctgggtgacaaagtgagactatctcaaaaaaaaaaacggctgttagataaaaatgaagacaaacaacatttgcaaggatataaatcttaacccatttattgggggtataggctctggtgtcagatttccatctgtcctgtattttgtaaccacaaaattgtcctggctggattaattgtaaggaagtccctttaaacacatctagacttccaaagtttgtttacatactaattagttgtcatgaaaagctgcattcaacccagggtctgagatgccttttgtatatgaaaagtgcttctctttctgacactgactgaattacatacataacagattcatttatttaaaaacaatttaagaggctttttctataatgctgaacctgctgtgtggtatttatgtttaattctggtcaaattttcaaaactaataaacactgcaattcaaaaccattaattatcaagcatagaccaagtatctgaggttatgagcacatatttaagaggttagactctggcattccagacattgcaaataatacttttctcatttctaaatttcctagaaacaagtggagatttgtaaaaggaaataatactctttaaaacatttatttttgactcaggatctggctctgttgccctagctagagtgcagtggtgccatcatcacagctcatacaatagcctggaactactgggctcaaaccatcctcccacctcagcctcccaagtagctgggactgcagatgcaggccatcatgtcccgctaagttttattttatttttgtagagacagagtctatgttgctcaggctggtcctgaactcccggcatcaagtgatcctcccacctcccaataaaacatgtactgatggccaggcacttggctcacgcctgtaatcccagcactttgggaggccgaggcgggcagatcatgaggtcaagagatcaagaccattctggccaacatggtgaaaccctgtctctactaaaaatacaaaaattagccaggtgtggtggcacgcgccggtagtctcagctactccggaggccgaggcaggataattgcttgaaccccagaggcggaggttgcagtgagccgagatcgtgccactgcactccagcctggcgacagagcaagactctgtctcaaaaaaaaaaaaaaaaccaaaaaccaaaaaatcaaaaccaaaaccatgtattgatatcaaagtttttttatcctggcagggcacagtggctcacgcctgtaatcccagcactttgggaggctgaggcaggtggatcacgaggtcaggagttcaagaccagcctggccaagatggtgaagacccgtctctactaaaaatacaaaaattagccaggcgcagtggcaggcgcctgtaatcccagctactcgggaggctgaggcaggagaatcgtttgaaaccaggagggtagaggttgcagtgagccaagattgtgccactgtactccagcctgggtgacagagtgatactatgtctcaaaaaaaaaaaaaaaaaaaaaagaaaaagaaaaaagaaagaaagttgctttatctttaaaactatatatattgttttcacccctacatagtccttgcctcccagacatctcctcactaacgtcagtagacaatttggcatctgatggtttgaaatagtttctgtaatcaaatcctgaataaaatccattttaaagcctatagagagttaagaaacaagtataaaaatttgttgaagtgtttattgaacgaacataatacatttgtctgagaagagatacgcacactaaagtcccctacaagcaactaatgggaaaagatcacacaggtaactccaatttttaaaaatatgatcatgaaagataattgtagttggtgtttatggagcatcttttggaggggggggaacccccaacaactctacaaattgagatccagaacagagaaagtcatcaggtgaaatgccaagaccaaaaaacttattttatttgaattccattttctgagaagaaaactagtattgcagcagagtcatttaatgaaaacttaacagtttcactgaggattcagatatccgttgacatgtacatgacaatctttagattaaatcataaaaagttgactgtctccaagaaattgttatttcacaaatttatctattttaaatataacactgaagttattacataaacactgacgtcaaaatcatgccagagcagtgttactatttttacatgtatatgagtattcatgayctttaatgtctggacacattctaggtcacagaacagaagcaaattttcacttttgtgtgtttttggtacagtgacatgtctggttccttttgagctagatatatctgcttaaataattaacactattggatattagtccctcaaagtaaatgtctattttacctggtattctaggaagagagagagaaagaaaataaccaaagaaatgtgactgcaatctaatttccaagagagaaactctacttctgaatactggccccatactgcatattttatgaatatttttctcacaacttttcttaaaacttaagttctctcttaggaatgtctttagttaggtcttacaaagaaactgtttaatacacaatgttaacatctactaggcaaaagatgcttgcttctcttcccacaaaagccaaacagaaaacacaaagtgttactaacgttttctatttattcattaataaaaagtgcatagtacaagccctttatcccaatccaagtactcagaaaaagattaacaacagaccctggatggcacagacataatttgtttggcgtgatttaaacatataaaatcagtaattaacatttagcatatcacacgaccacttttgcttttaacaaastaatcttcacacatggtaacaaatacctatgatttttcatttagaaatattataagaagactaaacttactattgcaacaacaaaaatttaacccattaaactagaaactctcttcatttttccttcttcaaattactgttttgtgtcttaaactgagttggtcaaatttgagcacataattcatgtagagtgacagactttcatttagagtgatagacttccaaggttcctttgaaaatttaagatactggtaattccataaacactcccacaccacataccacaaaaacactaaaagtagccatagaatagctgtattcaataattattttggaaaatccacattatgaaatatgacttgctgaccatggaacagtgcttggatagataacatgaaaaaaatgaaaaacatctttttttttttttttttgagacggagtttcactcttgttgcccaggctggagtgcaatggcgtgatcttggctcactgcaacctccacctcccaggttcaagtgattctcctgcctcagcttcccaagtagctgggattacaggcatgtgccaccacaccaggctacttttgtatttttagtggagatggagtttttccatgttggccaggctggtctcgaactcctgacctcaggtgatccagctccctcggtctcccaaagtgttgggattacaggcatgagccaccgtgcccagcctgaaaaaaatcttttactagaaacagttccaatgttaacttttcccacatggaaagcaaaacaaaacaaaacaaaacaaacaaacaaatgcaacaaaacaacctcccactattattgtgcataaaaacacattaaatgactctaaaacaaaataaacttttttttttttggtagagacagggtcttgctatgttgcccaggctagtctcaaactcctgggctcaagcagttcttgcctcagcctcccaaattgctgggattacaggcatgagccaccatgactggcctaaaacaaaataaattcttaatggcatttgtggaatgtgtttaagagccaaaactgtgaaaatgtaagctttatctttcttttttcctagattatttaaagaggattgtagccacamttcagatgaatgtttacaagccaaataatgatttaagagtgtgctcaataaaaaggccataggtttaagaattaaatggaataatataaattactaggtcaacaagaatatttcatgtatagtacactgtctaaggaatgcagagaaattttacaagaaacccaagactaaatacttcattaagaacactggttactaagtaaatagatggctcatgtaggaaaaagctaatatatgtagatgtaatgtcaactaagtgcatgtgacagaaatgaagaactaggaataagaatccagattttctggccaggcacggtggctcacatctgtaatcctagcactttgggaggccatagtgggtggatcacctgaggtcaggagtttgagaccagcctggcctacatggcgaaaccccatctctactaaagatacaaaaattagctgggcgtggtggtgggcacttataatcccagctactcaggaggctgaggaaggagaatcgctcgaacctgggggtggatgttgcagtgagccaaggtcgcgccacttcactccagcttgggcgaaagagcaaaactccatctcaaaacaacaaccaaaaagaatccagatttttaggtgtctaatactagacattctgtatccaagtttcagccatttcatccaataaagccttctaaagccttttttttttgagacagggtctcactctgtcactcaagctggagtgcagtggcgtgatcttggcttactgcaacctgtctcccaggctcaagcgattctcctgcctcagcctcccgagtagctaagactacaggccgtgtcaccaaacccggctaattttttgtaggcacggggtttcaccgtcttggccaggctggtctcaacctcctgacctcaagtgatccacctgccccagcctcccaaagtgctgggattacaggcatgagtcactgcgcccagctcccaaagccaattttcaattatttgtgagccatagattcagtgactacatcaatatctcttgccagggattggcctaacagctcagagaacagattgttaggatatatgggcaagccttctaagttcaagaggcaagagcagaaaatggaatgctatagggatttagctccatcttaagccattctggccctttctgctctactttaccagctatagagttaggaaggcttccagtaggccacagcaagaggaaaaacctttattctgtggggctcatttatccaggatttaacttacctgtgtcatgttaccgatctattaacacaagtaatttagagttggttatattatttcaagaaattgagcacaaagccaggatgtacaaggaggaattcaaacaatcaatattggattatataatgaaaagatgcccttacaatgtttatgatctagaatgtaatcataataaaggggggaaaataccttatgagtatcacaattgtatcagagactattaaacagtacaatgatacagagaatttattcaattcatacaagtaatttaccagatctaaacagtgaatagactgacctaaggggaaaaaaatccttacattgatagcaaaatatcttctagcccccataaataatctgcaatcatttgctaggaaaaaaacttcataaccatatgggtcatgcagacatttttatttatttatttattttgagacagagtctcgctctgtcgccctgattggagtgcagtggcacgatctcagcttactgcaacctccgtctcccaggttcaagcaatttcctgcctcagcttccccagtagctgggattataggcacacaccaccatgcctggctaatttttgcatttttagtagagataaggtttcaccatgttggtcaggctggtctcgaactcctgacctcaggtgattcgcctgcctcggcctcccaaagtgctgggattacaggcgtgagccaccgtgcccagcccatgcagacatttttaagtgctattggtattcactttatttcaaactgagcaaaacaatacaaccttttacttttttatacattttaaaatttctctcatattaacattccttcctaccccaatccatcccatcaccaaacaggaatgagataaggagtgaaaaaaagatgtatgtttctcattttccttcttttcccttgaagtaaaccagtaatttattaaaatattttataggtcagaggataacaaaagactcaatgtagtaaataagtaaataggcattcaaatatcagtaacctaacaggccctaatacagctttaagattttcttctttttttttttttgagagggagtctcgctctattgcttaggctggaatgcagtggtgcgatcttggttcactgcaacctccacctcccgggttcaagcaattctcctgctttggcctcctgagtagctgggattacaggcacatgcaccaaccctggctaatttttctgtatttttagtagagacagggtttcaccatgttggccaggctggtctcgaactcctgacctcaagtgatccacccacctcagcctcccaaagtgctgggattacaggtgtgagccactgcactggcctaagattttcattttaacagggaactgttagaayagaaaagaagcttcccaagaggcactcattttaaaaataaattatagcttaaattattactatgtggattatatcagcaaaggcagaaagaattaatgttttcctcctttcatgaaccttgtaaggctagtgttgagtggcttacaaatgtcatataatggactgtaaatcatctgccatattgatcaatcatgtttatttaaggttttcttaacattagagatttttaatgggagtataaaattagtaaacaaccatttcattttttctctcttcctattctagccacataagccagtttaatccatgacacagatttcagctgtaatttgcaaaacaatccaagagctaccacagtccccaaaactacagaaaactgccatccacaaataaactaccaaggtaaatgtaaatacagcgtggttctaattttctttcacacaatcccagacaaccccaaataactttataaataccttatgaaaaaaagcaatttaaaaacctatcaaatctatttaaaatatataaatgcagacctctcaaatttccttcaatcaggccagaaattatcacaaaaattataatcacagttacaaacagaatgagtggaatgtttgtaagtttaggacaaccaaaaaagccccatgtaactttttaaaaatataatcattcactcaaatatactgtaaataggaatggcagtaacacaggaagcaaaaataaacttgcaagtgaaatttctagaagctcatgaaaacaataccatcccatattgcagatacaaaaggaaaaacagttctaatggggttaagagtactctggtcatcttcgttcgtttggtcgtgcaaggtgttaactattttcacttcccatatcacaaagttagtccacaggaggagctggtggatcttgtccctggcattagaaagaaataaattatttaattgactttttaaaaattcaaaaaaatttaaaatttattactttttwaaaaattgacttattaaatcccagtgcaaccaatctaacacatagagaaacaactgagcagcaatgcccccaaccatcccatcccaaatatatgcttatttggacttttcatatgtttttacatgagggaacactagattaaataacactgtgattttccaccatttgtctcatttttccctgtagaatggaagagagagggaatttgtacaacagtgatgttatcactcctgccaaccccaggagtgatcttcaaacctatgaaaatatcttcatccctcttgctaaagtcgattggctaagcaaagtactgtatatttaaaatgaagctagggacttttgtttctcaatactgaatgtctacgaggatgcatgtggctgcagttgcttctggtagtcatcctataaccctaaggggagcccatcttggaatgaagttgttagtatgaggaaagaaactaggtctttgatgacactgttgaaactttcttaacactgaccctacctctgaatttttttgacgtgtaaatcaatgaagccacttgttttaaaccacttggaattgacttttgttaacttgcaatagaaagcaagtgaactgtaaaggaaagatcagagtttttaagattctcaagattttatttatttaccctgaaatgatacatgacgcccgagttgggggtgatcaatatttctccttggaattagtctcaacacattttcttacttattcctaagatagtggaactactattcctagaaacactggcctacaatgaattaaggtccaggagagggtaatcttgcatttctgtcattttaatagtttttttttttttttccttgagacagagtctcactctgtcgcccaggctggagtacagtggtgagatctcggctcactgcaaactccgcctcccgggttcaagtgattcgcctgcctcagcctcccgagtagctgggattacaagcatgtgccaccacacctggttaatttttttgtatttttagtagagacagggtttcaccatgttggtcaagctggtctccaactcctgacctcaaatgatccacctgcctcagcctcccaaagtgctgggattacaggtgtaagccaccgtgcccagcccactgtaatgatttctaagtcaggttattaagagttctatttctttagctccaaacattgaggaatttactctttgatatgaaagtaacaaagctatacaaagaaagtaagaaagaaggctaaggaataaacactttatcaagacaatatgcaagctgttttataaatactctcttctccaagaaaaaataaaaataaatgtaaggctttttatatagtgctaataatgccggtttttttttttttttgagatggagtctcgctcttgttgcccaggctggagtgcaatggcgccatctcagctcactgcaacctccaccttctgggttcaagcaattctcctgcctcagcctcacaagtagctgggattacaggcacgcgccaccatgcctggctaatttttgtacttttaatagagacggagtttggttatgttggctaggctggtcttgaactcctgacctcaggtgatccgcccgcctcagcctcccaaagtgctgggattacaggtgagagccaccgcgcctggtctataatgccttctttcttaaagttagcatgctacgtatcttttttgtgtatgtttttcgttttgattttttttctttctatgctacatatctaaatgttctattccttaaaaaacaaagcaaaacattgaccaattaacactgcacatttgctttctcttatataaaaaatgagtctaactgaacttctgatatcaacaccacaacactggagaaaagaaacaattattttaggaattccacaaggtaaaggttggaaaagagaattagtgggataatttggtatacaagtgaatctggccgggcatggtgctcatgcctgtaataccagcactttgggaggcaaatgcaggcacagcacctgaggttaggagttcaagaccagcctggccaacgtggcgaaaccctgtatctactaaaaatacaaaaattagccaggtgtggtgacacacatctgtaatgccagtacttcgggaggccgaggcaggcacatcacttgaggtcaggaatttgagaccagcctggccaacatggtgaaaccccatctctactaaaaatccaaaaattagccagatgtggtggcgtgcacctgtaatcccagctactcggtaggtggaggcaggagaatcacttgaacctgggaggcagaggctgcagtgagctgagattgtaccaatgcacttcagcctggaggacagagtgagactccatctcaaaaaaaaaaacaacaaaaacaagcaaatctatcatggaaattttcctttttttttttttttttttttgatgctctattaccttatagttttttaattataaattttaacatttatttaaattgacaaataaaaattgtatatatttgtcatatacaacatgttttgaaatatgtatacatttgtagaatggctaaatagaggtaactggcaaattcatggaattttttttttttttttttttttgagacgaagtttcactctcaccgcctagcctggagtgcaatggcacgatcttggctcactgcaacctccatctcctgggttcaagcaattctcttgcctcagcctcccgagtagctgggattacaggtgcccaccaccaggcccagctaatttttgtatttttactagagacagggtttcaccatgttggccaggctggtctcgaactcctgacctcaggtgatccgcccatcttggcctcccaaagtgctggaattacaggcatgagccaccgcgcccggcctcatggaaatatttttaaagagataatattcaaattcagtgttaaaaaaaaaacataaatactggttctgaaaaggattaaaaggaatcctttaacagaggttctttttttttttgagacatagtctcactctgtagcccaagctggagtgtggtggtgtgatcttggctcactgcaacctctgcctcctgagctcaaacgattctcatgcctcggcctcctgagtagctgagactacaggcgcatgccaccatgtctggctaattttttgtattttagtagagacagggtttcaccatgttgcccagggtggtcttgaacaccggagctcaggtgatccgccccccttggcctcccaaagtgctgggattgcaggcgtgagccacagtgcctggccaacagaggttctcttaaagatagtcctgaaaactccctattgggtcactttatcatagttttaatttagaaggttctaaaaatggttgtaatcatgactatcaagatttatcaacatgaatgattccgacctctccttttgccagctcagctgatttactgtggtacagaaatggaaaatgggtttgagagaaataggatgggaaaatgaggaaaataaaataagacaggctcagtgtctctactgaatagctaggacagaagggggtcaaacatttcaactaaagctactaagagtttaggggctggaagcatgagaggcaagggatcaactgtgaggtggacagaactgggtagtggaggattgagacttgagcaatattgctgtggattatgaaatggattatttttgatgcttctcatgtgagtaaagattagaattcaagcctgggcaacctggcaaaaccccatctctacaaaaaaatacaaaaaactagccaggtgtgctagtgcatgcctgtggtcccaactacttgggaggctgaggtgggagcctaggaggtggaggcttcagtgagctaagatcgcaccagtgcagtccagcctgggcggcacagcaagaccctgtctgaaaaaaaaaaaaaaggattggaattcattttcaaattaattttgggcttctggtctgtgcttctttctgcatttaactccayaaagattaagctgtcaattaaatcttggaattgcaatatttaatagaactacataggtagaatactctatgagttaaatataatttaactaatttaggtgttttagtcaaaaccaagtccttccctgccccaggccacatacattcccttacccaaaaagcatttaaaatctgcaacacttacattatgaggactggttggctttccaggtaggctggatcctcttagattaggaggtctcagtaagaacaagatcaatgcaataaccatccaggctaccaagatcattgtaacactgatgccattatcaccagagggtcccggtactaaagacaaacaaaaaatgtagcatgctcacaatattgttaaaagtaaaaacaaattctaatgtttaaatgtcagtttcaattactgtattaatataaaaattgtattgataaattacaaaagtacatattatatcttcaatttccctttcccccagtgagaacatctaaaaagtaaatgatgttaaatagtcataaaccaaaacttagtaagtttttgttgtttttgttttttgagacagggtcttgctctatcaaacaggctggagtgcggtggcacaaccatagctcactacagccttaaccttctatgttcatgggatcctctcacctcagcctcctgagtagctgggactacaggtgtgtgccaccatgccccatgcacctaatttttaatttttatttttagtagagacactatgttgcctgggctggtctctaacaatttttttttttttttttgagatggagtctcactctgttgccaaggccagagtgcagtgggacaatgttggctcactgcaacctctgcctcccaagttcaagcaattctgcctcagcctcctgagtagctgggattacaggcatgcgccaccatgcccagctaatttttgtatttctagttgagacggggtttcaccatgttggccaggctggtctcgaactcctgacctcaggtgatccacctgccttggcctcccaaagggctgggattacaggtgtgagccactgtgtcctgccccacacccctaattttttttaaaatttttagtagtgacgacgtctcactatgttgcctggactagtctctaacacattttttaatagtataataattcttaatattttggggtaacagaatcatttgagaatttgataaaaattaagaactctttccattttaagaattcatggggtcttcaactgaggtcttgcaaggcaagccggccatgccatgtttgtagattaatgaggctaggggccctaacttccctaagatctacttttctagctaccttctgccctgtgtctggcacctacatccttcatgattgttctttttgatccattctggattaaaaataaatatgaaaagcactcatgtataccaaattccacaattttgtatataattgtggaaggtttaagaacccacaaagccacgaatccatatgaatccaagttaagaccacagaaaaaacactctcctttggggggaaaaatctgcttcttaattacagaggcatcatgaaaaagaaaggggacatctgggctgcgtaatatatacattaaaagaccccttgaattacagtctcaaccaaagagattaatttgaccttctttttcacacaaaggagttgaattcagatctagatattttaaaattttatcaatttttctcttctatcaattttttctatttatcaagagaaaaatgctagacagggatgtatgtgcgtatacaggcatcagtttttcctggttccttgacatagccacgtcttatttaatttgaaataacaagtgcctagcacagtgcctgacccatgatatgaggttaacaaatttctaataaatgaaacgtagattttttattgaagtatattagagaactcaattttcagaaataaaaatggccaggtgcactggctcacgcctgtaatcccagcactttggaaggccaagatgggtggattgcttgagctcaggaattcgagaccagcctgggcgatatggtgaaaccccatctctgagggagaagaaaaggaaaaatccattaggtaaacagttaaggctgggcccctagaagtgcttgcctgaaaaatcacagctgctgcagctgcacagataagcctggacagataagcagccagtaaagcaaacaagcctttttgttctttgtacaatcagtgagctcccaggaaaaagtttcctccccttttcaggcatatacacagtgggctccgtgggaacttgcatagggcggagtgggcttacctaaaaaaacccagttatacaaagaagagaagctgtgctttgtgcttagaaacaatcccacagctggaaaaagggagttgcacagacagcttttcgaaaaagaaaaattactcaatcagttacaaggaggagagcagtttcttttttttgtttgtttttttgagacagagtcttgccctgtcgtccaagctggaatacaatggcatgtcagctcactgcaacctccacctcccgggttcaagcaattctcctgtctcagtctcccctgtagctgggattacaggcacatgccaccatgcctggctaactttttgtatctttagtagagatggggtttcaccatgttggccaggctggtctcaaactcctgacctcgtgatctgcctgcttcggcctcccaaagtgctgggattacaggcatgagccaccgcgcctggctgcagtttcttataaaagcattttgcattcagctgtaaccaagctatccacttggactcccctctctgcagagagctttctccttttgcttattacattttcgctccaacttcacccttgtgaccatgctccttaatcattttagaggcgagacaaagaactcagggtgatacctcacaagagaaaccaatatatgaaggtgcattggtgagactgcaacatctctacgaaaattagctgggtggggtggcgtgagcctgtagtcccagctacccaggaggctgaggcacgagaattgcttgaacccagaaggcagaggttgtagtgagctcagattacaccactgcactccagcctgggcgagtgagcaagaccctgtcaaaaaaaaaaaagaaaagaaaggaaaagaaaaagaaataaaaattatagattagatttctagaggaaaatgtagtatccctaggtgattactaaaacagcttgtcaagaccacagctgtttggttttgatctccttgcctcaggaaaaagtaaaagaaatccagataagatgttgaaactaatctgatacactgcattgggtcagtgggtccagggctcaattccacaaaagggaaggaattggtggcactgctgaggccaaaaggctagtgataaaagcggacaaagtcaagttaagagttgcgctggccctgctgcaacgaagtcttatggcaaacaaattagtacaaaatatatattaaaaagagctgagctggcctaagagcaggatggataggaatgtagcctctgttccaaacccagtcacttccctagaaacagctaaacaggccgggcgtggcagctcatgtctgtaatcccagcactttgagaggccaaggcgggcagatcccttgaactcaggagtttgagaccagcctgggcaacatgacaaaaacccgtatctacaaaaaattaaaaaaaaaaaatagccgggtgtggtggtgtgtgcctgcggtcccagctactcaggaggctgaggtgggaggatggcttgagcccaggaggtggaggttgcagtgagctgtaattgcaccactgcactccagcctgggcaacagagccagacactgtctcaaaacataaacaaaaacaaaaacaaacactttcttccattgtcttctgtgtcactaccattgtctaacagttggacactccttcatcaataattctctttttctttatatcaacagttcttttcttttcttttttttttttttttgagatggaatctcgttctgtcaccaggctggagtgcagtggcgcgatctccgctcactacaacctctgcctcctgggttttatttgtagtagagctgggatttcaccatgttggccaggctgttctcaaactcctgacctcaggtgatccatctgccttggcctccgaaaatgctgggattacaggcatgagccaccgcaatcagccaacatcaatagttcttaaactatggtatatatcagagtcaactgaaaacttcttaaaaatgcagaaatccaggaagcacgaggtcaagagatcacccgtgaagcagaggttgcagtgagctgagatcgcgccactgcactccagcctggcgacagagcaagaccccgtctcaaacaaaacaaaacaaaatgcagaaatcccaccttccacttaacatattcagtactttagtattccaaacaaaaatcatgagcatctcccccgccctacccccttccaccccaactaccaaactggatctctgttcatccagttgcccagggcagaacctaagaaaacaccttttttctttctcaacagccctgtatttaatccatcatgaagtttcttgcaatttttcctcctaaatatcacttgtatctgcccacttttagctccatgtccccacctgctcaagctaccataacctcttatctggtctattgcagtggcctcttaagggatctccctatatctactcctgcttcccctgtgctctatattgtttccagagtgatttttttttctttttttttaaaagcaaatacatgttgagtttccctatgtgaaatgcttgggaatacaagtgtttcagaattcggattttttcagatttggggatatatgcaatatacttattggttcagcagccctaatcctaaaatccaaaatctgaaatgttccaatgagcatttcctttgagcatcatgtcagcactgaataagtttcagattttggagcacttcaaattttcagattagggatattcaacctatactattatttttattttaaataatagttaaggccagacctgatggggctcatgcctgtaatcccagcactttgggaggccaaggcaggaagatcccttgagctcaggagctcaagaccagcctgggcaaaatggctggtgctgaacttctggcctcatgcaatcctcctgccttggtttcccaaagagctgagattacaggtgtcagtcrgtagtcatgcccagccatgactttttaatattctttgcaagtaaaaaattctgaagcttaagagagttaaacctcagattccaagtttactaattcttatttctagacaaaggatccctgattcttttttagaatctcacgccgggcacggtggctcacacctgtagtcccagcactttgggaaggtaaggcaggtgcatcacctgaggtctggaattcaacaccagcctggccaacatggtgttggccatctctacyaaagcccatctctactaaaaatacaaaaattagccaagcatggtggtgcacacctgtaatcccagctacttggggggttgtagyggaaaaattgctcgaacccggaagacaggtcgcagtgagccgagatcgtgccactgcactccagcctgggcaacatagtgagactccatctcaacaacaacaacaaccaaatagtaatgtccacttcttttttagaatctcacaatagtaatatgactcgtagttcccttaactatctcctagcttggttcctattgcagcttttccttcttgcttactgctgccagaaaagtctgcttaaaactgttcttggctggatacagtggctcatggctgtgatctcagcactctaggaggccgaggcaggaggatccctggagcccaggcgtttgagaccagcctgggcaacatagtgagacccctgtctctacaaaaaaaattaaaaaattagctgagtgtggtggtgcaggcctgtaatcccagctactcgggaggctgaggtgggaggatcacttaagcccaggtggtcaaggctgcagtgaattgtaatcacacaactgcactccagccagggtggcagagacagaccctgtctcaacccccaaacaaacaaacaaacaaacaaacaaaaaatcccctgtgctcttaacacatctctgctgatcaatgtggtaactcagtttccactgcctactgtttcaactctggggtttttctgtttttattgagtcagtgtctcactctgtctcccaggctggagtgcagtggcacaatcacagctcactgcaacctttgcctcccaggctcaagtgatcctctcaccttagcctcctgagtagctgaaattgtaggcgcatgctgccatgcccaattaatttttttatatttttaaaactttttttattttttagagacagggtctcactatgttgcccaggctgatctcgaattcctgagctcaagtgatctgcccaccttggcctcccaaagttctggaattacaggcatgagcgaccccacctgaccctaatttttgtatttttagtagagacggtgttttgccatgttgccaaggcttgtccctaactcctgagctcaagcaacccacccacctaagcctcgcaaagtgctaggattataagcatgagctactgtgcccagcaactctaagttctttagctcagcctttcctcatatgattgggccttactcatctaatcttacctcttaccacttctcagaaaatgcatcctctgctctagtcacccccatacctcttcttttttttattttttttgagacggagtttcactcttgctggccaggctggagtgcaatggcacaatctctgttcactgcaacctctgcctcccgggttcaagtgattctcatgcctcagcctcccaagtagctgggattacaggtgctcgcctccacacccggctaattttttgtatttttagtagagactgggtttcaccatgttgaccaggctggtctcgaactcctgatctcaggtgatccactcacctcagcctcccaaagtgatgggattacaggcatgagccaccgcccccggcccctcttctttctctagccaaggattccctggcctggctatgcatcagaatagcctgtgacagtatcaacaccacagattctaaggcactgcctaagaccatctgattcaggagcagcttcggggtgggatcaggagccaacaatattttttaaaagctttccaaatgaatctgatgcaacagttgaatgcgaacttgtctggcagcatttgccaactatgcaaattcagtcttcctggggtactcgttatttccctgtctggcatgttcttacaactaactccatttattcacctataacctacatccctcttccataaaaatctccatttcctccacccactttttcctctgccttctctggactagtatagcatttctagtttgaaggaatggtttcccgtctctcctaattaactttttaagaactgagaccatctcatagctgtttgactgtaccacctcttaggtatataatccctgagcctcaagtttctttttcttttttctttctcctcttcctcctcctcctcttcttcttccccttctcttcctcttcttcttcttcttctattattattattttgagacggagtcttgctctgtcaccaggctggagtgcagtggcaccatcttggctcactgcaacctccgcctcccagtttcaagcaattcccctgcctcacaaataaaatgccaaatggaatattcacaatgaagctgttaacttagctggataccaagaggatgaaaaggtagagacagaggctctaagagctggcccatcctcagaagattatttgtataaacttatataggtttccgctggggaaagcaaaaacagaacagcagtgaaagtggacaatacaccggtatgctctaaccctgtagtttttggtcctatacagtaattacattatcctaagcacagctaccagttttcaagctgagtcaagggtgatctctatcattccctaatgtagatctgttattctcctacaggctgagtattcctactctaaaaatctagaatcctccaaaatccaaaactttttgagagctgacatcatgctcaaaagaaatgcttatcggaacatttcacattttcaggttagggatggtcaactggtaaatgaatctgaaaaaatctgaaactgaatacacttctggctccaagcatttcaaataagggatattcaacctatactttcatattgtgttctgcgagggtgccccatagtgttatttcagattagcgttttttagataaagataacctgaatggaaagcatcctctcttttgtttaaaggattctattaaaaatgaaatacatgacttttaagcagggggctaagggaagcctcactaagaaggcactctggagtgaaaatgtaaagaaagtgaggctgtcagttgtgagattatccgaaagaagcacatttcaggcacaaggaacagcgagaactcctgattcaggagcctgtgggatgttcatggaggccaatgtggctgaagtgaagtgacctgggattggtggtatagtgaggtgggatataagaaaaagattaagctgggtgtggtggctcacgcctgtaatcccagcactttgggaagctgaggtgggagaatcacttgaggccaggagttcaagaccagccttggcaacataatgaggtcctatctctacaaaataaaaaacaaacaaaatcagccaagtgtggtggcacacacctgtggtcccagctaatcaggaggctgaggtgggaggattgcttgagcccaaggggttgaggttgcagcaagccatgattgcaccactttactccagcctgggcaacagagtaagactttgtctccagaaaagaaaagaaaaagattaaatcaaaagagtaacaggattcagatcatgttggccttataggtcataataagcttctattacatattaaatagaaaaccactgaagagggcttttcttttttttggacagggtctcactctgtcacccaggttggagtgcagtggctcaattacagtcactgcagcctcaacctcccaggctcaagtgatctcctaactcagcatccagagtagctggggcataggcacaggccaccacgcctagctaagttttatattttttgtagagacaggatttcaacatgttgcctatgctggtcttgaactcctgagcccaagtgatctgcctgctttggcctcctaaaatgggattacaagtgtgatccactgtgcccagacaccactgaagagttctgagcaaaatgcagatgatatctgactctcattttgacagaaccactccatctgttgtgttttgaaaaacgagaaacagaaacacagtgatatggtttggctgtgtcccatcccaaatttcatcttgaattgtaactcccacaattcccatatgtcatgggaggaacctggtgggaggtgattgaattatggggggcgggcctttcctgcgctcttctcatgatagtaaacaagtctcacgagatctcatggttttaaaaaggggagtttccctgcacaagctctcttctcttgtctgccaccatgtaagacatgcctttcaccttccgccatgattgtgaggcctccccagacatgtggaattgtaagtccaataaacccttttctttcgtaaattgccctgtcttgggtatgtcttaaattagcagtgtgaagactgactaatacagacagttaagaacctgttgcaataatctattaacatacgagatgatgatggcctagaacagggaggaggcagtgggatagtgagaagtggtagaattttggatgtatcttcaagatagtgcttgctgatagatgactggacagtgtgagaaaaagggaagccaaggatgagtctcagaaggatagaactgccattaactgttataggaaggatctcaagagaagcagaaattctgaagatgttgaatttgaggtgccttgttagacatcccagtggaaatgcccaaaagacagtcatcagcatacaagtaatgagtcatgagaccagatgagatcaccaagtgagtgaatgtctagaaaaggaaataatccaggggctaagtcctggagcattccaaggataaaagttaagaggtctggaggacagacagacgcaccgagaaagaagacagcagatagccgcaatgcagccaggcacaatggctcatgcctgtaatcccagcactttgggaggctgaggtgggtggatcacctgaggtcaggagttcaagaccagcctcggcaacatacagaaaccctgtctctactaaaaatacaaaaattaggccaggcgtggtggctcacgcctataatcccagcactttgggaggccatggcaggcggatcatgaggtcaagagatcgagaccattttggccaacatggtgaaaccctgtctctactaaaagtacaaaaattagccaggcgtggtggcgtgcacctgtagtcccagctactcgggaggctgaggcaggagaatcgcttgaacctgcgaggtggaggttgcagtgagctgagattgtaccactacactccagcctggtgacagtgtgagactccatctcaaaaaaaacaaaaaacaaaaattagctggggatgctggtacacgcttgtaatcccagctacttgggaggctgaggcaggagaactgcttgagtccaggaggtggaggttgtagtaagccgagattgcgccattgcactccagcctgggcgacagagcaaaactccatctcaaaaaaagaaaaaaaaaaaaaaaaaaaaaaaaaaggaagccgcaatgtgacaataggaaaaaaatgtgacatgggaaatatggagaagatttagttattaaaggctgaaactagataatttctcagattacaactttatcaggaagaagcagaaggctaagaattgtatgctaagtactcaaaatgggccaggtgtggcagctcatgcctgtaatccctgcactttgggaggccgaggcaggtggactgcttgagctcaggagttcgagaccagcctgggcaacatgcaaaaccctgtctctacaaaaaatacaaaaattaggccgggcatggtggctcacacctgtaatcccagcactttgggaggttgaggtgggcggatcacgaggtcaggagttcgagaccagcctggccaacatggcgaaaccccatctctactaaaaatacaaaaattagccgggtgtggtggcaggcgcctataatcccagctactcaggaggctgaggcaggagaatcgcttgaacctgggaggtggaggttgcagtgagctgagatcatgccattgcactccagcttgggcaacaagagcaagactccgtctcaaaagaaaggaaaaaaaaaattagctgggcatggttgtatgctcctgtagtcccagctactcaggaggctgaagtgggaggattactgagcctggaaggtcaagattcagtgagccctgtttgctccactgcactcaagcctgggtgacaaagtgagaccctgtctcaaaacaaaacaaaaaacaaacaaaaacaccccaaaccatattcagtgccaaatgttaaagcccaaatagattgtataaataagaacatacaggccgggcgcggtagctcacgcctgtaatcccagcactttgggaggcggaggtgggtggatcacttgaggtcaggagtttgagatcagcctggccaacatggcgaaaccctatctctactaaaaatacaaaaaattagccaggtgtggtagtgcattcctgtaatcctggctacttgggaggctgaggcaggagaatagcttgagcctgggaggcggaagttgcagtgagccaagattgtgccactacactccagcctgggcaacagagcaagactccttctcaaaaaaaaaaaaaagaacatatacatgtatatatttctccaccatttactctttggtctgtgttttaacaacattgactctacctagcagctgcttctatgactaaatgaataaatgatatttctgatatcacaatgattaaacactgttctaaaacaatggaataacacctatgaaaaggggaagagtaaaaaaataagacaatggaatatatacaaaatacaactacagaaataaaaggcagaaatgaacgaaagcaaccaatttaaaaaagtcagaagagaataaaacgtatttcttcaaggcttatttcaattcttaagaagcctcaaattcccacgatcctaaaacatatatttaattttaaaaaataactttttccaattgaatagtagcacaatactatccaattgaatagtagtatctaaatataaagatagctacaaaatatgttttattattttaagaaaaaagtataagctcactggagaaaatttagaatataagaaaaataattctatccctcacagtaaactactgtttaaccatttaaaagcctagctctcagaaaggatttttaccaactgctaaaagaactggggggaaagaaaaacttgccaatatgcctaaatgaatgttcaaagtttcacctttctttttagagttaggaagtgacattttacccacaggaatgactatatttggttataggcggggctggttaaagagtcacaaaagccgcacatgtaataaacacgtgttttcccatggggaggttcaataaaattattttcaactaggaaaacaggttttagctttacctgttgaggcaaatatttgagctgtacattgtagattaatgaatgctactggagaagtaaagaagtctggagggagggaaccaccacccattgtcctaacaatgcacatttctattgctttcttgtcttgaaggcatatatatcacccaaatggactaggttcccacaaaatttctactttaggctaggcactgcactagctcccacttctctaagctgttatatctgtggaatttgatgggacacccagtacacaaagtaataaaaatcataatgtataacaagtctctttacaattaccttactgcgtcttgtttcagtttcatatatataataaacaggcagctctgcttcagagatgttacgtatcagcaactaacctactaataaatgcaatttggcaatatgtaaatagccttaaaatgtgtgaagaaaaccagaacgtatcactccaaaatatgcctttttgacatagaaattattttggagaagccaggcacggtggctcatgcctgtaatcccagctacttgggaggttgaggcactagaattgcctgaacctgggtggcggaggttgcagtgagttgagactgagccactgcactccagcctgggcgacaaagcgagactctgtctcaaaaaaaaaagaaaaaaagaaaaaaagaaattatttttgagctgtaggcaattaggaagtagcaaacagaagaaaagctccctctattcccctcttttctgcctaaaggtaggatacaaattctcctttatacacaaccctacagacttaatagtccagagacagcaccagaggagtctataaacaaaccttactccattagtttcctcccaaatatttactttcccagtttcctatccttggaagcctaaaatctctttcctatgttctgccctttttccacaaatgtattgttctttgttgaagatgctacataagccagagttctgagccactgctttgagttactttgcattgagctttctcccatgtgatgccacacacattaataaatttgctttttccttgttcatctatcttttttttgtttttttttctttgttttagagagtctcgccctgtcacccaggctggagtgcagtggtgtgatcgcagcttactgcaacctctgcctcctgggttcaagtgattctggtgcctcagcctccagagcagctgggactacaggcacgtgccaccacgcccagctaatttttgtatttttagtagagacagggtttccatgttggccaggctggtctcaaactcctggcctcaactgatctggccacctcagcctcccaaaattctaggattacaggcgtgagccaccgtgcccggcaatctatcctttgttacagggtgtctcagcaaagaactctgaggttgaagaaaaaattatttgtcctccccaacatatgcacacaaagaatgtttattcaagtgttgtttataatagcaaaaaatatatcagcaacctaaggttctagtaaaaggaaatcatttaaacgctggtgcttccccacaatgaattattatttaattaataatttttttttgagatgggatctcactttgtcatccaggctggagtgcagtggcatgaacatagctcactgcagcctcaaactcctgggctcaagtgatccttctgcctcagcctcccaagtagccgggactccaggagcatgacaccatgcctggctcaataaatagtaagacaaatatatgttgatattttataagtagtgaaaaataacatatacaatgtgatcccatttctgtaagtttatatgaaatctaattatgccaggcttcaccatcttgtgaatgtcatactttccttcttgcagtcttctgatacaagactggattggtttaaatactattttactagttccccttaaagcatctctcaaaatatttctgagtatcctgaaaaaagatgtgtcacataatggtcactaagtctgtcacctacatataccatgcaatattcatcttcctactgattctcactttaccatcactactgcccataaagccatgtggagaaacttctccactgccaaattctctgatgcgcatgttaatgtcagagccaaaggaatgaactccacaggcacccaaagtttccacacatggaaaagaatggcctccccaccaagaagttctcaagtggctgggcatggtgactcacgcctgtaatccaagcactttgagaggccgaggcagaaggatcacttgatcccaggagtttaagacccatgtgggcaacatgggaagaccgtgactctacaaaaaattctaaaaaattagccatgcatggtggtgcatccctgtagtcccacctactagggaggctgaggtgggaggatcacttgagcctgggaggtcaaggctgcagtgagccatgatcgcacaattgcgctcagtgtgggcgacaaagcaagacactgtttcttaaaaaaaaatttttttaaattaaagaaaaaaaaagaattctcaagcctgccaacagatgcaaatagatgttagggagagagtgaatggtttgcgcaagcagctttgatgtcccagttacacctgcccacagtgccctgttacagacttatttgccaagaaaaaaagactaggatatacccgaatttgtcaacagtggttatctttaactattctggaagttcttctattttttttttttgagacagggtctcactccagtcacccaggttggagtgcagtggtgcgatcacagctcactgcagcctcaacctccccaggctcaggtgatcctcccacctcagcctcaggagtagctggggctgcaggcatgcaccaccatgccccactaatttttgtattttttgtagagacagggtttccccgtgttgcccagggtaatctcaaactcctggactcaaacgatccaccggcctcagcttcccaaagtgcaaggattccaggtgtgagccactgcacccagcctttttttttccttatacttattttataatgttctgcaataagcagggtttttgaggcatgaaaaaaattttaagttaaaaaatgaaatagtcaagtagcaaatacattactgagaaccattttcttattaaagagcaaactatgagaataatttcttttgtgcgtatgtgtcgcttttttttttttttttttttttttggtaaccactagaataggcaatgtaagaataaattctgacaaatattcacaggcatctggcctctaattctgcccccaatgccatccttcctcctgtctcagtggtacttacattcctgaagacactctgtgtctgtgcagtaggactgggactgccgtaactacaatgaataagaaagggaagttagtgattagacttaaacaaaagtggaccataattattagaaagatcatgttttnnnnnnnnnnnnnnnnnnnnnnnnnnnnnnnnnnnnnnnnntgcggtggctcacgcctgtaatcccacactttggaggctgaggtgggtggattgtttgagctcagacattcaagaccagcctgggtaacacagcaataccccatgtctacaaaaaatacaaaaattagccaggtgtggtggtgtgtgcctgtagtctcagctattagggaggctgaggtgggaggatcacttgagtctgggaggcaaaggttgcagtgaaccaagatggcaccattgtactccagccagggtgacagagcgagaccttgtcttaaaaaaaaaaatcatgttttcttttgtttttttgagacagggtctcactctgttgcctaggctggagtgcaggggtgcaatcctagctcactgcagcttcaaactcctgggctcaaatgatcctcctgcctcagcctcctgagtagctggtactacaggtgtgtgccaccatgcctgggtaatattttaaaaatcactttgtagagatgggggtcttactatgttgaccagtctagtgacaaaccatgttttggtttttattattattattattattattttattattattattatttagtttcgctcttgttgcccaggctggagtgcaatgatgcgatctcagctcactgcaacctccgcctcccaggttcaagcgattctcctgcctcagcctcctgagtagctgggattacaggcacccgccaccacacccagatagtttttttgtattttcagtagagatgggctttcaccatgttgtccaggctggtcttgaactcctgacctaaagtgatccacttgcctcggcctcccaaagtgctgggattacaggcatgagccaccatgcccgtgacccatgttttggtttttaatgaatgctgtcacagaacgtatcttcaaaatcatacacaaacacagaatactctgaggggctgtctactttttttcctacccaaaataattttcaaatatactgtgatctgttacaactgacccatttcattaaataattttaaaaaaatcacccatgacacaaattcttgctgccaatatataattaggcatcccaaagggaaagtgctaaactgtagagaactagaagagtaaacctttgttaaagagatttttcttctcattgaaaattagaagcagataaagaaaaaaaaaccagattctatttgtagaaaatgcatctttgaaaggaagcataaagaatcagtggttggatagataagaaactaataaaaggagttaccacaaggagtgaaggtacaatgggggagtagagaagagtgacagaaataggagctgaagttttcaatgtctgtctttttatataattttagaatcatgtgattatcaattttaaaaagaaagttaaaaaagaaaagtcccatctatctatattataagccatccttttataagcatacaacctatgctgagaccttttacgatgtttaaaaacgaaaatctcataaaccttaaaatagagatgaataaatagtaaagacaatgaggggcatataactttccaagttagtcttattactaactacaccctctccattagagtagtaatccacacttggaattgtttgggacggcaactatggtgcagtagtgcttagatggttcagcatggctctgcagaatgacaggcctagatttaaagtctggttctgcaactttcttttttttttttttttttttcttttctcttcttagagacggagtctcgctctgtcgcccaggctggagtgcagtggcgcaatctcggctcactgcaacctctgcctcccgggttcaagcaattcttctgcttcagcctccctacaggtgcatgccaccatgcccgtctaatttcttttgtattttagtagagacaaggtttcaccatgttgcccaggctggtctcaaactcctgagctcaggcaatctgcccacctcagcctcccaaagtgctgggattacaggcgtgagccacagcacctggccctgcaactttctaagtttcaagaccttggggcaagtaatttaacacctctaagcttcagtttcctcgtctggtaaaatgaggatataatatcacctatatctaagagtactagtgagaattaaaatggataacaaatgtgaaatgcagtaatgactcaagaaatgttagcttttattactgtgccatacaaattatgacttcaactaaacaactattggaattaacaactaaacgaatcattttgtaaattattctctaagatgatcaggcttgctttggtgtatactactaaaagtagtcctgtttggagccaggcccggtggctcatgcctgtaattctagcactttgggaagccaaggcaggaggatagcttaaacctaggagtttgagaccagcctgggcaacatgctgaacctctcatctctacaaaaaaatagaaaaattagccaggcctggtggtagtagaccttgtttcaaaacaaaaacaaaacaaaacaaaaaaactagtcttgttttaataagaacgagaaaatagttttttttttttttttttttgagacagagtttcactttgttactcaggctagagatgagtggcgcaatcacagctcaaagcaatcctcctgcttcagcctcccaagtagctgggactacagacgccacatttttgtattttttggtagagatgggattttatcatattgcctaggctggtcttgaactcctgagctcaagcgatctgccagcctacgcctcccaaagtgctgggattacaggcatgtgccaccaagcccagtgaagaaaacagatttttttaaaaaattaattttaatgaaatagaaacagggtctatgttgcccaggctggtctcgaactcctgagctcaagcaatccacccacctcagcctcccaaagtgttgcgattacaaacagtcatgagccaccatgcccagccagatcttaatgtaaaaatatgctgtatatcttaaccctttctaaatatgaaaggagtgaatcaaaaaactcttactaaaattacacattcttattttgtttttaagatagggtcttgctctgttgcccaggctagaatgcactggcacaatcttggctcactgcaatctctgcctcctggactcaagcgatcctcctaccttagcctcctgagtggctggactacaggtgcacatcaccatgcccagctattttttttttttttttgtatttttgtagagatggggttttgctatgttacccaggctggtcttgaactcctgggctcaaaggatccacccgcctcagcctcccaaagtgctgggattacaggcgtgagccaccatacccagcctacttttttttttttttgagatggagtctcactctgtcaccaaggttggagtgcagtggcatgatctcagctcactgcaacctccacctcccaggttcaagtgattgtcctgcctcagcctaccaagtagttgggattacaggcatgccccaccatgcctggctaatttttgtattttcaatagagatggggttttcaccatgttggccaggttggtctctaactcctgatctcaagtgatccacttgcttcggcctcccaaagtgctgggattacaggcgtgagtcaccatgcttggtcttttttttttttctttctttttatataacacgttctacaaagcttctggaatgaacacatattttttaaatgtcagagacccatgcagagaatgaaaatagcatggtatgacagaagggcagttgagtagccactttaaattaggaagacagaggcagtgacacttaagtgctatttacaagatagtaaagatcaagggtaggcacatttcaggcaaagtacatgactaggaggtccctaggtgacaaggtgccctgcctgtgagtcagtatcaaggaaccaaaaggccmctgtggttgaagcgtctgagacatgttacttagctgctgcatgtagttaacctcagaaccaaatgctctctacaaaggctcagatcatcacaatgtcatgttgtaatttctctgactgcctccaactctaagacctaccaatgtatataacttatacctatgtgtgtgtgtatgtatatatatatatatatatatatatatatatatatatatatttttttttttttttttttttttttttttttgagacggagtcttgctctgttgcctaggctggcgtgcagtgcagtggcacaatctcagctcatggcaacctccgcctcctgggttcaagcgattctcctgcctcagcctcccagggagctgggattacaggcgcctgccatcacgcccggctaattttgtattttcagtagagatagggtttcaccatattggccaggctggtctcgaactcctgacctccagtgatctgcccgcctcggcctcccaaagtgctgggattacagtcatgagccaccacacctggctggaatacctatatatttttaacactgtggaataggaatattttttccattatataatatttgatatattttaacacaaatgttaaaattagcactttgggaggccaaggcaggtgaacatgaccagtgtttttcttcagcactaatctctcctccttccaccaggaggaggaggaggaggcttccctttgatgctaagtaatgtacaatttttcctgctatatgagtatctatagaaccaattactcacacacaattggtaattagagaaattatgccagtttaatatggaaggtgtgttggttcataagtgtttctcctaggtaaagggagccagaaaagcaggagtcaaattatgcctttcagtagaaaagaatacagtttttagctcactgctgggcagacaggagccctttcagccttttttttttttttgagacggagtctgactctgtctcccaggctggagtacagtgatacaatctcggctcactgcaacctccacctcctggattcaagtgattctcctgcctcagcctcccaagtagctgagattacagacctgcaccatcacacccagctaatttttgtatttttaggagacacagggtttcaccatgttggccaggctggtcttgaactcgtgacctcaagtgatcctcccacttcggcctcctaaagtgctgggatttaggtgtgagccactgtgcttggcctcctttcagttttaaatgaaaaatgagtgcctttgtacacgtactcacaaacacaatcaagaatgaaagaaattatcaggagcctggctaagagaagcaacttcatcttagaccaagctacggtaagtctttgggacatcttgccaagagctggtgttggatcctgcccttctgtggcttgacggctacattcctcatattcacaaacaggctatgctctaggctctgaataatgaaatgccgaagtaccacaaccatattcctagtccaggacttaaggtttttggcaaagcagagtgtgctggaatgtatattcaatgtgttgaattcaaacacctacaatgggtaaatcgtagtcttttaaagcattcaaaaaccatgtgtccagtatccagtaaaacaggagaattttagttctgggaattttgtttgttttttaagaaacaaggtcttctctggtgcccaggctgaagtgcagcagcacaatcatagctcactgcagcctacacttcccaggctcaagcaatcctcccgccccaggctcccaagtagctggtaccacaggtgtgtgctaccacacccaacttgagaatctcacagttttgatgcaactcttaagcagagaggcctaatttacaatgtatctcaattttctcttgacttacttggagaaaacattggtaccactgatgttgattttgtctactccaaagggaaacaatttgtaaaaacaacaattagagaaaaaccaaagataatacccacagtatctatagaaatatagactttaaatatcttctatattatagtaatgtggggatgggtgccacatgtggacagtttactgacagtagttgctgtccaggaaaccattcatgttaacactgatgccaagaaagaagtaaaagtagagttcgatctccccatctaaacaaggatggtcgtgaaagttcttgaggtgaggaaacttcaaaatagcagagaatgggctgggcacggtgactcacgcttgtaatcccagcaatttgggaggtcgaggcaggtggatcgcctgaggtcaggagttcgagacaagcctggccaaaatggtgtaaccctgtctctactaaaaatacaacaattagccaggcgtggtggcgcacacctgtaatcccagctactcgggaggctgaggcagcagaatcgcttgaacctggggaaatggaggttgcagtgagccgagatcataccactgcactccagcctgggcaacacagtgagactgtcaaaaaaaaaaaaaaaagcagagactgcataatatgagtaaagcagtaatagaataatatgagtagaataatatgaagtagttatttcttcagtgggagaagaggcagaagaaaaagagattaaaacacataaaaggccgggtgcagtggctcatccctgtaatcccagcattttgggaggctgaggtgggaagatcgcttgagctcaggagtttgagaacagcctgggcaacatggaaagaccccatctctacaaaaaagttaaaatattatctggatgtggtgatgtgcacctgtaatcccagctactcaggaggctgaggtggaagaactgcttgagcccaggatgtcgaggatgctgtgagctgtgtttgtgccactgcactccagtctggacaacacagtgagacagtgcctccaaaaaaaaaaaaaagaaaaaaaagaaaagaaaaaggcacaaaaagggattaagagaatggaagacttgccacagagatatgctagggaaaagtatagaatctaaaatagtccaataggatatctagaaagcctattagaaagccttggcaggccgggaacagggctcatgcttgtaatcccagcgctttgaaaggccgaggtgggcagatcacttgaggtcaggagtttgagaccaacctggccaacatggtgcaaccccatttctactaaaaaatacaaaaattagccaagtgtggtggtgcgcaccagtagtcccagctgcttgggaggctgaggcaggagaatcgcttgaaccccggaggcagaggttgcagtgagccgagaccatgccactgtactccagcctgggtgacagagtgagactccgtctcaaaaaaaaaaaaaaaaagaaagaaagccttggcagtcatgggcttagggggaaatgtagatcaaagaagattctaatgacaacaagtggacaaatgtagcttccatgaggaaacttaggctggggaaattcttcgaaaaaaaattacaaagaacaaaaaatctctctctagagttactgaaacatacctaaacaagaacttaattgctattctttaacatctgctcaagaacctcatatgtgttggagatgttcttctttctcattcaacagagctgccaatgaactgacaaacagtgaggtacaaaaatgtggttaaaaaatattttgtgtgtggttttattattattattattttgagacagggtttcactctgtcacccgagctagtgtagtggcttgattacaactcacctcagccttgacctcccaggctgatgtgatcctcccacctcaagcctcctgagtagtggggaccacagatgcgtgccaccaacacccggtttttaaatttttatttttgtagcgacagtctccctatgctgtccaggctgttctccaacttctaggctcaaggaatcctcccaccttggcctcccaaagtgctgggattacaggtataaaccaacacacccagccaaaaagtcagaggtatctgggttcaaatcttgtctctgtttctttctttctttttttttttagatggagtctcactctgtcacccaggcgaggctggagtacagtggtgcgatcttggcttactgcaacctctgcctcccaggttcaagcaattctcctgcctcagcctcccaagtagctgggattacaggtgtgtgccaccaggcccagctaatttttgtattttcagtagagacggggtttcaccatgttggtcaggctggtcttgaactcctgacctcatgatccgcccacctcagcctctcaaagtgctgggattacaggtgtgagctaccgcacccagcccctgtctctgtttctaaggcaaagtttcaaactatgaaaaagataaacacaacctattatcaaccttaaattcaccatgaggattaagtgatataattaaatatataaataaaatattaatgtacataaagaactcagctcatggcccacagaattttttcacatcattgcaatattatagctaatatcacgtgcttaattaagaaagtgtcttaacagaactctagtgtttcctaatgagcataatttattgtacatcatcctagaacttatccttaatcttcaatttggcctttctgcttaagaaggaaaaaaacctttaaaataccttagtctttaatattttggattttagtattatttatattgtgcatttttctctatactgtccaacaaaatgttttttaaatattttatgcctaaacattttatattctccctctaaaattcaaatgtttaagttccttctctattaatgagcagatctgcctgttaacaatggagttttacacagtttgtctcttcactttaaccagaacctgaaatcatatttttgcttttgtttttgcaggctacttaattatcataacttcttaggatcatcagaattaaaagacacacacacagatttccactggttaactttaactcagtaggtgtcttttcttttttcgtttttttccttttctttttctttttttttttttttgagacagggtcttgatctgtcacccaggctggagtgcagtggtgtgatctaggctcactgcaacctctgcacccccacccaccccctaccccagcaccaagctcaagtgacgatcctcagcctccctcagcctcctgagcagctgggaccacaggagtagctcgaacctcaggcgcacaaccaccacgcctggctgtttttgtatttttagtagagacggagtttcaccatgtggcccaggttggtcttgaactcctgagctcaaggaatccacacacctgggccttccaaagtgctgggattacaggcgtgagccaccatgcccagcaaatgtcttttctttttttttttttttgagactgagtttcactcttgttgcccaggctggagtgcaatggcacgatctctgctcactgcaacctccgcctcctggattcaagtgattctcctgcctcagcctcccaagtggctgggattgcaggcatgtgtcaccacagccagctagttttgtgtttttagaagagacagggtttctccatgttggtcaggctggtctcaaactcccgacctcaggtgatctgcccgcctcggcctcccaaagtgctgggattacaggaatgagccaccgcgcctggtctagcaaatgtcttttcttagataaactataaccaacacactggaagaagagtaccctctgaaacctaaaggttattatcactttgcctacagtatctgtgttgtctggcttcccccataacttgtatttaactggatctttcctttgcagcaaataattcataagagaaaaaaggggaagaagtggattctttttgaatatgaaagggtcttggccgggcacggtggcttatgcctgtaatcccagcactttgggaagcctaggcaggtggatcacttcaggtcagaagttccagaccagcctgaccaacatggtgaaaccctgtctctactaaaaatacgaaattagctgggtgtggtggtgcacggctgtaatcccagctacttgggaggctgaggcaggagaatcgcttgaacccaggaggcagaggttgcagtgagccaagactgtgccaatgcactccagcctgggcaacaagagtgaaactccatttcaaaaaaaaaaagaaagggtcttatagaaaaagaccagctatatattccagttgtactggtccaccagtagctaaattctacttcagtattcatttaaatggcatttgtgtttcacctttaattttttatttttatttatttatttttgcaacagagtctcgctcttttcacccaggccggattgtggtggcaagatctcagctcaccacaacctccgcctcccgggtccaaaattctcgtgcctcagcctcccaagtagctgggattacaggcacccaccatcacacccggctaatttttatatttttagtagttcagggttttgccatgttggccaggctggttttgaactcctgatctcagatgttccacccgcctcagcctcccaaagtactgggattacacgcgtgagccaccgcatccagccgttttgtttttttaagagacagggtgtcactctgttgccctggctggtgtgcagtggcacaatcatggctcactgcagcctcgacctcccaggcttaagcaatcctcccacctcagcttcctgagttgttgggactataggcacatgccaccacactgggctaattttttattttattttattatttttagagacaaggtctcactgtgttgcccaggctggtctcaaactcctgggctcaagcaatcttcccacctcagactcccaaagtgttaagattacaggtgtgagccaacttgcctgggctattattctaactggttttaagtattccgataatcagcttcaggtcattcattccaaattggggtttggaaacatagtcacaaaacgagggaggctgtattacagatccaaagatctagaaggagcccaacatggaaaataaaacataaagcccctataaaaataacgcaaacatgaccttctttctaatgtggctccctattgttctagttgttatggataaagcagtgaacaaaatggacaaaatcccaccatccaatgataaccattctgttaccattttagttaatgtgttccacatacgtgtacacatttttctaacacagtatatatgatggcacagattttacaagataagaccctgagttattttgctctttctgccacacttaccaatcagtcacaaactgatgcctccaaatagctcaaacttatctttcaatgctgcaccagtatttcatttaatttcatcatttccaaatttatatatgaaaaacaatgctgtgtatatgttcctataaatacattcttacacacctgattaatctcctcagggaagaactgctagaacacaagtatgcacactgtaagttttgatacacatagccaaactacaataggagaattttttttaatgatgaaatacaaatacagtacgttcaattcaagtcttcctggatgatcacatctctgcagaagcccagtgtttcaactgggaaaccagctagaacctaatactacatctgatcacattttgattaagtaacatctctatgcagtactccataatgaaaataatttggactaggcacagtggctcacacctgtaatcctcgaactttgggaggccaaggcaggtggatcagttgaggtcagaagtttgagaccagcctggccaacatggtgaaaccttgtctctactaaaaatataaaaattagccgggcatgctggtgtgcacctataatcccagctactcaggaggctgaggcaggagaattgcttgaacctgggaggtggagtttgcagtgagccgagatcttgccactgcactccagcctgagcgacagagtaagacactgtctcaaaaaaaaaaaaaaaaaaagacaaacaggctgggcgcagtggctcatgcctgtattcccaataatttaggaggcctaggtgggcaaattgcttgagcccaggagttcaagaccagcctgggcaatatagggagaccctgtctttacaagaaatacaaaaattagctgggtgtggtggcacacatctatagtcccagctacttgggaggctgaggtgggaggacggtttgaacctaggaggcagaggttgcagtaaaccaagatcatgcaactgcactccagcctgggtaatcaagcaggaccttgtcaaaaaaaaaaaaaaaaaagaaaaaagaaaaaaaaatttttgtaaagactacaaataatcaggttaaaggcaaatctaaatatattttgaatgtctaacactaataggttgggctactttgcctaaatgatatgcaggttgagcaaccactccagattttctcatatactttccccagctctacaaagcacattctgaatttgagtttactttattgaaccaaaaatgatgcaatttactgtcattaaagacataacagtaaatgcatagccataccctatgaaacagtttatttcaattatatataaaagtatataagtgcctagaaatgtgactaaaaggtccacaaacttaatgtgacckctgacaaaacaagtaatagtggccatgaagtgggatggatgagtggggagcaatagaaagggacatgttkacattttgctccatatttctacattatttcaggctttcatggtctagatattcacatattacttctattattattattattattattagagacagagttttgctcttgttgcccaggctggagtgcagtggtgcaatcttggctcactgcaacctccacctcccaggttcaagtgattctcctgcctcagcctcctgagtagctgggattacaggcgtgcgccaccatggccagctaatttttgtatttttagtagagacggggtttctccatgttggtaagtctggtctcgaactcccgacctcaggtgatctgcctgccttggcctcccaaagtgctgggattacaggcatgagccaccgcgcccagcctacttctattattaaaagaaaagacagagaattccaatactatgacactgctaaaaaggagcctgactttgatttgctaatatcaaaagattaaagtgaagatgtacgaagtgggaaaaaaaaaagttgcagaaatgtattgtcctgcaaggctccaggtagcaccaaccccaaggctttgatgaccaaaaagctttgggcagaggccaaccggtgtgctgatacagaagggatggtccaccccctttgaaaccaaagaggcagccctgatcatctctgaattgctgttaaggtcgctcttcccttgtcatgaagaataatgtccagatcattcttcccttgccttgaagaataatgtacacttgcagcccaatagctctacggtcttgtcctgtaaaataaaagaactccgacctctatttctccttcattccatccagtctccctcccttttagttcaacctggcagtttcctgctgggggctggtgatttgattctgcagttctcacccacacaaatcttatcaagtggttagtctaccatacctttagtgttctcttgtgaactttcttactttttgttatgtggacaggctgagaattttccaaatctttaagttgtggttcctttttgcttaataattccatcttcaattggcttccctcttttcaatttttactataaacaatcaggaggaaccaagccattccttcaacattttgcttagaaatctcctcagctaagtatccaacttcatcactcacaagttctacctcccacccagaaaacactagaacacaaacataattcagccaagttctttgctactttgtaacaaagattgccttttctccattgtccagtaacgttcttcatttctaagaccatatcagaatggcctttattttctactaaaattctgtacatgattatttatgtattctgtaagatggaagcttgctctaccattctcctctcttcttgctgagctctctccaaaatcacctttaatgcccttacttctaccaacagtccctcacagcaaatatcagcttgttctagcatgcacttaaaaactcttccagcctatatccattacacagttgcaaagtcacttacccgtttttaggtatttgttatagtagcatcccactttttagtaacactttttgtcttagtttgggctgcaataacaaatactatgggccaggtagcttacatacaaacatttatttctgacaactatgaaggctgggaaatccaagatcaaagttctagctgatttggttcccagtgtgggtcctcttactggcttgtagatagaggtcttcttcctccatcctcacatggtagagaagaggatcatctcttttctgtctcttctaatatgggcactaatcctatcacaaggcctctaccctcatgaactcattaccttccaaaggtcccacctccaaatgctagcacattggggrttagggaattcaacatatgaattttggggggaaggtacacaaacatttagtccatagcatgtatatatactatgatcccttctatgtaaaacaaaaatataaactatatacatacgtatatgcatattaaatttctagaaggagccaggcacggtggctcacgcctgtaatcccagcactttgggaggccgaggtgggtagatcacgaggtcaggagatcgagaccatcctggctaacacagtgaaaccccgtctctactaaaaatacaaaaaaattagccaggcatggtggcgggtgcctgtagtcccagctactcgggaggctgaggcagaagaatggcatgaaacagggacgtggagcttgcaggagccaagatcgcgccactgcactccagcctgggagacagagtgaggctccatctcaaaaaaaaaaaaaaaaaaaaaaaaattctagaaagatgtgtgtctatactttccaaaaacagccacagaattaaagccaaacatgctcttctagaatcttgccactccccattgagaggtgaaatctggccagactctgtggctcatgcctgtaatcctaacactttgggaggtcaaggcaggaggaacgcttgagcccaggctatggtcaagccattgccctccatcctgggtgacagagcaagaccctgtcaaagaagaaaggaggaagaaggaagaagaaaggaaagagggaggaaggaaagagagaaatctgtttgccctcctcttgaacctggacaggcctgtgactgctacacccaagaatataggaaaggtgttatgacttcttacactaagttctctccctctcccatctcctctcaggagggatgttctcccttggaaccaggccaccattctatgaggaagccaagcagccacatgaaaaggccgtatgtagacattctaactgacaatactagctaaggttccagctactcaccagcatcaactatcagacagtgagtaaccaagtttccagatacttcctgccctcagcttctatgtcttctagctaagaacacaaacaatgatcagcagacaagctgtgtgaattccagacacagtctgtcagcttaatgaatggttgttctatggaactaagttttggggaaatttgttatacaataataataatgggaacaatacacaagaaactgtcggctgagggtggtggctcacgcctgtaatcccagcactttgggaggtcaagaagggaagagtgcttgaggccaggagtttgagaccagcctgggcaaaatagagagaccccatctctattctaaataaataaataaaacgtaactatacatcctaaatacacagttcaaaattggtaagaccaattgtattgctaattatagaaggctatgtgccttttatgtcttccagtgcctgcatattgatttaaaaaaaggattaagatttgaaacaaagtagtccactgaaatttccttattgactaaaataaaactcaaaagttaatcacacgattaaaaaagctttcatagcaacatgaaaaatgcaaaatattattaaattgaggaaaatatacatattccatagtatctaaaaacatatttcttaaaaagatctgggaagatacacaccaattcatctaggaaagtaggaaataaaagctaagtgtggggaaaggagttcagccttacttttaatgtattgatattttttgaaaacacatattcatatattatttatataaataattaaatattttaaaaagaaaaacaaatattttacaaaagttttaacacaactagcaaaaatacatttgctgcatagagaagtctctcaaagaaactttccagacacagatatttttcttccaggaaaggtccgatgggccttaaagtgatttatttaagtacagtagacatcacaatttacagggcattcaggctgataaaaaggaatctgaccaagggtctcccaaatcacatttttacagtactttaatacagaaacaaatttactttattttttcttcagacagagtctcgctctgtcacccaggctggagtacaatggcgcgatctctgcacactgtaacctctgcctcctgggctcaagcaattttcctgcctcagcctctcaagtagctggaattacaggtgcccatcaccacatctggctaatttttgtatttttagtagagatgagttttcaccatgttgaccaggytagtttcaaactcctgacctcaaatgattcgcccgccttagcttcccacagtgctgggattacaggcatgagccactgcacctggcccagaaacaaatttcagtgaagatgtagaagttttagttatgctgtttagattaagagttgaaatacagagctcaacaattaaaacataaaaatgaagaggattacctgcattccaaaatcttagattctaacagaacaggaaaaacacatgagcataatccaagttcgcatttctaaatccatctgctttctctttctagaattcctatcattaatagaagaaactatatgccaagtgacagccagtgaagcagaacaacaggagaagacggcgaagccagaagcaaattatttcaatggaagaaaaatcccctctccaggttgttttcattggtataaggatatgagttactttttaaaaaggaacactaggcggccgggcacagtggctcacatctgtaatcctagcactttgggaggccgaggtggatggatcacaaggtcaggagttcgagaccagtctggccaacatagtgaaaccgtctctactaaaaatacaaaaaattagccgggtgtggtggcgtgcacctgtaatcccagatactcaggaggctgagacatgagaggcagaggctgcagtgagccgagatcacaccactgcactccagcctgggcaacacagcaagactctgtttcaaaaaaaaaaaaaaaaaaaaaaagaatactaaagtagttacaaggaaatatctgatttttctttttcttgttttataaagaatactagacaacttaaaacaataatttatgcaaggcacggtggctcacacctgtaatcccagcactttggggggccaaggcaggtggatcacctgaggttgggagttcgagaccagcctgaccaacatggtgaaatcccgtctctactaaaaatacaaaattagctgggcgtggtggcgcttgcctgtaatcccagctactcaggaggctgaggcaggagaattgcttgtggaattgaggtggaagttacggtgacccgagaatgcgccattgcactccagcctgagcaacaagagcaaaactctgcctcaaaaaaaaaaaagaatgattcatgattagacggggattttgtgtaggcaactttctatacatatactagtattctactactacatcactaaaaatccatagttatcggctgggcgtggtggctcacgcctgtaatctcagcacttcgggaggccaaggtgggcggatcacctaaggtcaggagttcgagaccagcatggccaacaaggcgaaaccccgtctctactaaaaatacaaaagttagccgggcgtggtggcaggtgcctgtaatcccagctacttgggaggctgaggcaggagaattgcttgaacccaggaggcgtaggttgctgtgagcccagattgcgccattgcactcccgcttgggagacagggcaacactctgtctcaaaaaaaaaaaaaaaaaattccatagttatcacggggcatattcctatattaaataacacagaattatatgtaacatgatgaagatacccagattgtcactgaaagagactcaccgtctatccttatctacctttttaagtccttttaggcagtattataaagcactaaatctctaattaaagtacagttgtcccttggtatctgcaggggcttggttccaggaacccccctcagattccaaatccagacactcaaatcccttatataaaattgtatagtatttacatacaatctatgaacatcctcccatagacaaattgtctctaggttacttataatacttaatacaatgtacaggctatgtaaacagtggttatgctattgttttattatttgtattattattttttaaatatttttgatttacagttggctaaatccatgaatccagagagcacaggtatgaagggccaactgtattagattaggaaagaaaaaagtccgtgatatgagataatacctcaattttttaagtgtttctgaacattcctgagacaagcagaagtatacatacacctggcaaaatgcaactgcattaagaatagtctaacactcgctgtaactcggtgatgtaattaaatcatagaaaggacccatgccaagtaagtaagtaaaaccttgtcaccagcaccccaaaacgggcattctttgtactgcaatcatatcagtcttgaacttgaacactgttagtttataatatgtactttttttttgagacagtctccctctgtcacgcaggatggagtgcagtggtgtgatatcagatcactgcaacctccacctcccagactcaagtgattctcatgtctcagcctcccaagtagctgggattacaggcacccaccaccaggcccagctaatttttgtatttttagtagagactactaccaacagggtttcaccatgttggccaggttggtctcaaactcctggcctcaaatgatctgcctgcctcagcctcccaaagtgctgggattacaggcgtaagccaccccacccggccctataatgtgtactttaaaataaccctataataacatagtcagagaagcttagtgaggtggctcacgactgtaatcttagcacttaaggagggtggaacaggaggaagcttgaggctaggtgtgtgagaccagcgtaggcaacacagtgagaccccatctctacaaaaaaaaatacaaaaattagccaggcacaatggtgtgtacctgtagaaccagctactctggagactgaggtgggaggatcgcttgagcccaggagttcaaggctgcagtgatctattacaccactccactccagcctagatgatacaatgagaccctgtctcttaaaataaaaataaaggaaaaatatagatagatagacagatagatagatagtcacagagatggtcatttgcctctttttttttttttttttttaagacagggtctcactttgttgctcaggctggtttctaaatcctgcctttaaacaatcctcccgcctctgcctccgaaagtgctgagattatgagcatgagcccagccagatttatagtctttgtactaaaacttatatataaccagtgatgaggcagtagtaagagaagttccaactgctgttagtgcccataaagctttatgagaggatacttttcttctatttttatagattttttaaaacattctgatgagaacaaatcctaccaatttataaatcaaggtaatgagaagttttattaagaattattgaacagctacattgtagtgtacattttcttttcaaatcatataactatggtgcatttaaagattttcttcttcagaaaagagagaagaatcaaatagacgcaataaaaaatgataaaggggatatcaccaccaatcccacagaaatacaaactaccatcagagaatactacaaacgcctctacgcaaagaaactagaaaatctagaagaaatggttaaattcctcgacacatacaccctcccaagactaaaccaggaagaagttgactctctgaatagaccaataacaggctctgaaattgtggcaataattaatagcttaccaaccaaaaagagtccaggaccagatggattcacagccgaattctaccagaggtacaaggaggaactggtaccattccttctgaaactattccaatcaatagaaaaagagggaatcctccctaactcattttatgaggccagcatcatcctgataccaaagccgggcagagacacaaccaaaaaagagaattttagaccaatatccttgatgaacattgatgcaaaaatcctcaataaaatactggcaaaccaaatccagcagcacatcaaaaagcttatccaccatgaccaagtgggcttcatccctgggatgtaaggctggttcaatatatgcaaatcaataaatgtaatccagcatataaacagaaccaaagacaaaaaccacatgattatctcaatagatgcagaaaaggcctttgacaaaattcgacaacccttcatgctaaaaactttcaataaattaggtattgatgggacgtatctcaaaataataagagctatctatgacaaacccacagccaatatcatactgaatgggcaaaaactggaagcattccctttgaaaactggcacaagacaaggatgccttctctcaccactcctattcaacatagtgttggaagttctggccagggcaattaggcaggagaaggaaataaagggtattcaattaggaagaggaagtcaaattgtccctgtttgcagatcacatgattgtatatctagaaaaccccattgtctcagcccaaaatctccttaagctgataagcaacttcagcaaagtctcaggatacaaaatcaatgtacaaaaatcacaagcattcttatacaccaataacagacaaacagagagccaaatcatgagtgaactcccattcacagttgcttcaaagagaataaaatacctaggaatccaacttacaagggatgtgaaggacctcgtcaaggagaactacaaaccactgctcaatgaaataaaagaggatacaaacaaatggaagaatattccatgctcatgggtaggaagaatcaatatcatgaaaatggccatactgcccaaggtaatttatagattcaatgccatccccatcaagctaccaatgactttcttcatagaattggaaaaaactactttaaagttcatatggaaccaaaaaagagcccgcattgccaagtcaatcccaagccaaaagaacaaagctggaggcatcacggtacctgacttcaaactatactacaaggctacagtaaccaagacagtatggtactggtaccaaaacagagatatagatcaatggaacagaacagagccctcggaaataacgccgcatatctacaactgtctgatctttgacaaacctgagaaaaacaagcaatggggaaaggattccctatttaataaatggtgctgggaaaactggctagccatatgtagaaagctgaaactggatcatttccttacaccttacacaaaaattaattcaagatggattaaagacttaaacgttagacctaaaaccataaaaaccctagaagaaaacctaggcattaccattcaggacataggcatgggcaaggacttcatgtctaaaacaccaaaagcaatggcaacaaaagccaaaattgacaaatgggatctaattaaactaaagagcttctgcacagcaaaagaaactaccatcagagtgaacaggcaacctacaaaatgggagaaaatttttgcaacctactcatctgacaaagggctaatatccagaatctacaatgaactcaaacaaatttacaagaaaaaaacaaacaaccccatcaaaaagtgggcaaaggacatgaacagacacttctcaaaagaagacatttatgcagccaaaagacacatgaaaaaatgctcaccatcactgggcatcagagaaatgcaaatcaaaaccacaatgagataccatctcacaccagttagaatggcgatcattaaaaagtcaggaaacaacaggtgctggagaggatgtggagaaacaggaacacttttacactgttggtgggactgtaaactagttcaacccttgtggaagtcagtgtggcgattcctcagggatctagaactagaaataccatttgacccagccatcccattactgggtatatacccaaaggactataaatcatgctgctataaagacacatgcacacgtatgtttattgcggcactattcacaatagcaaagactcggaaccaacccaaatgtccaacaatgatagactggattaagaaaacgtggcacatatacaccatggaatactatgcagccatcaaaaatgatgagttcatgtcctttgtagggacatggatgaaattggaaatcatcattctcagtaaactattgcaagaacaaaaaaccaaacaccgcatattctcactcataggtgggaattgaacaatgagaacacatggacacaggaaggggaacatcacactctggggactgttgtggggtggggggaggggggagggatagctttaggagatatacctaatgctaaatgacaagttaatgggtgcagcacaccagcatggcacatgtatacatatgtaactaacctgcacattgtgcacatgtaccctaaaacttaaagtataataataataaaataaaagagtttcttcttcaatgaaaacgttttctgtaactacgattttttttttttttttt

SEQ ID NO: 97268 - DNA, 48116 bp, Homo sapiens
  misc_feature (1)...(48116): n = A,T,C or G
ccttgaactcctggactcaagctgcagcctctcgagtagctgggtgcatgtgctaccacacccaattatgaatttcatcattagtttcttagtagagtccacatgtcctcagtagtaagttcatcagtgctaaatatttgaaggtatttctactgttttgtaaaagtaacttaagcctacctggtctgctatcttttgagtatttatactttctacgggcttgtaggtaaacataaaaagagaaaaaatatcccaataatacagtttttaaccttttatgataaagacatgcttagaattgctgttaagctttctgagatttaaccactgaaactaagtaaaagacaaagcacttaggtaaagcttcattcagtatccattcacccaatactggtttgattctagggcctaggaaaataggactgagcaaagcccttgtccagatggaacttatgttttagaggggaaaacaaaccataaaaaggtaaacagtataaaatcaggaaaggataaatgtatatgaagaatcaaaatgaggacggtgatggggataagaggggaaggtttttgaggagagcagagcaatgatgtaaaagcaagacacacagatagggaaatagctttccatactaagggaatgggaaataaagctgagttttgccttgaggacctccaaacatgagaattgctagagctctgtgaacaaggatgagagtggaagacaatataagcaaaggctacatcacttagggcctataggccacactgaagtgtgacaggaaaaactcagtttgagcagaggcttgacatacttaacatatttaaaggttctctggctgttgtgtggacaagaggagaagcagagattagttaagaggctattgtagcccaggtgagggatgatgtatgatcttcaacatgtctaatttttttgtgcctcaatttcatgaaatgaaaatgcgactaataccacctcataaagttgtgagaattacatgagtcaatatatgtaaggcccatcatggcacacaaatgtgttatgtaatatccatttggcagactgaagaacaacagtatgaatggaattcattcaccatgagaattacctggaattctctgggcatggtagctcatgcctgtaatcccagcactttgggtggccgaggcaggtggatcacctgagatcaggagttcgagaccagcctgaccaacatggagaaacccagtctctaataaaaatacaaaactagccgggcatggtggcacattcctgtaatcccagcgactcaggaggctgaggcaggagaatcgcttgaacctgggaagcggaggttgtggtgagccgaggttgcgccattgtactccagcctgggcaacaagagcaaaactctgtttcaaaaaaaaagaaagaaagaaaattacctggaattcaatattgccatcggctgatttaatttctaatatgaagaaaggggcagtgtgatgtgccacggagcatccacaacctgccatttcagcccagccaaccttagaaagccattgaaaagagttgtttttaatggtgtttttacatccagcttcccacacctcaaatacttggggtggaattgttaatctcacattgcagtacaatgaaaatagtggaatggaaatcaagttataaaatggagctaaatatttcttctgcttgcctctgagttgataagataccataagatactgtacatgaggctgggcgcggtggctcacgtcttatttcttctgcttgcctctgagttgacaagataccataagatactgtacatgaggctgggtgcagtggctcacgcctgtaatcccagcactttgggagggtgaggtgggcagatcacctgaggtcgggagttcaagaccagcctgactgacatggagaaaccccctctttactaaaaatacaaaattagccaggcatggtggtgcatgcctataattccaactactcgggaggctgaggcaggagaatcgcttgaacctggaaggcagaggttgtggtgagctgagatcgaaccattgcactccagcctgggcaacaagagcgaaaatctgtcgccaaaaaaaaaaaaaaaaagatactgtacatggaagcttctcaggctaaatccattaatataaaaatacattgtggatactgatgagatggctaattctgtcaacttgactaggctacgggatgccttgatagctggtcaaacaacatttctaggtacatctgtgatggtgtttctggaagagactagcacttgaatcagtagacttgagtaaagaagactgccttcacccatgtgggtgagcgtcatctaatccattgagggcctgaatagaacaaaaaaggggaagaagggtgaactgctgggacatccatttcgtgcccccagatgttggtgctcctggtcctcaggccttcagactaggacttaacgttattgcctcccctgattctcaagccctcgggtttggaactacactggctttcctgggccttcagcctgcagaaggcagactgtgggacttcacctccattttgcagagccaatttctcataatctgtacatatcctattggttctgtattttttagagaacaaatacagcctattatgtatatataagaccctgggaatgcaaagatgaacaaaattaaccttctgctctcaatgaatcttggaagtctccagaggcagacaatttcaaaacaccgtatatagtcttaatatggaattaacaatagggtattgtgaatacacaaaagtaggaaggactctgatctctagaaaacaattgtatactgtgaatgaaaaagactaattctccacagtctatactcaatctctcttacctttccataattttcttcagcaaacttattaccaccaaacatagtacatgtttatttattacccatctctcccaactagaaaataaatgtattacactgggctgtcttctttgttgtcagctgtatcacagcaactggtgtaatacacggcactggcatatacaagacaaacacttgtcagatgaataaaaatgcaaattccaggaggtagggggacacataactacatggaagttagaggtgaatagcatgcaagggggctaggaaataagtatagagacctatgtgagttggggaggtggcaagcagaggccagatcacaaaagctcttactgctcttctttggagttcggattttatcgtgagggtaggaaagtggcatcagatacatgctttaagagatcagtctggtttttttcccaccatgtgaaaacagaagatgccatctatgaatcagagtggcccctcaccagacaatctttccatccttcacaatgtgagatgtaaatttgttatttaaaaaaaaaaaaacaaaacaccactatggtttggaagattcctgtttcaaaaatggcaggttaagccccatatttataggctgtttgccacaaaactccattaaaatgacataagaaatagaaacaagtccacagcagcagaattctgagcatttctaaaagctacaaagtatataggattagaatgatatagaaacgaaaattgccaattcttatataaagtcaatgttctaaaaagtactactaggacagtggctcttaacttttgggaggggatggtggatataaacacctttggagaatacagtggaatctacattttctcagaataacaaaatacaacaaaattttgggtatacccaattttctcacacaacattttgggtataccatgtcatctggagcccccaccccctgaaatctaaacataactggcttgaaacctgtgacaattctagtcagtaaaagtctaaagctcttctcatgatttttactaattcacaagaattacaccctccagcacctagagttcaagccacctttcatgctctttgcattgtatatactggaaggaccagacaaaaatatggcagggcaccatatgccatatcaggagctgggcagtttctgccctcaaggaactcaagattaggcaaggaatgtgaaacaaaaaatgccaactatgtgccaggcagtatgctagatcctagggatactgcagtgagcaaggtaaatatggttccttggcctcagaactatagtccatacagagtgagataacccttaattatcagtgctcagaagtggagtcctatagggagtctcccaacctttttggcaccagggaccggtttcagggaagacaatctttccacaggagttggacagctggtttcagtatgattcaagctcattacatttcccattagattctcttaaggagtgagcaacctagatccttcacattcccagttcacaatagggtttgagctgtgagaagctaatatcacagctgatctgacaggagctcaggcggtactgctcactggcccaccgatcacctactgctgtgccgcccggttcctaacaggctgcagaccagtacaagggttggggacccctgttctaagaggatgcaaccagaaggctgcccagtctgcaagatcaaatgtttcctcaaagtaactttcaacgtataaccagaaagactgaaagacaaaaagtagttagcaaggccgggcacggtggcttacgcctgtaatccctgtactttgggaggctgagagagggcggatcacttgaggtcaggagtttgagaccagcttggccaacacagtgaaaccccatctctactaaaaattcaaaaattaaccgggcgtggtggctcatgctacttgggaggctgaggcaaaagaatcgctttaacccaggaggtggagattgcagtgaggttcatcctgggtcacagagctagactacgtctcaaaaaaaaaaaaaaaaaaaaaaaaaaaaagctaggttcctgagggacacaggaagtagtagaagttgtaaaggtcatgacgagatatgagtctgaagagcaggccattcaatgaaatacaacattcacatcaagtgaatcactcacatcgtcttggtgtggtggctcatgcctgtaatcccagcacttggggaggctgtggtgggaggattgcttgagcccaggagttccagaccagcttgggcaacacggcaagatccccgtctcaaaaaaaaaaaaaaatcactcacatcaagtgtacccaacagatatccattcccttcgtacatctgaacacatcttgatattaacggtcgcaagcaaaccctaatattttatatctctagaacaaatatagtatccccatttcacaatcgggaaaacagactcccagaagctaagtaacttgtttattgtcagacatctagtgagtcgcagagccagggaactgaccacgggcattttcaccccattacccttccagcttattgccgactgctcccgaagggagcgaaaaggacaggcaaagggtttcaccaaaccctttgtaatgggagattcttgccttcttacctttcctcacgtttgcttctctgccagaatgtcttcccgcactttccccagaacccaagttctcctaatcatctttcaagatccctttccctcaaccacagatgagccgtgcctatttctccttcaaatgactccctatggcttctagttggtagtcttttatttaccacctcatagtccttttatttatatcccataaatgatcgtccggccccgcaccgtgggaccaggacgctgcctcgaccatggcggtctcctggaaacaggctgctttgagccgaaactggtgaccgtttcccaaccccgtccaggagtccgacgcctcttttctccaggccaacttcaagtgaggtgtatcaactctatccgcacaaatttcttgccacgagagcagaagattatgatctctgatgctgccttagggctgaagacactcccaactcggcgacgcttagcaatcatcgacttcctcctcctcttggctgcctcggagatcctgttccggggcagaggtctccccgccccgcccctcgtctcctccaagatggcgagcggcggcagcggkggggtgtcagtacctgcgctgtggagtgaagtgaaccggtatggccagaacggcgacttcacscgcgctctcaagaccgtcaataagagtaagtgtcggggtgggcactggggcgggcccaggccggctggaggatgcggcctgtttccggcgcgcgaraccacctcgcgcgggaggcacgggaaggggagacccccgaaaccccccsgtctattgtccgcccggctcgggccctagcgcccggaagacgcaggtctcactcctcggcttcaccaggccagcctggggtscctggttgcttacagccacgtgtacttctstttttaccctccgcgggaagcgagggaaggttttaaagagaccgcagctcccggagtccatttcaaactgttttcttatttgactcctttgctgctttatttcacaaatattccaaagtgcctccttttcttcttcgtcttgagcgcagtgatcaggactctattgctgagggagcttgttctctttggccgctaaagggggaggaacctgcttgggacacgtagtttagaggctggtgctaaccaggtggaagctgtacgggttctacggggcgagaggaaagggctggatctggatgtcaggcctgtcattcccatagatgrgatctcttcagtgttattaagttaggaaatatgtgtgtggaagcaccaacacttgaaataatgtcggaagaaaagtttggcctgtttttttgccctgtaagggatgatttcggtttttaccgcctttggtgtgaggtttaattcatcatattcttttgttccttactacatacctggaatatggccatgctgcttaatgttctcggtggtgcgcagttcttctctactgaagatacagcctgtgcatgttagatttggaaatgtaattaccaaggcagggcttagctgttcagagtagcagtaacctaaaaggtgtgtcagtaacatgcaaagctatctaagtaattttcaacactctagtactgggttaacgtgaaaagtagtgattgtgcccacagtgcacttttggtgatttcagacattgaggaaaatagctacgaattagaattatttgatccctaaatttgtttgaattaactctagccttccaaccagtactgtatacttagtatagtattttgcaggaattctttaatcagcaaagattgtcaacttgtttaccagtatgttttcttaattggtagaaattcttgtgattctttgagaattggacttctgtagttgcacaggagcaagagtaactatgatcctggtcattttaacaccgaacagttgttagcgttgaaacttgccacctgagttcttccttatactttggtcatcttagttgaaaaggggaaattttaatgatttttggaaacgttgccagcaagataaattgcctttgtattatactttataagatttttccaaaatattcatttcatrttgtcagtaaccttattaaataggtaatgcttttctaatcattttgtagctaagaaaactgagatttggctgttaagtgatatgcccaatacctcaaagcatttagtggcaagcttgcaccaaacctaggtcatttgcttccaaattctacctgaactttttccctgtgaagtaatgaactatgtagaatgtagcatgcatttcaagatgaaatatctggagaaattgcttctttcttctttatttcactgcacttttttggtacatgtatattgggaatctttatctcattgaaaatttaatctataactctccttattgtcacttcttaagttaaaagcaaagattagttgttttctgggtttgttttgttttgttgctgtttcttccagttgttctgaccaattatttctgttgcaataaaagtagaaatttagctttcggagagacagggtgggaaaatttagtaaaaatgtgaaaaggaaatggatttaaaaatgacttttcctaaaattgttctctagtactacagatcaacaaagatgacgtaactgccctgcattgtaaagtggtatgccttatccagaatggaagtttcaaggaagctttgaatgtcatcaatactcacaccaaagtgttagccaagtaagtgattcagttagttgcttgtacagttattagaaacacttactatagctataatctcttccatgttttttcccaactatttgctgattttttttaacgtttttttccttcctttttttccccccttttgcttgtcaataatgtttctgaactggaaggaatactagtaacttctgtttttttcagccttagagagtttttttttttttttttaaccactgtgtttcctttgaaccgctaaggaggtgaaccatagagagttgtggggcataattatgagtcgttggaggatgtagcaagaataactcagtcgaagtttctttactgttatacctaggctccaaaaaaatatgtattgaaattaagtttgaagcatattaatgggatactggtttataaggtgcagaacaatatatattatacttccttttacaagaggaggaggatataaaaatttatatatgcatttgcctgtatttgcaaaacaaacagtataaagagaaacaatgaatagtcatttgtgggaggcctaagagggcggatcacgaggtcaggggtttgagaccagaccgascaatatggtgaaaccccatgtctactgaagatacaaaaaattagctgggtatggtggtgtgcacctgtattcccagttacttgggaggctgaggcaggagaatcacttgaacccaggaggcagaggctgcagtgagctgagatcgtgccattgcactccagcctgggtgacggggagactccgtctcaaaaaaaaaaaaaagtcatttgtaggaggtaataggaacaggttagatttgggtagcagtgggaataaagcctcttagtgtatctctttttctttttatatttgaggcgtataaatgtgttagagattaaaaattaattgtaaactttattaaaaataaaagggaaatagaggcaatgctgcttttctcctattaaatatgtttgctaaaattcagtctcttgattttgggctattttgtgagaaaagagacattttcaaaaacattttgtcaatgagtcttggataaaagttttttttttttttttttgggaggagtcttgctctgtcgcccaggctggtggaacctccaccttccgggttcacgcgattctcctgcctcagcctcccaagtagctgtgattacagatgtgcaccaccacgcccagctaatttttgtaattttagtagagacagggttttgccgtgttggccaggctggtcttgaactcctcacctcaagtgatctgcccaccttggcttcccaaagtgctgggattacaggcatgagccaccacacctggctcaaaaataaattttttgttaggtaagtaaataaaggacattagcctttgctttgataaatatttttcctcatggattatggttgaaacatcaacaatgaggtatcacattaatgtagatgaatttttaagtgtgtgtatgttagtagtgtttaccagttgtttgattacaggtacttcttttaagatttctagttactgtttctttgctaatcatttgtttcttaaacaagtttaaagaaatatggcttattgttttgttaatgaatttaagaaacttctaaaacaacccatttaacatccttcagattatctttgtatctaagacaattacttatttagcagatgaatgatttccttcttaaatgtttatttcaaaaggccaataattttaataacaatatccatgaaagagaggctagggaagttgatatatgcttaattatatgtttgattgatatacatttacaagctatctgatatttagacaagtctctaacctttgtcagttttctcatctgttatcaggactaaatccagtgtttagagtggtgttgtatataatgggtgcattgcattgttagataataatcagatactgtttttttttccttcttcagtaactctctctcctttgaaaaggcatattgcgagtacaggctgaacagaattgagaatgccttgaagacaatagaaagtgccaaccagcagacagacaaactgaaggagctttatggacaagtggtaattactgcttttaaatacatgttgacagtgatactgagtgagcatgactacctctagcaaggagcagggttgaggaaacccagcccatcctgatgctccacaaaactgaccaccaaaccagtccttaaggtttgaacataattcctcttcttgatcttcatacaaacagttgcatrtataatgtgctatgaacaaatgacttcctcaggtaatcagaaaatcaaagaaaatgaactaatctgtttaattttgacttttgagttagaaagatgaagcacattgagcttgtatattaaacagatttgaaatactatttcactaatattttactctaaggatgtcatgatagataagaatttagatgattctagcccatgaaattgtgaaaatattttaaagtattttgagacataaaattaaccctaatgtaaaatagggctgttaatgacaagaggacagaaatgtgtatcttacagctagcaaaaccctcttaaagtttttctttttttttttttttttttaatggagtctctctgtttcccaggctggagtgcagtggcactatctcggctcactgcagcctctgactcccaggttcaagcgattctcctgcctcagccttccaagtagctgtgattacaggcatgtgccaactcgtgcagctaatttttatattttttagtagagatggggttatgccatgttgcctaggctcgtctcaaactcccagcatcaagtgatttgcctgccttgacctcccaaagtactgggattacaggtgtaagccaccatgcctggcctcctcttaaagacttttaaatgtcaatttagggcaaataatgttgtattgaatgtattgtcctcaggaggtagtatggatttaataatacaaatgagttgaagatagatttggacaaattcatggattgtaggtctataaaaaacttttaaggtaaactggataactttagggtaaattctagcattttgaggttaaggacatcagcctgtgtcatacataatggactaattgacctagagtggcagttgttgttctttgagcacaacttgaatgaaatcagtaggaattctattgtgtctgcttgagactcacctgtgtgatagctggtttctgagaaagataaaatgaagattatagcgaactcctaggaaacattaagtctttttcttaacatttaattttgttcctattttagtaatcattttgtgttgtggaaaaatattttcattgtaattttagatctaggtaacagggttacctagacctatagaaaggtgttctttcacaacctatttaggcactttactaatttcaagaagaaaggtaaagaaaatcacttttcgcacttggggaggccaaggcgggcggatcatgaggtcaggagatcgagaccatcctggctaacatgatgaaaccccatctctactaaaaaatacaaaaaattagccaggtgtggtggcgggcgcctggtcccagctactcgggaggctgaggcgggagaatggcatgaacctgggaggcggagcttgcagtgagccgagatcgcgccactgcactccagcctgggtgacagagcgagactccatctcaaaaaaaaaaaaagaaaatcagttttctgggtcgggtgcggtggctcacgcctgtaatcccagcactttgggaggctgaggtgggcggatcacttgaggttgggagtttgagactagcctgaccatggagaaaccccatctctactaaaaatacaaaattagccaggcatggtggcgcacgtctgtaatctcagctactcgggaggctgaggcaggagaatctcttgaaccagggaggtggaggttgcagtgagccaagatcgcgccattgctctccagtctaggcaacaagagcgaaactccgtctcaaaaaaaaaagaaaaagaaaagaaagaaaatgacttttctcaactgaatcctgcctacagaaccacaatatagtgaaaattcattttaaaagtattttcaaaaagtaatttatttgaaagtatgactagtacrtggaactatttaaaaaytataaaacataaacagttgattgttcaygttatgctgaactaggattcctacttagtggttccaaaaaaggtttgcatgatattaaagacataacaccatatttgtctctgattttttacttgctatttattattcagttataccgtttggaacgctatgatgaatgcttagcagtgtatagagatctcgtccgaaactcccaagatgattatgatgaggagaggaaaacaaacctttcagcagttgttgcagctcaaagcaattgggaaaaagtggttccagtgagtatccttgtggtgtacccatacagtcatgaattattattcatatttagtatttaactggtattttgtcccctgacaggagaacctgggcctccaagaaggcacacatgagctgtgctacaacactgcatgtgcactgataggccaaggccagctgaaccaggccatgaaaatcctacaaaaagctgaaggttggaagtttgttaaacttatctgtaaatataaygtgcatataactttgtagagtatcttctaaaattgcatttgacttctgtgaaattattaaatggaagttattgatgcagtgacaatttctccaagttcctgtcgtctttctytctcttttttttttttatggagtgggacagaatcttaccctgttgcccaggctggagtacaatggcacgatctcggctcactgcaacctctgtctcccgagttcaagcaattctcctgcctcagcctcccgagtagctgggattataggtgcgcgtcaccacacccagctaatttttgtatgttwagtagaaatggggtttcaccatattggccaggctcatttcaccctccgcctcccaggttcaagcaattcttgtgcctcagcctcccaagtagctgggatcacaggcgcatgccagaaatgcccaactaatttttgtattttcagtagagatggttttcgccatgttggccaggctagtctcaaattcctgtcgtcaagtgatctgcctgccttggcctcctaaagtgctgggattacagccgtgagccactgtgcccagctgaagcttttaattaagaaaaaaattaatttattagagaactgtgtcaggtattaacgtgaacattttgactttgcttgtgcataaatttttccctggaagctataaaagtgmtgtaggtactgcagtgatcactggggtggaaaaaaaggtgaaacaaagtctgttttactgttaaatattaggggttaaaatgagatcacagtttactgtcaaatgttgaaagttaaaataagaacaaaggttagagcctcatgagaagaaaaatctgtttaagaattataatttttttggctgagtgcagtggctcacgcctataatcccagcacttttgggaggccaaggcaggaggattgcttgagcctagcagttcaagaccagcctgggtaatatagtaagccttcgtttttacaaaaaaaaaatatatatgtggccgagtgtggtggtacacacctgtattcccagctactctggtggctgaggcagcagggcctaggagggcctaggaggttgaggctccagtgagctgaaatcataccactgtattccagcctgggtgacagagtgagacgctgtctcaaaaaaaaaaaaaaaaaagaattataatttcctgacctcaagtgacccacccaccttgaccacccgaagtgctgggattacaagtgtgagccactgcacctggcagaattataatttcttgatcatacccaatgaagaacattctcatacattgtgggtttgaatgtaagagtaatacagacttttcagtgagcagttyggtgatgtgtagcagattttaaatttacctaccctttgatccaataatttcacttctagaaacttgaggaaatgattagataaatttacgtatgtgtctgtgtgaatgttcattgaaggaatattcataagaacagaaatttagaaacagcataaagttctgtactattaaaggattggctaaattttaccataaycacaaagtaattacagtcactacaaccaataacattaaaaaagatacagtaatgtagatctatgtttattgtaacaaagatatccacaggatattgaatggggaagggaggtttcaaaatagtatgcaccgtgtctcactttcattttaaaatgcagctgtgcatttacataaaactaagccaggtatggtggctcacagctatagtcccagctacttgggaggcggaggtgggagggtcacttgagcccagaatttcaaggctgcagtgagctatgattaagccactgcactccagcctgggcaacagagtgagacctccaactttaaaaacaaacaaaaaaaatattaaaaaactaaataactgaaatgctagtagtgtttatctctgggtggtaggattgtttatttttatacttttctataattgatttttcgcaattaatatttactacatttgtattttttaatgcactttacaaatatttttagcacagacacaacaaatgaaagmaaagtgccaaagagctgggaaagtcaagagactgataatatatatgtagtatatttgatgctaatgtaaatttcacaactgcttgttactacgattatcttggaatcttctgcttaggaatttagatcttgctctttggaatagtgaaagaaatgggatttacccagsaatactacttttaaaacaatttttctcctgtagatctttgccgccgttcattatcagaagacactgtaagtattccatcattgttaaacctaaattttacacttctgactatgatagattactgaggcttcattgtactatttattgactttttttagaagatggcaattcattaagtaggaatcacactagaaaccaccctctagtatcagttatttgatgaagtctactagagtgagaaatcacaatacaaaaaattttgacataaccttaagcacttgattatacatttatataatgtaaatttattcccccattttaggatgtaggactaaggtctttgaggactggtctgctcctaggagttccatgtatatttcttatgtagtgacataattcaacattcccaatttacacttttggtttttctttttaagtgtaacaatatcttaaatacagttggtaagcacttccattatagagtccttatgttttttttttgttgtttgttttttaccaatctcttaccattttttggctcacaactaattagacaataattttctttaggaatttacgtttaccgtatctttctgagtattcaacatgatttacattgaaatatgtctcttttcacattcatagttctctctctctctctctctttttttttttttttttttttgagacaggatcttgctgtttcacccaggctggattgctgtgatatgatcataggtcactgtaacctcaaactcctgggctcaagcaatcctctcaccacagcctcctgagtagcaccaccatgcccagctaattattttcttctttgtagagatgggggtctcgctgtgttgacaagtttggcttatctcaaactccaggcctcaagcgaccctcccacctcagcctcctaaagcactgagattacaggcgtgaaccaccatgcccagcccatagttcttctctttaatatttttaagttttatcatttcctcatcaaacacaactgcataatgggtttggaaacaaacatatctgactcctggtcagcagatactcaccaggtgagagcaggagtgttgggtcattaaaggactgttgtctcctagtcttgagtattcattgtacagccttttcagaaggaaaggagaaatgtggattaatctggagcatcggttaagagagctactactttaattacagaatttgttcaattacaggattaaagtacagaattagttccagcttttgaagtttttttgtatggtgttaattggaattttctagtttttgaggtagagttatggtagaatagagagaaaagcatttttaaatgtgatttttatgagaaaattatgtttccagaatttagggatatcattataaaaagatatacttccatgcttgttttttacttacgttttttaattcttgggctttagaggatgataatgatcaataaatggtagtcctaaacttgttaccatgttcttctaggatctttttgccttttcttttttttttttttttctttagatacttcttagaagttgaagtctttttgctgttttcacttaaacttctctcttgctggctgtttctaaagaactgactctaagggaaaatttctgaaattatgtgtcttcaggattgtatctcttttgaatgtttgggtcatttggaaaatatgtagatcagtttggaaaatttatatgggaaaaacatttctttctcttaggatgggactgaggaagacccacaggcagaactggccatcattcatggtcagatggcttatattctgcagcttcagggtcgaacagaggaggctttgcaactttacaatcaaataataaaactaaagtgagttattaaaaggaagtgtcttttataggggatggggttctttttaaaggtttgtttggttttgaytgttgcttgttgttcacagaccaacagatgtgggattactagctgtaattgcaaataacatcattaccattaacaaggtatggagtatttgtgctttccatagatatattttaccctgaaagctcatcaccctagttttagttttgttctaggatagcctaagtgttctttttaacatgatgaaaaaagtccagttgtagcaaaatcacaatggatagtattacttaactctcctaatgataatgatgctgcaaggtatactcaagtaataaaaccttttgtagtagaccctagactttaagatcctccccttttcccagcatctaatagtatagagactctctctttgtaagagatataaattattggggcttttaaacttttaagtatacgcatgttttatatgatttcttcgtctatggaatctgaatgtgaaagtgttctttatataattttctctcgggttttctttttttagggggtatggacaggtgctctttcttctcccccacaccccatcccatgtaaaatactataaatatatatataagcactcttaacttagagtactgtactaatgtcattagccaccattaggaacactcttttttgttttgttttttttgagaccgagtctcgctctgtcgcccggactggagtgcagtgacacgatctcggctcactgcaacctccgcctcccgcgttcacgccattctcctgcctcagcctcccaagtagctgggactacaggcacccgccaccatgcctgtctaatttttcgtatttttagtagagacggggtttcaccatgttagccaggatgttctcattctcccgacctcgtgatccgcccacctcagcctcccaaagtgctgggattacaggcgtgagccaccgtgcccggccaggaacactctaatrgaaaaagctttatttttctttctttctttttttttttttttttgagactgtcacccaggctggagggcagtggtgcagacatgactcactatagccccagacagtcctcccaagtasctgggaccacaggtacacaccaccatgcccggctaatttaaaaaaaaawttgtagagacagagtcttgccatgttgcccaggctggtctttaaactcctgggctcaacaaatcctcctgcctcagcctcccaaattgctgggattccaggggtgagcgaccacacccagcctggaaaaacatttcaaggtcacaattgaaatccaagtcagtggaaagtaagaaaagtaacatttgaacatacaatttatcttgatataccatgtgatttttcaagtaccaccttatttcttcctctcaataatctttttaggtggtagtccttatctctgtaggagtataatctgagactaaaagtagttaagtaatttgtataaggtcatagcctacttcataagaggaaaaacttggattcagattctagtttctgacttcaaagctttccccttctactacttagtggttcttctctcctgtggcagaaatgtagtgtatctttggatgtagataatggcattaaaaggggtagtaatcatgggaggttgctgttggccattggtatggtatagatttccaaacattgatactagcctttgaatcttggcaaaaatatatacctgcctatgtttatgaattttgaaatgcttgtcaggacaaatttttttttcccccaagatggagtctctgttgcccaggctggagtgcagtggcacaatctcggcttactgcagcctccacctcccgggttcaagtgattctcatgcctcagccacccgagtagctgggactacagtcacgtgccaccacacccggctaatttttgtatttttagtagagatggggtttcaccatgttgggcaggctggtctcaaactcctgatctcaagtgatcctcctgcctcagcctcccaaagtgttgggattataggcatgagccaccacacccagccaggacaaattctttttatctgacatacataattgtaggggaagagagcatgtgagatactaaatatctcagtctgaacataacttatacactgaactttctttagtcagtgggtatttctgactttttcaaaatagtactggatgcaataggtaatgaaaaatacaaagcatcatcacatagtttaaaatctctttctggtgttgaaaaaaattgttcatgtttaaattttttgtccgtatactttataactatatatttaatactacatttggtgaacggaaggatctctggtttggcaagtttgagctgacccttgaaggaggactgtggtttgaaggttaagcaacagcacaaaaaaaagtacatatgaagaaatatttatgatttgtaggggaaaagtgagaacacagaagagggtatgtatttgctggatagtttaaaaagtagattagattgaactatatcagggccttggaaatcaagtttaagaaaagtctggcagtgacgtgcacaattaattgaagtattaaaattgcgacatgagagaaccagctagaaaatacggtttctttaggattgatttatatgaaaggcagtttcttgctgtacattaaagtagtttcaaattggtttggagctcgacagtaagaaaaagtagaatttattttagatttttttcgcttcctttttgtctttaaactggtagaagacctggtttaaaaaagcacagtggtatcatgtatttgcaagtaaatacattgttttacaaagctagagtattgtgcacaaagtagatactcacatgctcagtttgtgcttctcaggatgcaatcagtgtgacttagttttctccctttttttggagatgtatgtgactttcaataattcttaataggactttctttgggcagataacactgtgcccccacatgggaattttagaaattgagcttctttatgcttttgcttggctaagaagaaggggctttaggaaaggaaaaacagtagatatgttacatgagtattttctgctaaaaaaaaaatgggttcaaaagtggtacagatatgtttctgaggtttcatgattgccttacagagtcactacaggcatacctcattttattgtgctttactttattacactttgtaagtttttcacatattgaaggtttgtggcaactctgtgttgagcatatctgttggctcctttttttttttttttttttttaagatggagtctcgctctcttgcccaggctggagtgcagtggtgggatctcagctcactgcaacctcccaggttcaagcagtgctcctgcctcagccttctgagtagctgggactagcgtgtgccaccacacccagctaatttttgtatttttagtagagatgggggtttcaccatgttggccaggctggtcccgaactcctgnnnnnnnnnnnnnnnnnnnnnnnnnnnnnnnnnnnnnnnnnnnnnnnnnnnnnnnnnnnnnnnnnnnnnnnnnnnnnnnnnnnnnnnnnnnnnnnnnnnnnnnnnnnnnnnnnnnnnnnnnnnnnnnnnnnnnnnnnnnnnnnnnnnnnnnnnnnnnnnnnnnnnnnnnnnnnnnnnnnnnnnnnnnnnnnnnnnnnnnnnnnnnnnnnnnnnnnnnnnnnnnnnnnnnnnnnnnnnnnnnnnnntgggcgaatcacgaggtcagaagatcgagaccatcctggctaacacggtgaaaccccatctctactaaaaatacaaaaaaaaaaaaattagccaggcatggtggcgggcacctgtagtcccagctactcgggagactgaggcaggagaatggcgtgaacccgtgaggcggagctggtagtgagctgagactgtgccactgctctccagcctgggtgacagagcgagactccatctcaaaaaaaaaaaaggtatgtacttgttttcagacataatgctgttgcacacttaatagacaacaatatagtgtaaacatagcttttatatgcactgggaaaccaaaaaatctgtgactccttctattgtaatatttgctttattgcggtagtctggaaccaaacacgaaatatctccaagatatttctgtattttgaagaggagtgagttactttttatttatcatctaaattctagagggcatagcttgtagaaattgccaagttaggtatttttgtagtcctaatacacttcaatttgtgctgtccctttttttccttcaaaaagctcaaaacaagcaattaatagtggaaaaataaaacaaatcttgttctccatttctttaaagcagttcacttgttaagcctttttatacctaggaagcctcctttgagaaggctttaaaaggagtgggggtagattctgggataactatatgtacatgagtagatttgaattgcagagattcaaaaagagtagatttgaattacttctgtgaatcaggataaatttatatgcatcttattagcttaggcaccccaatcaggtagatagattcaagctctcctgctgtatctatataaagttaatagaaaaaggaataagttgaaatctgagattctgttaatgrtagataaacttttctttgttaggaccaaaatgtctttgactccaagaagaaagtgaaattaaccaatgcggaaggagtagagtttaagctttccaagaaacaactacaagctatagaatttaacaaagctttacttgctatgtacacaaaccaggtgggtaattacctttggtgtcatggctaaaccttttgtaatatggtatatgaggagtaatagggatattagtctaatctttttatagtttttgtttgtattttgtcttcaactcataaatatatttttttgccttcctcaaaatattatatatattattggctgggcacaatggctcatgcctgtaatcctagcactttgggaggttgaagtgggcggaatgcctgagttcaagagttcgagaccagcctgagcaacatggtgaaaccctgtctctacatggtggtgtatgcctgtagtcccagctactctggagactgaggcacaagaattgtttgcagtgagctgagattgtgccacttcactccagcctgggcaacagagagagactgtctccaaaaagaaaaaaaaaaaagaaagaatattatgtgtcatagattttatttattaaacaagtaatttgcccaatttcttataagggtgtagggttgacaccttttaaggggaagaaaacagtattcacacctttaaatgagataactttctcattaccttatttctaatctgaattaagataaaatcatcaaagatgctagccatgattatagatttaagacccatctttcatttttgctgtgtataatcacatcaagttataaatgttaaggaagtcaattctaactccagtaagcattctaattctaattttatactgttttagagcagaagttttagtgggagacagagaagcagtaatttttttttttttttttttttttttgagatggagtctcgctctgtcgcccaggctggagtgcagtggtgccatctcggctcgctgcaacctctgcctcctgggttcacgctattctcctgcctcaccctcccgagtagctgggactacaggcgcccagcaccacgcctggctaatttacttgtatttttagtagagacggggtttcaccatgttagccaggatggtcttgatctcctgacctcgtgatctgcccacctcagcctctcaaagtcctgggattacaggcatgagccaccacgcccggccgagagacagtaatgtttttattatttagaactgagtcaagttattcttaataatgtagcaaaaaatacatatatgcattttgttgtttttgaagcaaatgcttatatttgatgtgtttgatttttttaaacagttctagaatttaggcatccaagtgaatgtttagaatttctcctttactaaagactcttagagctcatagattaaattcaataaatggaaaccattttcttacaagaaaaaattgagaatagatactgtaaactgattctcttaccctaggcagttctttggttaatatttgtttcaactgattttcccatgtttcttttctttctggtcatttagtgtttaatttcattaaccagtttatttttcttgtgggggttggatatcttctaggctgaacaatgccgcaaaatatctgccagtttacagtcccaaagtcccgagcatctcttacctgtgttaatccaagctgcccagctctgccgtgaaaagcagcacacaaaagcaatagagctgcttcaggtaaaataattacttgaatgaggtgtcagacatttgcagctttgtttcattttcattgygttgtaataacctactagcatgtaaatttaatgggaaaactaatcagaaatgtaccactacacaaatttcattgtcattttagttaactcttgggttacagagctttatataaatttctttgtgttatataaatttctataatgtaaatatttgttataaatgctgaagaatgctgttttgtttggagatctgtttaacctgagttaggggatcatttaggcatgtataattccagaacatacttaacctcttttgcaataatctgatctccagtgagttctactccagaacctcaattatggagatactgactttgtttttatcaacccaaaccagctattatattgcatatttaaatttcttgaatataaactacattggaaagttggacaggtacaattaggatcatcctgacagacaaaattgcctaacagggacactcagtgaagagacaccgccccttctctccccacagcaaaaaaaaaaaaaaaaaaaaatctatttagtaatctttattatagttgaccctttgtattcttgagttttgcatccaagaattcaaccagccatggattaaaaacattttgtgggggtcgccaggcgtagtggctgacgtctgtaatcccagcactttgggaggcccaatcaggcagatcatctgaggtcaggagttcaagaccagcctggccaacatgttgaaaccccatctctactaaaaatacaaaaaattagcctggcatggtggcgcattcctgtaattccaactacgtgggaggctgaggcaggagaatcacttgaacctggcaggcggagttgcagtgagccgagatcacgccactgcactccagcctgggtgacagagcaagactccgcctcagaaaaaaaaagcacattttgaggttggaaatgtatgactgcctctgtactgaacatatacaaactttaaaaatcattactccctagataatataacaactatacacataggatttacattgtattaggtattataagtaacctagcaatgatttaaaatgtataggagcatgtatgtaggttatacgcaaatactatacttttatataagggacttgagcatccttgggttttggaatcgggggtggttctggaagtaataccctgtggctgagggatgatggatttctctgttagtgacttacagaaaacttgacttcattgcacttacttttagagcatacctttaagaaaaaaagtgagtgttgaataaaaatttccccaagttaagattttgacctgcagccagaagtttaatgttttaaaactggatttaaaatcttatgtagctaagtaattgtaatgtatacaattagttgtgtaaattaaatgtgatttttttcccccaaactaaaaaaatttaggaattttcagatcagcatccagaaaatgcagctgaaattaagctgaccatggcacagttgaaaatttctcaaggtattatggttttcatcatgattaaaatattttaatgaaaacatgtttggaatgattaagcagttgtgaactatgtgattttaagtttttttgtgtaatagtaaagcataataattactgtttcaaacatgcagctagattgtatgatctccaacagatttagtagtgaggtagttgccccttttcgtggattattcctaaattattagaatgattcttaatctatgccttgaaagttctgaagcaaaggattcctctcttccaaaagaccatacatactactcaaattgcctgagtatgtcacatgcagaaatgcttatgtccgtcacttggtaatatttgtacgactactttgcatcatagttttcagaatttcttagcttggcccttcatccttacttcattttacactttgccacctatgtctttgggcttggggaaaggtaatagaatttaacgagaactgatgtgtttgaatcttaaaactgccaatgtttttgtctgtggttttcatctaactttgaatatctagagccatgttgcccagtttggtagtcactagccacatacagctattttaagtttaaattagttaaatgaaattttaaattcagttctttgattatgctagccacatcttagaagcttagtagctatatgcagccattggctacaatattggacagcacagatataggacatttatatcatcacaaaaagttctgtcgaacagctctggtatagaatgtggattttcaatggtggtgacaattcttcacaaaaatcttaaatattacagtggctgaaatgaaaattttatgagttgaaggaggggagttggcagttagggaaaaaatgtttaaaatgtccttagtagggcaataatgaaaataaggttgagacacactgctgatctccctcttatccaattctcacatttctttgctttccttgtctctttttccttctcctcagccctgtcttctcttccttgccctttacttgatctttcctcctatgtttagtttattttttcaaggattatttattatcttgaaattactgacaatctgtcatggttttttgtttgtttttaaagactgggaattttgagttattgaggtttgcagtgaatacaaaatcagaatttaacaccataggaaattttccattgcactcatgtctacagtaacatatttcaagrcctttagggaaggacccccaccttcaagttacagcccaaaaaagaagaaatagaactcaacagactgggagctgggagacttcttttctggtagcagctctgccattaactttctttgtgagcttaagcaaggtatattatttctttagaactcaatttccttatctctaaatgaacagagttcaccatccccaagaccccaaagtttatatgtttagcgatgttacaaaacatgagttatggttgctttcctaaggaaaagtagtgggaggaagtaaaatttcttgtatttttttttcataatatgtgttcttctatgtaatgctgattttgtttattctcctaaggtaatatttctaaagcatgtctaatattgagaagcatagaggagttaaagcataaaccaggcatggtgagttttaaaaattacaaaattgaaaagtagttgaattgataatttgtatgtctaatgtgtattcactttatttatatgtcgaatgtgtattcactttaaggtaggagtagtaattataatagtaatagttgtctggtataaatttaatttcattctctgctctggtattggtttcttattcagtcaaatgtgccaggcactatttaggccttatagtatcactgaaaaccaacctcaaataatctcagatctgtataggaatttcttagcctatatcattttcgtcagtgtgatttctttaaattagaacaatttcataattgtggccaacaaatttagtttttagttttctgattattcaaatattgcaggtttcaatcattaatacagctgtgaaagcatcttttccatagtagaaactaattctgtagtggtagtatgtgcatcttttggacaggggctgttttattcatgtttgcattctcatggcctctgtgcagttggcactcagtaaatgtaatatggtagtgctttcccttaaagattcatattttaaggatcgtgctataattactttaccttagagtcaaatacagtatatgactgaaaataaaatgtttctaatatttaatatatgaccaccttttacctttcaaggaatgtatccatttcatttaggttgctgactttattggcataaaagttcttcattttatttctttattgtccttttaatatctatagaacctctctcattcctgatattggttattcatgtatttttttctttttccctctgattagcctgtccagaggtttatcagttttactgattgttcttaaagatccagctttttgtttgtttcctttctatcctcatctcctactgctcagcatccccctccccctccactccagctatgtaggcctccttcctgtccctcagccacaccaggcaccctttttactggcttcaaacagctcatgccacatgggattcatcatgagagttcagccgctctatgtatgcctcactgatcatacacttaaatgtccagcagtgtcttattgtagaaacayttctaagggcttattctcaacttctgtacttaccaaaccatttgtgaactggcactgctttaaaggaaagttttattttacagatatctaccttcatatttggaaaacacggttgttcatggtatttctagaagtaaagttaactatgttctctaaagggagtagcttttatgataaatcaggtattagcggagagcctttatttgctatttcttcagcgttttttattttcaaaagcggtattctgggagtgaagggggagttcactaatttatacctttggctgtgtaggtatctgcattagttaccatgtatagccatgaagaagatattgatagtgccattgaggtcttcacacaagctatccagtggtatcaaaaccatcaggtaaataaatggagtaaaatgttatgagagcatgtttttacataaaaataaagatggagtagtgaaaaaattcaggcaaacaagtattacacgtcactattttaaaagtggaatactatttagattatcaaatgcatttttttagtataccagatccaaattaagttattagaaataagcaatggctgcaaaatagaaaaatagcacatttatatttattgaagctccttgctgtatgtgtacatgcatttgtgtatgtaatctcaagaaataataatagtacatgattgcatatttaagagatcgtcttaaatggctagagagcccatgggtggtagtaattagtacaacagtaatacatggaatagttgtttatcatgtctctatctagtaggaatatcttaatttccagtatggatctctgcatgggcagtatccaacttaaaattatacatacgctgtgcaggtggcatttatactgttagtactgttagcagtggagggktatcagtgctctgggaaagtattatattaaattaatgtttgagaactatggtggcatatctttaagatttgattattataggggaatgtttccagttgtagacactaaatagatataggttgttttccagattcatcaattggtgattacttgtacaattaataatttgtccacctgctttsctctacatgtgtggatgattttgttgtttcaggcattcagtgaaacttaagatgagggatstaatgcataggtgtatttcttaaaggtctaatgaatataactgcatgcacttgctagatatttaacttgaaactttttttttctttttattgaaactgtagccaaaatctcctgctcatttgtccttgataagagaagctgcaaacttcaaactcaaatatgggcggaagaaggaggcaattagtgacctrcaacagctgtggaagtaagctctgaaacgtggagttgtagaaataacacatttattgttgctacttgatatgagggagttacttgtttatattactttctccagttttataaacagttcaataattttcttatttcttcttttagacaaaatccaaaagatattcacaccctggcacagcttatttctgcttactcacttgtagatccagagaaagccaaagcgtatccttttgattgttattccttacagctcctcagtagcacaatagatctcttctgatatctgtgttttgaccagagctttttcaattgtaaactgcaactaacaaatcctccttttaactrgtaaaaccaaaaaatgagaatttattgatcagtgtgaytgaaaaatgcggcgatagatccaacttagggttcagtttcatccagaagcaaaaatgaagtcaaaagggtatggcctcttttcctccaggttcaagatcagcagcaaggtaaagaaaaagcatattttatgtgggtacttttgcatgattctgaaatgttattttcagattcaactacttaggtcacttgcttatctcaaatagttacctgataagcgaatttggtgcccttattgagcttggatcatatgtgctactctaaatcagagtgygttcccaaaactgaggtgggttggtggatgctaagcagtcacaagtcataaacttgatagttgttttggaatagagtttgtattaagccaccaccttgctccacatcactgtgttaaggaatagagaattagattatgactcctcatgttctcctttcagaatactgtatgtactatataattgatatgacttgttattgtatagaagatttaggaacattttttgcttttgttgaaggtcatcaagaaaagacagtcttccagtgtcaatagatacattggcaaacatatatatctatataaatgtgtgtgtttgtgtatattatgttcctgaactcctgttctatcacagtcttagtaaacacttgccatcgtcagatagtatgtctctaaaagtagatgttgaggctcttgaaaattctgctggtgctacatacattcggaagaagggtggaaaagttactggagatagtcaaccaaaggaacaagggtaatatttttcattgtaacgttctctaatgctgattttaaattagacaaggaataaaaaatacattctcatagaaatttcatgtgaataaagttctagttctctttgttccttttccatttctctcactgtgcccagctctttgtccttatttccttcccttttccctcagcccaaaattaacctctggtattaatttaatctattattccagaagtttttctttgtgtttacacacacagatggtttacaaatattttctttaaattggtttatttattactattttttttttatttgtttgtttgttgagacagagtcttgctctgtctcccaggctggagtacagtggcacagtcttggctcagtgcagcctccgcctcccgggttcaagcaattctgcctcagcctcccgagtagctgggactacaggctaatttttgtgcatttagtagagacagggtttcacccttttgaccaggttcgtcttgaactcctgacctcaagtgatctgcccacctcggcctcccaaagtgctgggcaccacgcccagttattttttacagaaggaggattgtattgtacttagtgtttcccaacttacttttatttaatgagttttagagatctttccacgtactaaaatgtggacctatttcatcctttttatgcataacactccataggctggatgtgccttcctttaccttttagttattgttgtacatttagtacatcatttagtatatgatttcttttgctgatttgaagaaaaggttagtcggcttcatctacttaaaagaagtcagattttgacttgtttcttccatcgtcatcttaaaaatatagttagcagagacctacagtaaaatgttttaagattttacttttgactcaggatgaatagagcatggaaaagataaaacatttccttagctttgtgacttttataagtttttgctacttyctccttttttgaatgccttttgaaatctaaatttttccctaacttaaaaaaaactcagcaacaatgactgatttctttctaacaaactctgcatttcataaaaagcattgttgttctcataataacttccaaaacttttaataaggaattggagtctcaaagaggttacattgttccgaattccatttcatcttacaattataaattcagtctgggttcttaaatggattttcaattaaagtatgtttactatttttttcttccccaaacagggttgagtaactactaaggacacgcagttccttctttagcctggcatagtggctctgtgttccagttactgggaggctgaggcgggatgattgcctgagcccaggagtttgaggctccagtgagcagtgattgcatcactgcaccccagcctgagtgacagagcaagacccccatctctaaaaataataagtttttaaaagtttttttaaataatctttgtttcttttgtttgtttgttttcttttttgagacggagtcttgctnnnnnnnnnnnnnnnnnnnnnnnnnnnnnnnnnnnnnnnnnnnnnnnnnnnnnnnnnnnnnnnnnnnnnnnnnnnnnnnnnnnnnnnnnnnnnnnnnnnnnnnnnnnnnnnnnnnnnnnnnnnnnnnnnnnnnnnnnnnnnnnnnnnnnnnnnnnnnnnnnnnnnnnnnnnnnnnnnnnnnnnnnnnnnnnnnnnnnnnnnnnnnnnnnnnnnnnnnnnnnnnnnnnnnnnnnnnnnnnnnnnnnnnnnnnnnnnnnnnnnnnnnnnnnnnnnnnnnnnnnnnnnnnnnnnnnnnnnnncaatcattaagatatacattgactttttaagcttttaagtttcagcacagtattttcattatgcattattaatgctctttattttatcttattagaagttagtattttgttatactaacttggatgcaaaggtttagtttcctttaacaatacactatgtgataggtttatgctaggtgttgaccagaaaataaatcatggtacttgctctcaaaagaacttgagccctgacatggtggtggctcatgcctgtaatcccagcactttgggaggccaaggcaggcggattacttgaggtcaggagttcgaaaccagcctggacaacatggtgaaacccccatctctactaaaaatacaaaaattagccgggcgtagtgacacatgtctataatcccagctatttgggaggctgaggcaggagaatcacttgaacccaggaggtggaggttgcagtgagccaagatctcaccactgcactccagcctgggtgaccgaatgagactctgtctaaaaaaaaggaacttgaatctagcagaaggaaatatatttaaacagtaattgcaataaagattgcacctgttgtgattgtacagggcatagaggagtacaccggagggaatagtcacttcttcctgaggacagtgggaagttaggaaaggcttcatggagaagatgattgtgttgactctgaggaagatgaggacgaggtaggcaaagggtgagctaaggcagagaaataagaaatagcagagaacccttgggaaattttagtatggctgtggagtataatttgtagggagacaatttagaatactattgcacactgggtaagagatgaaacactcaagtaagatacagtatgttgcatttcttatttggggtatcctgagagaacgttcacaattgaatgacttgtagaatgaatttttggtaggaattgttgtctcatctttttagttcactgtttcatatttctcgagttatatcacataagaatatatagagagatgtatttttatgtttttctcttttcactagagctttcagaatgctttttttttttttttgagacggagtcttgctccatcgctcaggctggagtgcagtggcgcaatctcgctcactgcagcctctgcctccctggttcaagtgattctcctgcctcagcctcccaagtagctgagattacaggcacgcactgccacacccaactaatttttgtatttttagtagagacggggttttactatgttgtccaggctggtctggaactcctgacctcaggtgatccacctgccttggcctcccatcgtgctgggattacagacgtgagccactgttcccagccactttcagaatgcttgacaattattttgaagtgttaatttttatgccctttttagtgccttttttggtcaatgtacttaatatagattttacttacataaaaaaattaataaactcacaggtttaaaatacaaaagataaaaaagtgtaagagtaagtaaaaagtcttccatccgtgtctacccacctccctcccagggccataaccaacgtaacttgttttgaatctccttccagagatattctttgcatgtatcttacctacacatgttcttctggcaaaaaatttattctctaaagtcttgccaaacatagagtaacttaccaagggattctaggtagtcatgcttgtgcaaattactttttacatagacttaatgtgtgccactgaaaaacttttttcagtgtaaacagaatctgttttcgaattgtcacctctgttttctaaactactttccaaaaattatagtatctgaagcttaattgactttaacctgaatcaaatcttaactaatttgttagctttggtaagctgataccaagtcttaaaccatgtttatgataagtgcccaactaactcttatagagcacttacttaatgctctatamatattttatcacaaagatggtaatgatttttttttctctttgtagacagggagatttgaaaaagaagaaaaagaaraagaagggtaaggcattaaaaaagtctttataaattttctccaaaataaatgtttgattttagccctatatagmaatatttggacataaatatactgccctcccttgtatctttgaaaactttttatcttgactatagctaacatttaattttattctattactttaaagatcgcaattcactagtttgcctaaattcaaatcgttgctccctcttttactctgtgactgtggacaggctatttaatatacctgccagagtttttcatatgtaaaatggaatatgatagtatatatcttgtagtattagatactacatgtaaagttcttagagtggtgcctggcacaaaagtaagcacttacacattttgatgtttctgctacacataactacaaaattccatcaaactagcttaagaaaatttactgtttataaagttggcagtctagaggaatgttagcatcaaggttggttgactcagtatttttacctctttgttctgctctccacaaaacagaatcccattagagtcatatgatgtatattgtaaacagtcagggccacatacttgtcatttatatccatcacaacaaagaagccctctccagacttggcaagtatttctcattaatctgattgggccaagcaggtcagtgtccagccttgaattattaaccagggaaataatgtgcattgattggcttggagtgtggctttaatctctggaaaaattgggtggcattaccgtgcttgattttacctagtcagatgttatccttggagccacccaagttcctgaggttttgaggaatctatcatataaatcaggttatttcttgattttgctctctgccgtcttaggatacaggtttcccaaggcttagctcagtttattattactcctccatctgttttccagctaccaaaattttattgacaatatcttttcttctgtcttcctttaatgtgttttattaccattttagtggagtttgaggaaggtacacaagctaatgtttgtatccatttcactatctttaactggaagtcttattggttcttttgtcacagtacttgaaaattggcaaacatttaatatttgttttgtgcattagtaatactgcaaggaaacagctgatgactgtaggtggtaataacctaaaattttactttcttttctatttttatagtttccagatgaatatttttttaaatttacaagtgatatatgctcattctaaaaacaaaggtagttgttatctatcattatagagtggcctaaagagtgtaaaattccctgcccaaaattcatgctcccggctgggcatggtggctcacgcctgtaatcccagcactttgggaggccaaggtgggtggatcatttgaggtcaggagttcgagaccagcctggccaacctggtgaaaccccatctctagtacaaatataaaaattagccgagcagtactcatgcgtgcctgtaatcccagctacttgggaggctgaggcaggagaatcgcctgaacccgggaggccaaggttgcagtgagttgagattgcgtcacggcactccagcctggtgacagagtgagaccctctccctgcccccaaaaaaagcatgctcccagagacaattacttaacttttttatgtgtgtttatatgtatatacagaatcaaacgtatcattaggtactcaaagtttttataaaattgttttgaacataatataatttgtttgttttaatcttctactttagactgaattgtgaagaacatttttccaaattaatagatgcacttcactttatttattttttattttattttatttatttatttttttttttttgagaccgcgtcttgctctgttgcccaggctggagtgcagtggcgctatctcggctcactgcaagctccacctcccaggttcatgccattctcctgcctcagcctcccaagtagctgggactgcaggcgtaccccaccacgcccagctaattttttgtatttttagtagagacggggtttcaccatgttagctaggatggtctcgatctcctcacctcgtgatctgcccacctcggcctcccaaagtgctgggattacaggcgtgagccactgcgcccggcctgcacttcagtttttaaccaattgaatagcttgctatagtttgggcatattataatgtaatcatcttcattgatagatatttaagttattttgccatcttaaagaatatcagcccacccataccttgccctatccatctttaaaaaaaaagaaaaggagtatcaccgagaatattctgttcttaactttgtatctcttgggtttctgcaggataaatttctagaagtctataaatttctaatggtactgccagattaaattgctttccacaaaggctataccagtatacacttcccctagtatagtgttggtgagtgcttctcaccatttcaccaacactgggtattactgcaagtctgatagagttttttacccttctcatttttaattagtgagggtgaacatctgttcagaagatgaatgactttcctttctcctagcctaccttaattataactgagtccatttttctttgagtggtttacatagtgatcagcaagaattctttctatattaaggatttttytccactcctctattatatagtttgtattttaaattttttcttagaaatatattttttactaaatgaagattttaacatttttttatagatgtatctgtgaagtytttttctttatggtctctgaatttttttgtcatgctgagaaatgaggccttttcccccttcaataaaattcaacaccccttcatgctaaaaactctcaataaactacgtattgatggaatgtatctcaaaataataataactatttatgacaagcccacagccaatatcatactgaatgagcaaaagctggaagcattccctttgaaaaccggcacaagacaaggatgccctctctcaccactcccattcaacataatgttggaagttctggccagggcaatcaggcaagagaaagaaataaaggatattcaaacaaaaaggaagtcaggttgtctctgtttgcagatgacatgattgtatatttagaaaaccccatcgtctcagcccaaaatctccttaagctgataagcaacttcagcaaagtctcaggacacaaaatcaatgtgcaaaaatcacaagctttcctgtacaccaatagtagacaagcagagagccaaatcatgagtgaactcccgttcacaattgctacaaaagaataaaatacctaggcatacaactaacaagggatgtgaaggacctcttcaaggagaactacaaaccactgctcaaggaaatgagagaggacacaaatggaagaacattccatgctcatggataggaagaatcaatatcgtgaaaatggccatactgcctaaagtaatttatagattcaatgctatctccatcaagctgccattgactttcttcacagaattagaaaaaaactactttaaatttcatatggaaccaaaaaagaacccatatagccaagacagtcctaagcagagaacaaagctggacgcatcatgctacctgacttcaaactattgttacaaggctacagtaaccaaaacagaatggtacgggtaccaaaacagatctgtagaccaatggaacagaatagaggcctcagaaataacaccacacatctacaaccatctgatctttgacaaacctgacaaaagcaatggggaaaggattctagccatatgcagaaaacaaactggaccccttccttacaccttatacaaaaattaactcaagatggattaaagacttaaacataagacctaaaaccataaaaaccctagaagaaaacctaggcaataccattcaggacataggcatgggcaagaacttcatgactaaaaccccaaaagcaatggcaacaaaagccaaaactgacaaatgggatctaattaaactaaagagcttctgcacagcaaaagaagctatcatcagagtaaacagccaacttacagaatgggagaaaatttttgcagtccatctgacaaagggctaatatccagaatcaacaaagaacttcaacaaatttacaagaaaaaaccccatcaaaaagtgggcaaaggatatgaacagacacttctcaaaactgccatttatgtggccaagaaacatgaaaaaaagctcatcatcactggtgattagagaaatgcaaatcaaaacaacaatgaaataccatctcataccagttagaatggcgatcattaaaaagtcaggaaacaacagatgctggagaggatgtggagaaataggaacactttaacattgttggtgggagtgtaaattagtttagccattgtggaagacagtgtggcaattcctcaaggacctagaaccagaaataccatttaacccagcagtcgcattactggatatatacccaaaggattataaatcattctgctataaagacacatgcacacttatgtttattgcagcagtattcacattagcaaagattggaaccaacccaaatgcccatcaatgatagagtggataaagaagatgtggcacatagacaccatcaatactatgcagccataaaaaacgatgagttcatatcctttgcagggacatggatgaagctttaaaaccatcagtctcagcaaactaacacaggaacagaaaaccaaacaccgcgtgttctcactcataagtgggagttgaacaatgagaacacatggacacagggaggggaatatcacacaccaggcctgtcggggggcggtgggaggctaggggagggatagcattgggagaaatacctaatgtagatgacgggttgatgggtgcagcaaaccaccatggcacatgtatacctatgtaacaaacctgcacgttctgcgcatgtatcccagaacttaaagtataataatttaaaaaaaaagaccatttcgcctgctagattatacaaactaaactttctcaaataaattcatttccattttaatgttatttattcccaggcttagagacatcgtttaaacaaactatcttgaaaatattatgacacatctctcatttctttataatcgttatgcaggaaaattgcctaagaattatgacccaaaagttaccccagatccagaaagatggctgccaatgcgagaacgttcttactaccggggaagaaagaagggtaaaaagaaggatcagattggaaaagggacccagggagcaactgcaggagcttcatctgaactgtaagttattgctccacaattgagggcacttagaacatacgttgtttctagattgactcaaggctattagtgagaatttgttaatataaagtatgagaaatgtgatgtatctttgataaatgtttatactacacttatgcaaatgaaagaaaatatattgcctttttagactagtttttcctttagtttttacaattcagtcaaatagttttaagtatttacaatataatcaaatatatattgtgaaatatatatagtaaaaactattataaaaactaaaagtctcaaggcaactaaatacactgagtcattcaactaaataaatatctagataaacagatgtaaataaataatatgactagaaagaagtgttagaagtattaatacgttttacatggtggatgacaggttattttaaaaaattttttctggccgggcgcagtggctcacgcctgtaatcccagcactttgggaggccaargcaggcagatcatttgaggttgctagttcgagaatagcttggccaatatggtgaaaccctgtctctactaaaaatacaaaaattagccgggtgtggtagtgcgcacctgtaatcccagctactcgggtggytgaggcaggagaatcacgtgaacccagaaggatcacgtgaacccaggaggtggatggaggttgcagtgagctgagatggtgccactgcattccagcctgagggacagagcaagactctgtctcaaaaaaataaaattttttattttctacgctttctaaaacttggcatgtgtaccatgttttacttttcttcaataaaaacagtgaaaatgttattcaaaagaaaagtcgatagggagttggggagcttaccttaaaagaagtagaaaatgtgtgggagattgttaagtgtgataagtaaaacccatgtacatacatttttatactcttccttcgttgaatatatgagtgaccaaaaatgatctgatgatttcagggatgccagtaaaactgtgagcagcccacccacctccccaagacctggcagtgctgcaacagtatctgcctctacaagtaacatcatacccccaagacaccagaaacctgcaggggctccagcaacaaaaaagaaacagcaacagaaaaagaagaaaggtggaaaaggtggctggtgatgagaatattcttgttgcaggctgtttttaaactagtgtcagtgacactaggaatataataaaggtaacacagcaagaagcacagaactactccctcttcatctccatattttcataatttcttgtgtttcaaataggraaacatcttcctcaaagtctgcctagtgagatayggcctactggttgcctcatagctttgtacagattatgaggactgaaaataattgggcatttacccatcttggtatctgttgtatcctttatctgtgtgtgctgatttgatcttttttcagtttcacataccttatctaaggtttcccaggatttaaacagaaactacttctatgatttcagctggagtctgaagatacttgtttmtgttcaartcccactttaaattatgtcttaggagactgaaagtgraatcttctgagcattcctraatatctgcttagaaatatcatgtgataaagagggaccttcttaatacactgatgttcttcactaaatggatggccacaagaaaaataaagtaaatgtcttaaataatttaaccataaattttctgtcatgtgatactggaatatgggatacttttcatgtttwtatatatatatatatgtatatatatatacwtatatatatatatataaacatgaaatatatatatatrgctcctttgtgccccatrtcattttcagattatrgtagcatgctgatacagcaccatgraagaactcaaggaaaatatatcaatgtaagaagttsactcttagaccyagtgttctgaggtcasatgggtttggactgyctcaatcagaaagattaatgactrttatcaagaacatgaacattggcttcctccatagagaagaaatcagtatctgagttgcataccaggcagtattaaaatctaacaggtctgtttggcccattgatagatactcaaatggtgtctccttctggttatggattttgaccattgattacctttctcaatgtaatgaagtattttacagtcaatttgtggtgtaaatgttgctcttgtctttccttgcttacaaactactttcacattgaacagctgtgagacagacatattgagatgcctgcccttgttagtattcattttatgctgcccaagatatcatttaatttagacttaacaagtatttccttgtgattatattactctgtccttgttaataaagtgctgctgtgtttgactctgaacatactaccaaaacttcttcaaagagttttttatgaaagactttcctcctttacaagaaagaaatggggtgctgcctttctgtttagtaaaagcagaatttgcagtggcatctaaagagatcttttttaaataaaaattatgtattgtggcataatcctttttttgagctctacagagaacagtcttttggtaatagtggcaggtatttattccttctgaatatataccccattataggaataactgttacttatttaggattccatcattgaaaattttgacccaaggcacagcagtgaaatttatagttctcaatttagttgtcattattgacaggcattggtattattagtcattgctaagcaactraaacttcatcagttcaaataagttttaattgtcaaatgaagtataaacacatgaactttctagaaatatttcctcttttggataggtctttaaccagttcatatatatactttgtcaaatatatggatgtgtatgtgtacatttataagaaccagtatggatacatccattcactgtggtacattttaaaataaaatattttagcagtgaatatggattaaggtgttttgggtgttggcattttatggaggacttcctggttagtataaccaagaattttcttttaagctgagtatcaaaattgtgtgtactgtccctcttagcaaacccataaaactaatctaatgggattgagagaaccccgtgtaaacttactgaaaattcatcttggtgtgtgtataaacagaagtaaacctttgaaaaagtcattaagcatagcaattccaatgctattgggaacagccaaccttaaatatcattgcatcactcaagccttctggaacctgctattcattgttccttacaagtctatttgaaacagatacaatgaaggaaaataagtttattacattgaaaaataattgtggccgggcacggtggctcgcacctgtaatcccagcactttgggaggccgaggcgggcagatcacctcaggtcagaagttcgagaccagcctgaccaacgtggagaaaccccatctctactaaaaatacaaaattagccaggcatggtggctcatgcctgtaatcccagctacgtgcgaggctgaggcaagagaatcgcttgaacctgggaggtagaggttgcagtgagctgagatcggaccactgcactccagcctgggcaacaagagtgaaactccgtctcaaaaaataattgtgctggacgggtgcggtggctcatgcctgtaatcccagcactttgggaggcccaatcaggcggattacctgaagtcaggagttcgagaccagcctggccaacatggtgaaactccgtctctactaaaaatacaaaaattagctgggcatggtggcacatgcctgtaatcccagctactcgggaggctgaggcaggagaattgcttgaacccgggaggtggaagttgtagtgagccgagattgtgtcactgcactccagcctggccgacagagcgagactgtctcaaaaaatatataattgtgctaaactgaaatatactaaagagttcagtttagcaagataaaaggaaccctccagatatttcttagccagtttgagaaacaataccacctttgaaaagcccttcgtgtgccttatttaccatttattagataattagaagtgactagactatttggttttggttttaatactgagcattactagcagctgtgatcctggcaggctatctccgaataattttttttaaagtgaaatacaggccgggcacggcggcttatgcctataatcccagcactttgggaggcagaggcggggaggatcacttgaggtcaggagtttgaaaccagtctggccaacatggtgaaaccccgtcgctactaaaaatacaaaaattagccgggcgtggtggcccacgcctgtaatcccagctacttgggagtctgaggcaggagaatcgcttgaatccgggaggcggaggttgctgtgagctgagatcgcaccactgcactccagcctgggtgacagagactccgtctcaaaaacaaaacaggaacttaaaacaatggaacccattcacgttcttctatttgtctttaataatcctgggtaatagtcaactaataatcctgggtagtagtctggagacactcctagcggagtttactcgggagagggcggagaaatacatgacatgagcagtacaggctcatggttgggagctgagggaaggctgagaatcctcccggaacctctggattctgacgccccaggggttcttcacacaggctggccggtctcgggattgaagccggagacgtcagacgctaaggttgcttagactgcggcccacgtggaaggctcttagccaccctgcctggcccgaggtaatcgcgctagggacgctttttctgcagcaatgatataccccgccgaactgtcccacgtcctggttgggacctcttggtttcgcttggctgggctcaatccatccgtacgcctccgcccttccctctttgcgaacccctgcgggttcagcgaatcggctgcaagaagccctgcatccgcgaggtaagcggcggttggcggcggtgccggggttggcagcgcccgcgggttgtctacgccgcggggcctacgtctctgtcgggcgtgcacctcgggagccacacctggggcccagagccaccgctcagcacgcgggcacgcggcgggagggaaggaaaccgcggcgctggggatggagagggggaaagtgaagaagaaagagaaggaaaaggagacgcaggaggagaaaatcggagaaaagggtagggaagagaaagtgaaaagaaaggaggtggagcagaaaattaaacaaaagcaagagaagcaggagaggagaaagggaaaagagaaagaggaaaagaggacaaagcaagggaaggagacaaacaaagagaaggaacaatttaagggacaagaagagaaaggggagaacaaggacagcaccttgacaaggaccccgctcgagccgctggtaagagacccagtgcccaggaccccttgccccaaggcttttgtcggccgttcagaccccagcgctgtctctgttacgtcggaggcccccgaccgcgtgggagcgaatggatctcaactgagggctatttacctatggatgaaagagatgcgccaaactttgaacgacccatccccttttcccgggccccctgcccaccctagcccttatcgctacccctgtgtcttaacctcagtcgggtctgttgttgagggacaagagatctcggtcttcatggggacatggggaacggcccctctactgcccttagatctgtccagcgcgcaacactagcgcacagaccacctgaccacatttagaaaccagccccgaaccctccccacacgcaggccctctttgcattgaatgcgttctttgtcagaaggggcagggttcctgaacgcaggaggtgtttggggacgctgcagttgttttcagaccaccagtaccatgaatggatggcggaaaagttttaactgacaggtcttagaaacttggcattatttgggtcagctgaatggtctctgtgctcctggagttcctgagctggctccttggcttagagctgcgctctggttctaaacaattatgaatgattaacacagttgtgtgtgtgtgtgtgtgtgtgtgtgtgtgtgtgtgtgtgtgtgtgttcttttttgagacagggtcttactctgcctctcaggctggagggatcctcccacctcagcctggcaccgcccccatctcccaacctcagtgactggcactacaggcacacgccaccatgtccagctaatttttgtatttttgtgcagagctggagtttcgccatgtagctcaggctgatctcaaactcctgggctccagcaatccgcccgcctcagcctcccaaagcgctgggattacaggcgtgagccaccacggattaacagagatttgatctctggtaaaacacagactacatagactcatatttggctaaaggaataacttttgacaaaaacggtgttcagaatcacattttgtgtctgaactgttttacaaattcagctttccttaggagaaggtaaatgtgaggaagcctgaatgcagaatttctaggtaggatgggcgtagggacagcaacgtggttggaaagggaactgatatttttgtttttgtttttttgagacagagtctggctctgtcgcccaggcttgagtacagtggcgtgatctcggctcactgcaacctccacctcccaggctcaagtcatcctcccacctcagcctcccaagtagctgggattacaggtgcacaccgccgtgcctagctaatttctgtatttttggtagagatggggtttcgccatgttgcccaggctggtcttcaactcctgagctcaagcgatccacccgcgttggcctcccaaagtgctgggattacaggcatgagccactgtgcccggcctgggaactgcttttaattcacactattttatagggcctaagatgacattagtttaggtaccactaagaaagaaaaaaaagccggcgcagtggctcacacctgtaatcccggcactttgggaggccaaggtgggtggatcacctgaggtcaggagttccagaacagcctagccaacatggcaaaaccccatctctactaaaaatacaaaaaaagtagctgggcatggtggcatgtgcctgtaatcccagctactcgggaggctgaggcaggaaaatcgcgtgaacctgggaggcagaggttgtagtgagccaagatcgtgccactgcactccacagagagagattctgtatcaaaaaaaaaaaaaaaaaattctcccaatcaaaatgtgacatactctcaattgtcaaagacattctaatttcagagatattaaaatgtggaatgtggggggaatatgtatcttagaatgaatgaagtatgttggggtaggctgaatagggcctctggtgaagactgacaggacacaatccactcttggctgccatttcttggtgccagtattgctttaaaacatgcaattttaagccatccaatgaagtctcccttgcccctcttccttaccttgacacactctcagaatgacatcataacatttagatgcaaatgaagggaatggagaagaggcagggatggaagacatctatgaaaatacaatttagtttaagagccatcaaagatttgctccaagaacaaatacgtacattttttctttttcttttttttttgagacagagtttcactcatgttgcccaggctggagtgcaatggcgcgatctcagctcattgcaacctccacctcccaggttcaagtgattgtcctgccttacttagcctccccagtagctgggattactggcattcgccaccacgcccggctaattttgtatttttactagagaccggatttcaccatgttggtcaggctggtctcgaactcctgacctcaggtgatccgccctccttggcctcccaaagtgctgggattacaggtaagagccaccgcaccggcctactttttttcaaattctgttattcactatatggccttcataaatcatgatctctgtacaagtctttattaggccagacctcaaaatatctcattttcacatagatgtttctaaaaagaaagtgggacagacattctaatgctgtttaagatcacttttttctagaaatctagtttaagtctaatgtcaacatttagagttcaagcagaacaaacagaaatgtatacgattattgttatttctaaaccagcgccattgaagacaattattagagttttttgtgcataagaaacttctttagtaggatctttgagaagtagaattgaattcctatgagcagtctggctatattgttgcttatttattattgtttatgttaaagtttacaccctggaaaccacctttcagagcaccctgtacgatcttcacaccagcctgcccttctgtccctcagtcatttgccataaaaattctaaggctaatacgttgatagaatgcttttttctttttctttttcttttttttgttttttttttttgggatggagtctgtatcacccaggctggagtgcagtggtgtcatctcagctcctgcaacctccacctcccgggttcaagcaattctcatgcctcagcctcccaagtagctgggattacaggcatatgccaccatgcccggctgatttttatatttttggtagagacagggttatgccgtgatagccaggctggttccaaactcttggcctcaagcgatccaccagcgtcagcctcctcaagtgctgggattacagatgagagccacgatgcctggactagaatgcttctttctaagtttacttcaagttcatcagtttagttttttttttgagacgttgtcttgctctgttgcccaggctggagtgcaatggcgtgatctcgggtcactgcaacctccgcctccaaggttcaagcaattctcctgcctcagcctcccagatagctgggattacaggca

SEQ ID NO: 97269 - DNA, 32779 bp, Homo sapiens
acctgcttgctgttttgcaagaaggcaagcttgctctcatttcagagattttacactatttcttctgcttagaatgttctttcttaaaaatcttgaaatagttgacttcttatcacttaagcctctattaaaatattgtattacaaatatcacacacatcatttctgatcaccctatcaataaaatggctactcttatccttaggtcactgcctaactcattaacctgtcatagtttcttcaaatcacttaccattaactgtttgtctgccactcctatcaaaaaaatgtatggtcttaaaaactcactactgtaatccaaatacctaaaacagtaccaggcatttaataataatagataaccctgtgctacacactgttttaagtgctttaaatgtactaattcagttaacccttatacaacaacttaaggtgacttctaaaccatattttataatcaagaaatcatctttaaaataattttcacatgagcaagattgttagtcttctatctcttttcccaagcatagagtacaaaacaggatttggactcaacatgccagatggtatgtattagctcctaataaagtgcccattattgactctgcatctttttctttactttaaaaagtattcaaatttcatgaaaaagtatagtttaaaaagtctcatcaaatttcattcaaatcacaactattcaatcatacaatactttaattactaaaaaagtattccaatttcctgaaaaagcatagttttaaaagtcccatcaaattccattcaaattacaactcttcaatcacacagtatttctccactgtctataaattacagaacaggaaatattttaatgagattacaatgaagtaatattctctagatgttattgtatgactaaagtgaaatattattcttcatcaactcctgcactatcaagaacttaaatacgtattattgtccaaaaatgaaagggttattttgcaagggcagcaaaatccttcttagtcctatcacctaaacctaaaacaactgagatttaaatattatccgaatgtagataaaaaaaatcacagaaaccctaattttaacttgagaggaactctttatatatatgtgtgtatatatacacacacatatacatatatacacacatatatatacacatatacacatatatatacatatacatatatacacatatatacacacacatatatatacacacatacatatatacatacacacacacacacacacacacacatataattctgcataggctgaatggtatcttcaaagagactacttgattatttgagaacaattaatggggaaaataagtttcagtttctatgagattcttacctatacaatgcatcatcgatttccacagatgctgttgacataatgggcaaatttttatttgtgctggaaaaaaaaacatggttattaaatattcacattttataatgtaatatttgattacttgtgtgatcagattcaccagttactaaaggttttcacaaaccaaacatatattttattaacaaccactttacttatattttttaaatggcctgaaattaaattatcggattgcttgttctatcctgtgtaaattttaagattacagagctcatcatcttttattctcagatctcaggtgttgttttatcactggtacataaatacatatatatatattttgttgttgttgttgtttgtttgtttgttttcttttttgagatgggagtctcactctgttaccgagactggagtgcagaggcacgatcttggcttactgcaacgtccacctcctggtttcagacgattttcatgcctcagcctcccaagtggctgggactacaagtgcacaccaccacatccaattaattttgtaattttagtagagatggggttttaccatgttggccaggctggtcttgaactactgacctcaagagatccacccgcctcagcgtcccaaagtgctaggattacaggcgtgggccactgtgcccgcctgtttggtacatatattctaatggatctgtatttcagcaattctgtaccatgaactttctctatatatacagtcttcccagataaactcattcaatcctattgatgaatatatattgattatattgaaacttatttctccacgtgtgatctttcctctgacctccagattgtatacaactgccaaaacaataactattctgatgtcttaactggtatcacaaacataacaaactccaaagagaattcaattacccctgcttaatctattcttcctgtctttcctaactcattttccgctaccatcatttactgggttgggcctgaaatctagggatcttcttgcttaaatcattccccagttttctccatctgagacctgttagctctaccttcataagatatctcaaacctgatcatttcttactatttcaatcagtacaatctcaagccaaaccatcatcacatttcacctgggctatttcaaagacctagctagtctccttatttccagtattgcccttcccctttattctccataaaacagtctaaatatcttaaaatgcagtcagaaattattccctgaatttggactacccttcagtggatttcctttactcttaaaacaaaattcaaacacctcactatgcttgagagggccaatgtgtcctgtctcccaattatctctccaatttcaactcccaccagtctccgttttcgcttactatcttcaagccacactgacttgtttgctgtttcgcaagaaggcaagcttgctctcatttcagagtttttacctatttcttctgcttagaatgttctttcttaaaatctcggaatagctgacttcttgtcacttaagcctctattaaaatattgtgtcacaaataccacacacctcattcctgatcaccctatcaataaaatggctactcttatccttaggttgctgcctaactcattaacctgtcagtttcttcaaatcacttaccgttaactgtctgccactactaccaaaaaaatgtatggtctgttaaaaactcactactgtattccaaatacctaaaacagtaccaggcatttaataataatagataaccctgtgctacatatttaagtgctttagatgtacttattcagttaacccttacaacaaccttgtccaaacagtgggcaagcactattgctatctccaacgaacagatggaaaaaagaggctgagggaggttaacttaaaatttgcccaaagtcacagagcaggcaaatggcactgccaggatctgaacccaggcagtctagctcttgactaccacacatactgcctactgtttctgatattagacataaaggaaacacttaaaaaaacctgttaaatgggatgggcgcggtggctcatgcttgtaatcccagcactttgggaggccaaggcaggcggaccacctgaagtcaggagttcgagaccagcctgaccaacgtggtgaaaccctgtctctactaaaaatacaaaaattagccagatgtagtagcaggcgcctgtattcccagctacttgggaggctgaggtgggagaatcgcttgaacccgggaggaggaggctgcagtgagccaagatcccaccactgtactccagcctgggtgacaagagcaagactctgtcaaaaaacaaacaaacaaaacaaaacaaaaaaaccctgttaaatgaataaattttaaaggaaaaaaactaatctaaatatgcaaatctgacaaagtatacttattatagtaacatattatttatagcagtgctcgtcccattttcacagcatggccttcaaaaaacgtatctgtactaaacactggcaagcagagataattcccaggtacagggaaccagtctggagcatttggagctgaaccactgtgagagctgagatcaatatactggcagaagtggaggccattcctagttctgagaagctctagttgtcaattaaaagattctaaaaacaatgcgatggcatcaaattcaggcttggaatccaactttctagtcctagcattgataaataagccaaagaatttgtaaacaaaggtaattaaaatgttatcatttatctcaccaaacactggcacatatcaaatgataccagcttctagctaattaaacggatagctattaaaaaaactgattccaattaccaaggcaaatcagaagatagctgtgttctaagagatcacctacctaataaaaaacacacacatacacaatataccctgtttgggcattgtaacaaaatataaaaattaacaaaatttgtttcttttctttttttttgagacagggtctctctctgtcacccagactggagtgcagtggcacgatctcggctcactgcagcctcgatctctctagactcaagcgatcctctcatcttagcctcccgagtagctgggactacaggcgtgcatcacctacgcccagctaatttttttgtattttgtagagacgcggtttcgccatgttgcccaggctagtctaagaactcctgagctcaagcgacccgcctgcttcgacctcccaaagcgctgggattgcaagcgtttgagccactgcgcccggccaaagttttttattatctactttcctatcattttatccctagtacactttcacttgctgttttccttgcatggcgggggcaataggcctggtgggtaaatctgaataaaaacgagaacagctgcagtctaactagctctgccacttaatggcgtgactggcccttttcagaaagttgtgcctcactggaatgtttcaaaaatatgtaaaaataatatgatctataagacaatcaaaaacgcttcaaataaggcgcgggttatattacataatatccctccactctggcagtgttggcaatggcagacaacaccatgaaactgaaagcatcccttcagtctgaaactggcgaaaaggctacaggtttacaaagtctcacatcagctgaaaataatacatccatcaattctatctttggcatggtgtattctgacagtggtggatagaatgtaaccacttgctttattaattatgagatgattgaaagaggaactactaaccaagaaattggtaaaggcctagcacaaatattttccccctaattttacaggggcgggaaagacctgaagaacttcaaaaccaagtgggaaataagaatgggtaacttgtgtatttttttttcctggctttttttttttccttcttccgaagtcaacaaaggcctcagggtgtccagattgctactgattcattcttaccaagttccttctggtaatagttttcaaaagaggatctcagtggaggtgcacagtggcgctcctagctttctttttacggaaaggaggaaaggtgcttggcaccagtcggggaagctcacgccaagtgaccgagaccagaactcgctctcgaccggagccccccaagtctggtgacttggaggaaggaggatcccgaatcccagccagaactgagaaagccctcaaaggtgcggaaaggggacttttccctcaggaaagccggcaacagcagaggccctagcccacgtcgccacacccactccgcgcgcgcccctcgcctcccagggccggctctgctcggccccgcggcctctcgggcgcccccagcccgccggaaagaaagaagcagaaacccggagcctgggtcccacccgcgacccctcaccttcgcccttctcgtcctctcacctgccagtcccccaggaagaacaggacgcctcttccccctgatgggcggccacaggctcggatccttccattgccgcctgagacaccgccgccggctactggaaggtaggaaggggcgggaccgtgggggggtcaaggggcgggcggagacgtcatcagagggggcgggcctggggaagctaggagcccggcagcgccttcccgtcaaccctaggggcgtcctggtttccggtttgggtgtggccgcatggcgtgctgtggtgcaggtggccgaagggggcgttactgttgcgactggcatccgcatccggcagatgtagatggaaccaaagtccagaagttacgcgtcacccttgctctacagccaaacatgcaggactctagtaacccgcgaaatgatgggatagcgttgcaaatccttaaaagagtcttaacggtaagaagaggaaacagctttattttataaataaactgaaggctgctaatagctccagattgtcagtgaggggataccacttaaagatgttayacatttaataaataattttgggagtccactacatgtgaggcgctgcctcagatttaatagaatcatgtgacttttagtgccatagatgtcgttagatcatccagtttggtcccttaaatttgtgggtaagggaaaggaacttccggtcagtgcaagtgacttggtcaaggttatagagctagtcactgttagattaccagaacacatatctaaaaagttctcatataattctttttcatttacttccgtgtcacctttcttagaaagcaaaaatgagttggacacaataacattaggatttgtctttcactaaataacactgtatatttgaataaacatctgcaggatttttaaaattagcatatactttgggtattatgtaattttctgtgatgtatcatatttttaattagaaatttttcctctcatatggagatgagggtccaggcaaaactgtattatccttcgtgccctctattctcttcaaaattgcacatcttaaaatacctggaagctttatgttgctcacctatagcattatccgtgttcctcaatccagttgtgaaccttttccacattaaaatgttcttgatctgtgttctattctttcaaggctctgctctagcactaagataatgctacaggactgaagataatgaaaaagattgaagaaagcagaaacagaacaaaaatcagattatttcaaagtttctttccttgtaaaggttaaaacagagcatacttccttattatgcccactaggttaactagaatctcctgtttttttaaaaaaaactggctcattttttcaaaatccactttaattacatggtgcttagcacaagcaactccattctggtttgatctgatggggcctagtgtagaaggctaggccaaaacaatggcctgccattacccacgcttcttcatattttaacatccatgaatagaggatgaatttttaaaaaataaatacagraaacgatgcatcttaaaattgagggcatgttagatttgataaaatatgktgtgaattatttcaggcatgtaacaagcaaccagatttaacagattttaatgttttgtcacatatgtaaaatgggaaagaaaactaggcgatcacagctttttgacagtgaggctttatgtcataagaaagtagaatgacatattgaggaaacttaagggaaaaatatgtaggccaaagattttacattcagcaaaactaatatacaaaaggtacaaactgttatcaacaattgatatatcaatttggtgagactagtgttttcatgagcccctccttaataattaattggagaaagtgtctgacaatcagaattattacagaaacattgatctaaggattgactcggtttctttacagcaaatcataatctgttgcatttattagcttttgtgtttcttgtagtttattctttattactaattctcctgagttctgtcacctcatttcygaggtttttctaattcagaatcaagttcttccatatcttttatcatttctctaatgtcatttagctagtttcaaaataataaattgttttgtagtgcatctttcaggcatgtttttattatctttgatgatgatgttatattccttattctcttcacataataactgcatggatttgaacttgatgctttttttgttgctcttttttttttttttttttttttttttgagacagagccttgctctgttgcccaggttggagtgcagtggcgggatcttggctcactgcaagttctgcctcccggattcacgccattctcctgcctcagcctcccgagtagctggaactacaggcacctgccaccacgcccggctaattttttgtatttttagtagagacggggtttcaccgtgttagccaggatggtctcgatctcctgacctcgtgatccaccccttggcctcccaaagtgctgggattacaggcgtgagttattgctcatttttatgtgaaattggtgttcctgaactaatatgagacaggcttcttagcccaataagcctaagtttatcaggaacaaaactgtattccaagaaagtcaggtatattagtctgttttcacactgctataaagaaatacccgagactgggtaatttataaaggaaagagatttagttgactcacagttccacatggctggggagtcctcaggaaacttaaatcatagcagaaggtgaaggagaagcaagacatatcttacacggtggcaggagagaagtgagatcgtgggaaaactgccacttttaaaaccatcagatctcatgagaactccctcattatcacaagaatagcatgggggaactgcccccataatctaatcacctcccaccaggtctctccttgcacacatgggaattaaaatttgaagtgagatttgggtggggacacagagcagaccatatcatcaggtttactggctcattgcaaggagggagcccacattccagaagaaccatggggtacctcaccaacagaggaagagatagatttattgtaggaatttggggaagtatggagtttagaaggaattgaaatgaagtagtgctttgatagactcaaaagaaagcaaggctgtttgtaaagaattctacactacatctaaactattactaatggcaaaaactgcaattacttttgcaccaacgtaatacaagatggacccagggttctgttttttggaaattgcaaagttctgcctctcagaagtagaaactatttctctgtgtcaatgtgactttagatattctagccaagagtgagatatttcaatcttaataataggatttaaacagcagagtttttgacaatcttttgatattgtcataaatgttctatgattttagagaaaagggcattgtgtgagtaaaaaatcagttactctaagggtgtgtgtgtgtgtgtttgagacattttaaagcatcttccagagagaaatagtattttctgttaatttcacagctggctttatttatgcctgttatcccatagctgatgaatggcaaagcagatttttactttcttattctatgcttatttgctttctcacaggttttgggaaaacttttctaatttcagagaattcccttttctgttgcttttgtgtaatgttcagcaatattatggttttatttcctttttaaattaatacatacataataagcatatatttatggggtattttgatatttgcgtacaaggtataatgataaaaccaaggtaattgtgatatccatcacctcaaacattgtttatttctttgtgttaggaacatttcacatcttgccttctagctattktgaaatatatgataaattattgttaactatagtcaccctctagtgctatcgaacactagaaattgtttcctctatctaattgtatttttgtacccattacgcaacctttttcatcctccttacccccaaccttcccagcctctggtaaccatcattctactctctactgccatgagatccacttttttagctctcacttatgagtgagaatatgtgctatttgtctttctatgcctggcatttcacttaacataatgacctccagttccatctatggtgcttcaaactacatgatttcatgtttttgtgtagatgacacatttttaaaatccattcatctgttgatggacacttagattgattccatatcttggctattgtgaatagtactgtaataaacatgggcrtgcagataccttttaaatttattgaattccgtttttggatgtatactcaggaatgggattgttggatcatgtggtagatctatttttagatttttgagaaacttccatactgtttttcatagtttctgtactaatttacgttcccaccagcaatgcactagtgttctccttttgccacatcctcaccagcatctgttattttctgcctttttggtaatagtaatcttaactraggtgagatgatgtcttattgtggttttgatttgcatttccctggtgactggtgatgttgagcattttttcatatgtctgttggccatttatatgtcttcttttgataaatgcctgtttagatcatttgcccattttaaaattggattatttgggggtttttgctatggagttgtttgagttccttatatattctgattattaatctcttgtatgagtagttttcaaatattttcttccattcactgggttgtctgttctctgtattgattgtttactttgctctacggaaggattttagcttgatgtaattccgtttgtctatttttgctttggttgcctgtacctttgaggtcttaccccaaaaatttttgctcagaccagtgtcctaaagtatgtcctcaatgttttcttctaggagtgtcataggttcaggtcttacaagtaaggctttaatgcattttgatttgatttttgcctatgatgagatatagcaatctaatttcatttttctgcatatggatattcagtttttcccagcaccatttattgaaaagactgtcctttccccactgaatgtctttaacacctttgttgaaaataagttraactttactgaatttgtttatcarcttcaagagtactttgatgaagcttttaggactttttaaaaagtgtaatatcatgttttctgcaaataggtacaatttcactttctcctttacagtttgaatgccttttgtttctctattctcyacatgttctctcctgtttcattgctctatgtgtatgtttttataccaataccataatcctttgtagtatattttgaagtctactgtgatgcctccagctttgttctttttgctcaggattgctatggctattcatggtcttttgtggttccatatgaacgctaggagttttttttctatttctgtgaagaatgtcattggaattttgatagtaattgcattgaatctgtggatgacttttggcattgtggtcatttaaaaaatatcaattcttccagtctgtgagcatgtgataccttttcattttttgtgtgtgacctcttcaatttccttaatcagtgtttcataattttccttataagaatttttcatctccttggttacatttatttctagggtgtattactccattttcacactgctgataaagacgtacctgagactgggcaatttacaaaagaaaggtttattggacttaccgttccgcatggctggggaggcctcacaatcatggtggaaggtgaaaggcacatcttacatggtagcagacaagagaagagaacttgtgcagggaaactccccttttaaaaaccatcagatctcatgagactcattcactatcactggacagtacaggaaagacctgctcccataattcaatcacctaccactggcttgctcccatgacaagtgggaattgtgggagttacaattcaagatgagatttgggtgaggacacagccaaaccatatcatagggtttctttttttgtaacttattgtaaataagattgctttcttgatttctgttttcactagtttcttgtagatatataaaaacactactcatttttgtatgttaattttgtatcctgcacyttactgagtttttttaaatcaattctaagagtattttgataaatctttaaaagctttctttatataagattatgttgtctgcaaacagggacaatttgactttcttctttacaatttgaatgccttttattctttctcttkcctaattgctctggttagaacttccagtactacactgaataagtgtggtgaaaatgaatatccatgtcttattttagttcttagaggaaaagctttcagcttttccccatttagcataatcttagccttgggtttatcatatatggcctttattgtgttatgttcttttaaacctagtctatacctagaagatttttattatgaagggtgttgcattttattaatacttttccaacaactattgaaatgattaagtcatggttttttttattttttggggggggtggggtaggttgggatggagtctcgctctgttgcccaggctggagtgcaatggcatgatctcggctcactgcaagctcctcctcccgggttccagcaattctcctgcctcagcctcccaagtagctgggactacaggcatgtgtcaccgcgtctggctaatttttgtacttttagtagagatggggtttcaccatgttggccaggctggtctcgaactcctgacctcaggtgatctgcctgccttggcctcccaaagtgctgggattacaggcatgagccactgcacccagtcaattaagtggtttttgtccttcgttttgttgatgtgatgtatcatgtttattgattttcatatgttaatccatccttgcatccctagggtaaattccacttgatcatggtgaataatctttttaatgtgctgctggattcagttcgctggtattttgttgaggatttttgcatctatgttcatcataggttttgtcctatagttttgtttttttgttgtgtccttgtctggttttggtattagggtatgctggtctcagaataagttgaaagaatcctctcctctttaatttgaagagtttgagaagaattgatattagttccttaaatgtttgatagtattcaacagtgaagccaccaggtcctaggcttttctttgatgggacactttttgttactaattcaatttaattacttgtagttggtctgtttgggtttcctatttgttcttsgttcaaacttggtaggtgtaaatgtccaggaatttatccattttcattaggcttgccaatttattggcatatagttattcataatagtctctaatgatcctttgtagttctgtggtatcagtggtaatgtctcctttttcatttctgatttttaaaatttgggtctttttttttttcttggttagcctacgtaattgttttttaatctcaatttgctttatttctgctctggttttatttattttcttctactagttttgaggttgttttgttcttgcttttctagttccttgaaatgcattgttaggtttatttgaagtctttctatttttttgatgcaggtgtttattgytataaatagcaatatattgctttttttcaatattcttttgctgtattccattggttttggtatcatatgtttttattttcatttgattcaagaaatttttagatttcctttctaatatctacattgatccattgatcattcaggagtatgttgtttaacttccatgcatttgtatagttttgaaagattttcttgttattgatttatagttttcattgtggacagaaaagatacttgatatgatttcaatttttttatattttttgagacttgttttgtggcctaacgtggtctattctggaaaattttccatgtgctgatgaaaagaatgtgcattytctgactgttggatgaaatgtgctataaatgtctattaggtccatttgatctgaagtgcagtttaaattaaatatttctttgttaatttttgtgtagatgatctgtcaaatgctaagagcaaggtgttgatatccccaacttttattgtattggagcctatctcttcctttatatgtaataatatttgctttaaatatcagggtgctccaatgttggatgcatatatatttacaattgttatgtcttctttctaaattgatccctttatcattatataataaccttgtctctttttgttgcttttgacttaaagactgctttattatataaaagtatagctattcctggtcacatttggtttccatttgcatgtggattagtcaattttcttactgctatgaagaaatacccaagattgggtaatttataaagaaatagaggtttaatggactcacagttccacatggttggggaggcctcacaatcatggcagaagttgaaggaggagcaagggcatatcttacatggcagcaggtaggagcacatatgcaggggaactgccctttatataaccatcagatttcatgagatgtattcactatcatgagaacagcatgggaaaaatcyatccaatgattcagttatctcccaccaggtccctcctgtgatacatggggattacggaagctacaattcaagatgagatttgggtggggacataaccaaaccatatcattccaactctggcccctcccaaacttcatgtcctcacattccaaaaccaatcaggccttcccagcagttcccccaaagtcttaacttatttcagcattaactcaaaagtccacagtccaaagtctcatctgagacaaggtaagtcccttctgcctatgagcctgtaaagtcaaaagccagttagttacttcctagatacaatggaggtacaggcattgggtaaatacacccatttcaaatggaagaaattggccgaaatgacagggctacaggcctcgtgcaagtccgaaatccagcggggccatatgggtctgcagcaacctcaattcttgcctcttcagaaaaaagaatttgactgaggggcataaggcagaaaaagagaccaaggtaagtttcagagcaggaataaaagtttattaaaaagctttagagcaggaaagaaagcaaagtatgcttggaagagacccaagtgggcactgagaaggtcaaatgcagtgtttaaccttgattctaggaccttataggctggccctccttcccatgtcttgcacccctttcccataattcttcccttaaggtgaaatgcctggatgtgcagtgccctcgttacacttgggaggtgagcacaagcagtgtgtttagaaagttgtttgtatgcccatttgaggctttcttcccttttctggtgttgtgcccccggaagctcatgttctaccattttgtctcttaatgcacatgcccgggaagttgcttctcactggcatctgcattcaatgaacactttagtgcaataggtgtggaccatcaggaaatggcctctccctggtgtcggatgccaatgttttatagttacagaacattttaaaatgtattatttttactccatactcctgaattattgagtattagcacagaaaggatgcttgaccatcatctaaatgttcaactcctttgtttcacagaggatgacccaaagacattaaatggcttgaataaattcacataattgtagatgcagagtcaagactagaacctagttttcttcctaatctagtgtttttctagtatattatgccagacatattatgttcaaaaactggaacatctgttttgtggctatcaaaaagattaggaaatactgagtcctgagatcaggccttcatgaacacagttggagagtagctgacctttcgcatttgaagactggcttctttgcccaaaggtattgtagtaacatttgaatgagttggaggcaactaattagaacccagagggaattccatcgtaaagaaaataaccctttcaataaatgtgaataattatctacttaaattatctataaattagaatatgtgtgccatacacaatgtttatatccccaccaaattcatatgttcaaacctaattcccagtgtcatgtgaggcctctgggacatgagagcttagagaactcccttgcctttttagccatgggcaggtgagaagacagctgtctgtaaattaggatgtgcaccctcattagacaccgaatctgccagtgccttaacctttaacttccsaaactccaaaactgtgagaaataagtttctgtcatttataagccacccagtctatggtagttttttttttaataaaatagctcttttttwattcactttgatttggatcattggaaatattcaacaataaataaaacagagcaggggatgaggaaaacaggatcttgctaacatcattcaratgcatcccaaccagtgctcagcttcacaacaacacggagagaggtaagggagaatagagagcaaattttaaaacaccaacagccaaacacacaagactgcacagaagaaaaagtgctcaagaaactttggttttgaagggaattcagtggagggaaacgactgtgtaggaggaagggaataaacccataatcaccctaagaggcaggggcttggacggggaggccctgatgcaggctatggttaaatctgacatcccggagctcagaacatgcaaccgatggcagttttgtactaggaagaagctgagtgatgaggctgggtgatggtatcacctgataggctgggagggagaacaggaggtgcaaaggcggctcactgtcagtaggaaattcagtgctctttkgataagaaaaaaaatcggtaatatcctaatcctgacaagctgagatgctgctttgcctgtctctgccttttcttctaagtcttcctccttttctttgcacaggtgtcaggtagcaccccaggggtgcaggagctggtgttttcatggcaaacaagaagagggaggttgactctatatcaaaactagctagcccagtccatggggcaggatgatcctggtggcatgcagtcacatttgctgcaaaccagatgttcatgatggatataatgatacccccagggcttttcataggggcgaggacaggtgctggttcctgatgacacatgcctggcatccagtgatctttagctggacggtggcccctcagggcgtgggcttccctgcataaagtagttttgatcctaaccaggtgagggagagtgagttcttttggtttctctgttacttgttttcagattacctcaaagcaaacatccctgttctaaatgttctctgtggttttattctacctttgccaagaagccagagtcacatccaggtgggactggcctctagcatggctttctggccacatcagagaatgggattccatcaaaacctctcaacaagccctttccctaaagaatcacccagatcttaactgccctctcccccttcttgactttttttttctattttacattctattttctcatatctggcttttctctctaagcctagccaaatgctttgctgaatgatgctaggactagccagagttttaaaaggcattcatccatttatgaactttcttccagcccaggatccctgcagagcaccggaggttacaaatctgccctcctttctcccctaaaaggtgactgaggggaggggaggggcatgtagctcagctatagcaaatcagtaccctgactcactggggagacccagggggctgggatgttgctgacacttcatgggccaccttgtcagcctatctttgtggcttcaggttcagctctgggtgctgcaggcagggacccgtctactccctgcctgagcccagggccggtctccaaggagctctctgcctgcagagtagaaagagccctaggctgggattcaggggcctgagggagcccctgccactgcctgcccagcaagagtgctcctcattctcctgctgacagcatgcatggtgccctttggctaacactcttgtctaattcccagccaccttcaccccagggttgcatttggtttaagccaaactggtgcatttagttctggccacaacaattggcttttattctgttaagtgcccattgctaagccaatgagacataagagatgtctgctgggcttcttttatgtctcataagagaaatgccatctcctgcactggagggtgtgagaaggcagagacaagagcttgcctagggccatgcaggcagcctgcggacacagctcagtgctgagagagcagaggagagtcagacacctccattctggttacactttttccagatgctgaatagagactcgctgggaaagcccgcctccagacaatttaaacatggtgccaggaacaccccrttgttgctgaaactctgacttgtgctatctgtcccagccagttcctgattgccagtcacttccctccttcgtactccaccaggaaaaggccacgcctccccatgcagcagtggccttttaggaaacgtgcttaacaggataggtggtttttctgattaaacatcagtaactagagtcaacaatcactgtcctcccatgcctggcactctccactccccacccaactgcaatgtggccttgcttttcttatcagtaaaatgggagagctggatttgggggctggaagatatctcacagcttgaccatcctagtggaacggagggagaccagacagagagcagacgaccgacccaggcagcatccggctcagacacagacatatcttcatttcaagggacctattcttactcaaagaaaacccagagaagtcgattgctcagcctgagccggtcatccctaaatggagtcagcttttaggagaagaggaagagttcaggagacagcatcgctctttgtatcagtgtttgactagccaatcaagaaacgtttgctgaattcttcatgtcatacatgtctgtgagctctgcccttcgaggatgtctgttgtgaatgatgactcagtgattaccagcctttatcagaaaaaaaaaaaagtcttaaagttttggaggatgttaaasctgaaacaggttttttgtttgtttgtttaacactttccacattctgaacccttgagaatctaataaaagctatggaacctctctccagaaaaatgctcatatgcagagattcagagaaaaaaacaaacttagcatgcaacttccagggactcttgtgaatggcctgaagcgacctttacccatgactggtgtccccaagctcctccctcccagtgtgcagagggggtttccctgagcctgggagcacaggccccatgcctccttcacactccaccaggaaaaggtcacacctcctcaaggcagcagtggccttttaagagatttttttttttttaaagaaaagtggtttttctgcttaaacattagtaactggagccaacaatcactgtccccaccatgcctgtcactcttcactccccacccagcagcaataaggtttcatagagttttggagactcctagcctgagaatgaattccagtccacagtgaggaagaaggaaggttgggttggaatgggaggatgctgtggacattccacaaaccatccaagccctagatacccccaatatcccaagtccaaggactcctacaaaccttccttaagcctccctatttcccagctgctgggtgaggcaagcttcattaaaacaccaggaccaccaacacaccaggaccaccaacagagccacagtgcaaacaatgtcaattgaatttttaaaaaatcaatcaataatcaggaagcctaacgaggaaaagagagtagttggggagcragaagatgaggtatgtgccagtcgccattcctgggatgtccctggcccagccccccagtgacagccccaaggtggccmgcagggacttgaccctgagctcaggcccttggggaaaatgctgctggaagcctcctgtgtggccttggtggttaagggcaccatattgagtagtctgagaaagaatgtatggtcccattctgacgcactgctagggggcgctgaatatcctcagagctttgttctaattcaggtgccagctcaggaaaccagaaaagatgtttccagctacggagcaagtggggccactggtggggatccctttccccaagtaggggcttttgccttatttcagccaatacgtgcttttcttccccaaatgcaaaggcatatggaagcggtcagatctgctcttgccacgattagagccatgagactgattatccaaaggaatagctgcttgggaagaggcatcttcaggagttagaaacatggtgccaagttttttgtttttttttccttttttctttctttcttttagagacagggtctcactctgggctggagtgcattggtgagatcacagctcactgcagccttgaactcctgggtacaagagatcctcccacctcagcctccctagtagctggggctacaagtgtgtgccaccatgcctggctaattttaaaaaaatattttatttttgtagagataggagtctcactatgttgtccaggctggtcttgaactcctgggctcaagggatcctcctgccttggcctcccaagttgttgggattacaggtgtgagccacggcacctggcctcaagtttctgtgaaaatctttggggtagaagcctctggtggcacttaaatgagctttgggaagaaggggatgacagggttatcacgccaagggagaggccaggcttcatgcaaagaagggcagcatctcacccccagcgcggataccgcccagcgtttctctgtgctggaggtaatcaccactcaagtttctctgccagtcttccttgggaaaccatgctgtctctcagaatatgggcgtcttccacatttgttccccaatcccaccccaggagccaaaatgattttaatatgtggaggttgaaccttttccagcrtctccccagccctggggcagcagtcgggggacgttgtccccacccaagacaggttttgagacatgctccgccatgataggtagtgaccttgctgagtagatgctgccaacggctgggtgcaagaggctgcaagtggcacttgggcacacacctgaggctgaccctccaagmtcccggatggactggctctggcaagatgctggggctggaaacgcagaggcatgatggtgcatccatcctcaacccttcactgtgtcatctccccttgaagatccggattttattcatgaagccaaggtggccgtcacgttagactcaaagcctgcatcgtgcacccccgtcttgtgaaaagacccygcagacaggttgttctcccagtagtggtgtcagttccctttgctatctgctcagaagctatacaagtctacctaatcgcagacatgcattgagaagatgaccgagaggatgcyggtgagtgggtaccgcctgtggctctgcagccagttgtcgaagacatacttgatgaaggctgggtggtagatcaggatcttatcctgtttcactctgatcttcacgaggaccggggtgtaggtgtgggaaatggcacccgtggtggtggtgctcaccacccactccaagttcatggtctttaagggcaccaggaccatgctgacattgtcccccagctcccggaagctctcagggtacaccagatggtgggcggttttgctcccggcagcagcttcaaaccctgccgtgggtgccttgttcatcctgagcataaaattgtgactctatcgcaggcctatatgacaattgcctcaggttgcccgagttgcccacgacagcacagtgccagcagcccaccgacctcttctccagcattgggtccacattcccaggtactgctctgaattccttgatggtattgttsatgatattgggcttcttctcctgctggagcctcagccaccattggtaggtgttgtcctccaagagcgyrttctgggcagtcagcagcagctgcactatctggttgaacctctcatcgaaccaggctgagagcccatgctgcctgatgcagtgggtgcaagtgcagggcctgtgcttgatcagtctcttcaggttctccaagagctccaggaccatcttcttggggaaccaggtggtggccaccatggcgtgggagtagttcaggaaggaggtgaggaagatgaagagcacgaggaaggtgagcactttcagggtcctcttccgcagggtcaccatcttcactgtcctgatggcgacctccctgcaatgggtggcaggaactccctccttttcagaaaataaagtagcctattcttctgcaatccttaaagagctgataacgtctcttgataaagctttaaccagtgatttccattcccatccgaagaagctaagaggtaattaacctctgtgacagtccaggctctctgaggagtgaggacyttgaaggaagggtcttggtatagcagggagggaagctrtctctgccgccctcctccgagtgtggtttctgatgatccttaattagggctttgtctttcatgctgtcaccagagacatggtgggttatatgacaagcttgatgaaggccacagaaggttggctgtcattggctgtgtgactttagtggagtctcttaacctctctgagcctcagtttcttcatctccataggctgagtgactgtccatctcaggtccccaaatggaattgtcctggcccaagctcaaagcatttgctcactgcagctcttgcagatgttaatttcctctcattgacatttccagttaaagaaggtaaaatctgaaaatggtaccagcatggctggagacacgctggagtttctgggatttgggcatgagggagtttggagtagataaaagggtgtgagtgtcccggatactcgcccccttcccagctcacatcgcttcttccttctctctccgctcctcttcctcctcctcctccctccagtttaggggtctttgtctttgcaaagcattgaaactgtctggcacagtgggctccactggcagagactggagccggggaagtggggaggcagggtgagggtgggagagggctcaggaataccttctcctggttgtagtgggagtgaaaggtggggtgactggggaggggccgccttccctggccaggggctgggagcagggtgtagtttgttatagcagcctaaatagactaagactatgtgcatatcacattttctaggaatatttttgaaaacttgcatgtagaacagtaagagaaattatcatagactaacaattgaaatataattctccaagacttaaaaaaaataaatattttaaattaaatctttaaacaataaagcataattattaatatytgattgttggaaagtatacacaacattttcccctttgtattaacataaatattagcttatgataacaatactcacttaaagtcctttaggcacttgggtatagaaaataaaatataattttactttactgctacttataagagagtaagcaaaattagatctggttactctattttcaacactgttagcattactgacctaagaaaaaaaatactcttaatgtatatgtctatataactttttaagttccatgatagttaaaatgggaaaaactttattgattgttaagatttcaaactccttttagtctgttcactgagatattaaatttcaggagacagaaaccaaagaaagatgaaatttctttttaggaggcttaaaggacacaaattctggtccaggttagaatgagtgtttggtgtctgttcccacccctagccatcacactgaatgctcccagcccagaatgctggtcactgtgtggccagcaaggcctgcatgtgctayagatgctgctcccagccaatgcagagtgctgcttgtagatgacagcatcagtctccctcatcagatctgaggataggatgccgccatcttaaaggacctctaaaattgcttcctggatggcgctctctgaatcatcaagatgaacaaggagttccttatacagatattgaatgttgttttgatgataagactatctatcagtgcttttgatgcatttcagccaggtgattaaggtggatgcagctgctattattatgttgttgaaaatgtcatctagatgtttttagagttcagggtaaatctcaatgaatttatctgcattaatcacatcaccagaggttttaaaaaatatatgtattaattttaaatcctataaaattaatacagaaaatataaatgattgggtcatttaactatatttttttaaataaactgaaagataaagaacacaacacttcacacattttatatttctcttacatactctggaatcatacacagttcttttctttttaaagcacaacattaaaacctttaaaaggcatttaagggtttggtcaagtgaatatgataaaacatacttgtctgtataaagagaaaatgaaattgtagtcactgttatgtactgacattagttacaacctagttttaattcttaaaacaattttgattagcaaagctaaaaaaaatggatgtttcagttaaatgttttaaagaggtacagatttttacaaggacataatataagttattgttctgtagaaatatcctattaaataytgtatgtccctccctctgtacactttgtaaagaaagtaaaatacataaaaagaaaatcatatagggatgtgtgacattattgtaattgtgtacttgagaataacgtgcaaaaataaaaatcagaatattttcctgttaaaaaaataataataataataattttgcatggaattaactaagtcagtygagaatattcttccagggtggtcagaatttgaggtatcagtattccctactacacttcctgtatctgtttgaccaacaggaccttgcagctagggagcacccagaggcaggacacaatggctgtcctcccacatgcctttgcagatgtcctttatcactgtctcagggtagctgtgaaactgcctttgggaggtgatggtgtcctttggcctcagcagcactttggacaggatggaaaaaagttttagacacatctgcaggtctctggctggctggagataggcattgggtgtggggaccaagtgttgtggcacttcttttacaacagagcctgagtgacaagtacgttgagctgcataagttctgcagagtacatagtccagtcgttgtgtgatgtggttgaccacatctgtgtatttcccacagaaatcctggctgacattgacttctccactgcaaccatcgagttcattgtctcctaaaccttgccatggaggcctgtggcacctgagccagccattatcatcaccagcacttccatgagctacaagctggacccactgcagtcctcctgacacactgaaatcagagcctgcacacaragcagcagatgcttcaatgtaaaggtcatttccaggtccttgacaggcgtgcatctgggccagatccatggcaataaccttcaggttgaggctagagggcttcagatgggcagcttcgaatgacaggagcaaggcacaagaggccggaaagggagggtgacattttcagcatctataagatcaactttagaaacatttgggggttgacaaattcccatcaagctctgtggatcttgtacaactgctcaccaccggcttctcatcagcacatgattggtgcagggttctgaggatgattttgagatgttccctgatgtggtcttgtgaggagatttcatgacagatggcaggaagcttcgtggagagatttctgaagacactcctgagctcccaacaccgggcaactctcttccagaggatagtggggtggagggtagaagagaggcaaagtcaggtttgtccttcggatccccttcattctccttttgccaccgtaaaccaacttttgcttacagttagacaccagttttcggcagatgaaatccctctgatttcaggcattttgtcaattaagctgctcagcaacaataggataaacttatgaaaagaaaggagtagcagtcccacagacaaagcatccagcccctgcactgagacagtatagggaagggacttggtcctggcagacaggacagataatcaacatcctagtgggcctyacacatgtgggcatattcttttccataccttcttgtctgttttaacaagctaaccccagtcacagtagcagagagagggtccatcctaacttagctgaccaggctggattcctaatcataaaaccaaaaaaggaagaacctaaccatttctctctttcagctatgtgttccaagattactgaagcaggattctggccttcctgataagaacatgaccagatccagctggtttgcaacaagatgaacttcagtgctgagctttcaccaagtttttctcactacaatctcattgtaatactaaaatctccacccaagatggaggttatctgccattttctgtacatgtgttaccagaaaggggtcctgatccagaccccaaaagagggttcttggatctcacgcaacaaagagttcggggcgagtccatagagtaaagtgaaagcaagttcatcaagaaagcaaaggaataaagaatgcctactccataggcagagcagtggctttggctgctcagctgcttgtacttgttacttcttgagtatatgctaaacaagggattgattactccttgtttagcagttttctgggaaaggagtgggcaattcccagaactgagggttcctcccctttttagaccatatagggtgacttcctgatgttgccatggcatttgtaaactgtcatggcgctagtgggagtgtcttttagcatgctaatgcatgagcagtgaggatgacccgaggtcatttttgttaccatcttggttttggtgggttttggctggttttggccggcttctttaccacttctttttatcagcaaggtctttgtgacctgtacttagtgccgacttcctgtctcatcctgtgagtaagaatgcctaatctctcaggaatgcagcccagtaggtctcaaccttattttacccagcccccattcaagatggagtgactctggttcaaatgcctctgacacatgtgcctcatgtttgggcatgagacctcactgtgtaggtgcagagaagaccctgcctaaacattgcctacacgttgctcctttttcctgcctcaacttccttaaaatgacaagagcagagcccttttgggagctaacatcaggactccttttctgtactctgctccgttgtgctgctagagccacaagcctattaaactttgcctgaaataaattcctatttgcgctggtgttaatttttacttatgagtgagccaagaactcaggccagagttgcggtaacaccaccagaagaggtctccgcttgtcagacttgagggatatcatcaatgagcctctgagctaatggtgtaaaccaaaaataaaattctaagccccccgccagccaaaccatctgaatggacttcctcctcagccagggtgctcttaaaatttaacctgagagactggttcaggtcatgatgggaagtaggggttggacatgcctcattatacctctccagcattaacatcaacataaaccctaagtctaagaaatttttacaacctattctctctgaagctgactaccttggaggcttcatctgtttcataaaattttggtctccacaacctcttacttcaacccagatatttcctttctattgatcccaggtctttagataaacttaaccaattgtcaaccaaaaaatttttaaatctgcctataaactggaagctccgcactccgctcccctcccctccccgcccttcgagttgtcctgcctttctggacagaaccaatgtatttcttaaatgtacttgaagtctcatgtctccctaaaatgtataaaacccagctgctccctgaccaccttgggtacatgttttcagggtctcctgagggctgtgtcatgggttatagtcactcaaatttggcttagaataaatctctccaaatattttacaaagtttgactcttttcttcgataacggaaacacatgatgcctagatagggagtgaactaagtgtctcctaaggtcactgccaggtgggacagctgcagagtgtcctgcacagcaccttgcagacctcccatggctgcctgctctgtagggcctcaggagggctgcatggcatgctgcaggcctaggcccagcaggtgtgcagccagagtgctgcactctctgctggtgacaaagaagaaattacttaggccaatagtaagggtatgggagtcctcagtaaggcttttcttttaacgaaaagcagccgcaaatcattttctaacaaagggcagcctgtaaagttgaactgcagacacagacaagcaagttgggagcttgcaggggtgaatgctggcaggaactagggactagatacgttcaagatggcggttccatcttcccttctctgccagccagtgtacagtaaggaacagacaagatggcgctgggatcaactggaaagtccatttgcataataagattagggtggggaaaccagcctttctcactcgcaatgtaaaagtcatacctgatcgaaccaatctgtgagccctatgtaaatcagacactgcctcctcaaacctgactgaaaaatcaggtgcgttggccaaccagccagccctttcagctcagagacccctctctctataaagagagctgtttctctttcttttctcttctgcctattaaacctcctctccaaacttcctggtgtgtgtccgtgttctaaattttcctggcatgcaatgacgagctccaggatatatatcccagacaatgtagctgctttactgggtcagccaggcagagcagcaggcagggcagctgcaggcgtgcccaggggcactgggtggcgctctggcctcactgcctctcccagcgagtgatagcagcccagcttgcagatggcctccagctgaggcatccagcacttggggcgtcactcagctctgcggcctccgctgcttgggaccagcctgcggccgacaccactatcttcctactttattgtttgacttaactacttaagcaacagtgactggagacaaaatataataacttcaaaatataataataaatgtgtataaaataaaatgactttctaggctttatggtataaatgcatcaggatctgcctgctaatgcagctagactgtagtatgtaagaggaagagtgttcaaaataaaactagagaggagcctaaataaaactagagagttcaaaataaaactagagaggagccaaaataaaaagagtgttcaaaataaaactagagaggagccgagttacttgggaatttgtaaatacaacaggtatttcaggttcaagttcagggatgatagcctttccttcttaagcctattcttttttttttttttttttttttagacggaatctcactctgttgcccaggctggagtgcagtggtgagatcttggctcgctgcaacctctgcctccaagattcaattgattctcctgcctcagcttcctgagtagctgggattacaggtgccctccatggatctcagataatttttgtacttttagtataggggggtttcaccatgttcgctaggctggcttgaactcctgatcaagtgatccacctgtctgggcctccccaagtgctgggattacaggtgtgagccaccacactgagccttaagcttattctttctgtcatctctctccatacacactcatgcatacacacatctatatgtcattctgtttgttaaagcctttactttcatggatgaaaatagaaaaaaatttgtaggtacacaagagttatgcaggagcaatcacatttgaaagtaaagacaatctaatcagacactgatgacttaagttaaagataaactgtgctaagatgtggcaagttaaagggaatagacaacttatatttctctccttctttccctgatcctctgaaatccacattgccttataatctttccctaggccatccatgcttctgaatactccccttctttcatctcttcacccttatacacagtgaacaaaggcactcttggcatgaccaacttgcggtctaggcaagtccaggcttcagctatgactgcagtattgctccatgagcacacaactgcatttactttggcagtctctactagaactgcagtgggacactgataattgattccaaccttgaagccagagaggcacagatctgcaaatttgtcttgatggtggcaatgcagccttcatatttgtggaaaccatattacgctgatatagtaataatgtattattaccataatactatacaataggtagtgagccatacatttatcatttcaagtgtcacatatcatctggttggctagctcagagcaagcattagttatctctgctacagaaaatgtttgtggtaggttttcccagcagagatagctggatatatacacggagggaagtagacataaagatagagaataagtataaaattttgatatattgacattcaaggcaccatgaaatctgagagaaacaatgatggagaatacacactggttgaaaatgtgcttaaggttattgtgtattgggtgctcaatattaaggtttctacataaatattatagatggcctcattatctaatatgaagacacaatcaaagtgctaaagagttgatggaattgaagacctcagcttcagctaaggaaagctaaggagctgggtaaatggagaattttgctcctataatcaactgatagagattctatcaacagaaaggcaaataaaaactgtagttaccaccaaccagcaaaaattcaagaaagcctgaagacctgtacttaagtcagctagcttctgaatccaatccaacacttagtcaatgctttccttttcaacggtgtagtgactagaggcaaagctatttgatgcatcttctttgctagtgatcgcttcctaaggcaaacttcatcaccacgtattggctctaggtccacaaacaattttgtggagccatgcttgaccacaatagtcccgttgaagaaggtattaaaggagtcatcttctctcagaatgctcttattgtttggcattggatttgggctaaattttgtattccaggcattagagctcctaccagttatttacattatttacaatctggataataccctcactgatgtaattagggatgctttaatgcatagtggcagggataggaagtaaagatgtgagagcaaatattaagtccaggttatcatctccgactaactgagaatcaaagtatctatttttatgaagcagtgaaatgacagttttagtatgccaagaggtaaacactactcagaaaagttttcctacatgttctttattatcaaataaagataataataataataataataataataatttaaaaattacctgcatgaattcttagccctctgctggtgagattctgtcgttatttctatgtcttgggaaattgaagatgaaggaaataggtaataaatagattttacaccataaagttttgtggatagatctgatgaatgctttaaatgccagatggtcccattacttttattacttccactggacagaaatgatggacattgatgacacctaattgcaaactctatttagttgctgaaagtgtgacagacaccatacaccttgtttcttaatagatctcctttcttcttgctaacgggaccccacttttgttcagatatagtgctgccatgagcttcatggcaggctgtttttccctagctctgcacactgagttatgactgtgaaactgtccctatcaactgcataaaattagccagggaagaagggaaggagagaaacaaaaacgaaccaagcttgtagcacattcagcattaatcattaggtcagcttgctgtctgacctgcttcctcatggttgtttcctgcctattgccccagaatcacgtagaccctgtcacaagattatagttcccctagataacatcttaagcattgtgaagcttttatccatttgagatattctttcaagtcccgcataccggtgaaactactgatgtgaaactactgatgccagcaggtctgaaggaccccatgaggtgctgactcagcaaagaatgcagtttccacatcctgatgatttcatctctcttctcctgacccatcagcaacctcaattttccagcccctggctgtccacaaccccttaaaaacgtcagcccagaactctcatggagatggatttgagggtttttcccatgtccttgctcagctgccctgtaatcattaaactctctgctgctaactctgctgtctcagtgtattggtctgttattgcatagcaggcatatgaacctggtggtcctgtaacaattggtctaaaataatcataatctcaatccactcaaaagtggattggcttagacattgacatatgagacaattctgagtaatagaattactcagtgagggatagtctttcagatgggtgactaaagaagattcttccttttgataagaacagacacattaaggaaatattcttttttgtgtctttgggcttgttctatgagggagtgacacttgcagctgttacaggtttctcctgaacattatggagaagcctgagatcaaaagctgacagagtgaatatgctgaagtcctaaattcactggagttctgaatcaactcaccctgggattgactgttacgtgaaatagtaaatgtcattttgcttaagtcatttttagttgtgttttcagttacttgtagcttaaagcattctaactgataaaggtagtatttttctctatt

SEQ ID NO: 97270 - DNA, 23522 bp, Homo sapiens
acctagtataaaatagaactgcacattgcctttgatctggtagtattacttttgggattctacatctatagaacggaagccaaagcatataaaacacagcattgtttgtaggtaacaaagtgccatggtggtgggggtaaaggccgaatgaattattgtacaatcaaccaatgagattctttgcagtttaaaaatgaagaatagatggatctatgtatgttcaatatacagttaagtttaaaaaaaaaaaaaaaaaaaaaaaaaaaaaaaagcagatcattgccccggagtggtggatcatgtctgtaatcccagcactttgggagcctaaggcaagaggatcacttgagaccaggatttcaagatgagcccatctctattaaaaaaaaaaaagaaagttatatctgaatgacagttacaagtaactttaacttattgtgcttttgggtgattcccaaatactacaagtgactgtgaatattttctttaaaaatatttcaaaaatacttaaatttaatattcaataaatattgaaaaatacttcagattggtatcacccgagttatcaaattagatgtttatgccaaagtataacttaaccatagccacattttatccaattcagatttttaagcataacatgacaaaataactaatatttatgaatacaatcttcacatcaaaaaaaaaaaaaaaaactagccgggtacaatggctcatatctgtaattccaaccctttgggaggctgagacagcaggactgcttaagcccaggagttcaggaccagcctaggcaacaaaatgagaccctatctctacaaaatataaaaaaattagctgggtatggtggcgcatgcctatagtccccacgacttgggaggctgaagtgggaggattgcttgagcctgggaggttgacgctgtagtgagccacgatcacagattgccaggtcgtattcctagaggttctgacgcagtaggtctagggaagtgtctgagaacatgcacttcaacaaatttccaggtgatgttgatgctgcagtccaggaaccacacttgagaaccaccgctttagcttaataaaaagtagcacatgcatttatgctttaatctggtcatgttattaagccagatttagaggtaaaaagatttaaaaagttgttatttactgaagttcttacttagaagctaccaatgtaattactgacaatcattaccaacatctaatttggcatgtccttaacacagactctaacttgcaaaaaaaaattatccctttttatagatgaggaactaggcccaaagtgctaaggttgcatttttaagtgacaatccccagcagttgagaacctaccagagtataccaggcacagtgctagttaagaaaaagatgagttaggccgggctcggtggctcacgcctgtaatcccagcactttgggaggctgaggcaggcggatcacaaggtcaggagatcgagaccatcctggctaacacggtgaaaccttgtctctactaaaaatacaaaaaaaaaattagccgggcgtggtggcgggcgcctgtagtcccagctactggggagtctgatgcaggaaaatggcgcgaacccaggaggcggagcttgcagtgagctgagatgcgccactgcactccagcctgggcaacacgcgagactccgtctcaaaaaaaaacaaaaaaacaaaaacaaaaacaaaaagatgagttagatagagccttgtcctcaggatattcattctggcagactaaacaaaaagcaaggtgctagcagaaaaacagagggaagaacagagggaagaaagttaacgtctacttccagggcaacacacaccattagctcttaagccatgaacctcacaatttggattcttgtagagtcttttattagactttgtttcctgtagttctgcttctccaacctgattgtcttctctgcaagaacccaagttttcatatcattcataagatcctaacaggagttccagaaaacttacgaagtggaaggttgatggggctgaccctccagtatggcagcaactgtcccttcttggtctaaaatgacacatatctgaaatatatgcaaggaccctggatttttgaaaaacattacaagataccttcttaatattattgcttctttgcacttaaaacaagtttgtccaacccacggccctcatgaggcccagaatggctttgaatgtggcccaacacaaatttgtaaactttcttaaaacattatgagatttttttttttgcaattttttttcttggctcatcagctatcgtgttactgtattttattgtggctcaagacaatactttttccaaagtggcccaaggaagccaaaagattggacatccctgacttaaaacttaattgcagctgtctttaaagatgtctagctttgggaaaggcagcacaaggcagagcatctgggtggtggcagggatgcacccgtggggagaggtagctgcggctgctggtgtggggggaaagatgtttggtttaatcaacagtattactaataactgacttctttcactcaagacatgtgagtgtcaaagacataccacaacagctaggttttggtagagaagacagagccagccaaggaaatacaactaagaaagctgaggatctctactagacaatcggggtcaaaaaacaggagtggttgtaaggacatccagaaacaagaatttcaagaagggtgtagtcaatagcatcaggtaagttattgagaagtcaggtaaggtaaacattaaaagtaacactgtgtttagacgtctcagtcatcagatcttaagtgagagaatgagagcacagaacccagaattagagtggggtaatttactaaagttcttacttagaagctaccaatataattattgaaaatcattaccaacattgaatttggcatgtctttgaaccagaatctgacttgctaacaacttattatccctttcttatagatgaggaattagaggaattatgtcaggtaaggaaacagacagaaaggataactggtttgataagtgtgactgtgagggaaggaaagaggttcagtggtagcaggacaggtaggaatggaaggggctgagagatcactgatcttttgttttcaaaatgagaaacagtatggaccatgaaagcatttgcttctatttacttgcactaatattatggtaatgataggaaaaaaatttttttattccagcaaaaagcattaccatataatttttcaattcccttgaattgggcataaaggtctctcactttgctgggtaatgaataaaaaggaccaaggtcatttgatgatgactcaactgttttcttagcaacattaatttcctcagataggagagtgtctttgagctgtttacttctagaaaatattggtgtctgggccttcgcatttccagtcatggcattttttagatgatctttaatactttttctcctgttcatatctgaactagttctgactttggaagaggactcatcattttgctggggttgctctatgcaattatggggcagttcctcattcacagtgttgtgagaggatgacttccaatccctttctttcatagaatgatcacccaaatcatttgaagagttctgcaaattttcaaagtatatagcctgtgaggaaggtacatcatacaaaagatcagctccaggttcaatagtgacaccttcatatccactctggttctctgtgtgcttatcagtttgtaattcagtaaggttgcctatggtagtaatgctgagtttgtttttgatactttccgagcaaagattttcagtggcaaagtctgtagcatgtttcttatgttcagggagttgcatatatttttgttccaggtcgtcaacttgagctataaaggagttttcagtaaagctatcatagtcaccaaacatgtccacttcactgtcattaggctgcaaagagaacaaaaacgcttatggtcaattccagtttcattaagaataaaagcttcaccagcctggccaacatggtcaaaccccgtgtctacagaaaatacaaaaattagccgggcatagtggcatgctcctgtaatcccagctactcggaggctcaggcaggagaattgcttgaacctgggaagcgcaggttgcggtaagcccagatcgcgccattgcactccaacctgggcaacagagtgggactctgtctcaaaaaaaccaaaacaaacaaacaaacaaaacccccaaaaaacacttcagcctagggctgtaccaagtatataattatatggtcacatatggatcacagacctatatgtaaatagatatcttacagctgaagaaatggaggcccaaagaggttaaattacttgcctaaacagcaggttcaggagtgttacgatgatactgagattctaatttttgagacagggtctggctctgtcacccaggctggagcacagtggctccagccactgcacgatcacagctcactgcagtcttgacatcctgggctcaagcgatcctcctgcctcagcctcccaagtagctaggactacaggtgcaggccaccacacccggctaattaagaaaaaaaaatttttttttttttttgtagagactgggtctctgttgcctaggctggttttgaacgcgaacttctgggcttaagtgatcctcccatctctgcctcctaaagcactgggattataggcatgagccactgcacacggccagattgtaattcttaaagctgtactaaaacagcaggaagactggtagacgtctactgaaatgtcagcgcattcgaagtttctgataactgcagcgcttccctcccagactacaatctacagtgactggcctctaacagaaacatggttgtaccactagacactccaaggagttcctaggaatttggaattgagactgagaaactgaatactgacttggagtggtctgctacacagaagacacacaaacctggaggcagcaatatagtaaagtgattaagacaacaggatttggagcaagaactgtactatctcaacttttcagggcctgattactgtcgtaaaatctagataatataactagcttaacataacgggtcttcaataaacagcagattttatttgtacagtaggagctgcagttatctggaagcctagatttgtgtctcagtcatgccacttaactgctgcgtgcacaacttttatgtctcggggtttacatttcatatttatatagaaatgtaaataacaaggcaatcaatacctcctaagtgccgattaacagtggtaacgaagacgagagaagtaaacgaaggcgataaaactggtcaactctttgcatctgggaaggatgccaaaagtttgcagtttcaagttccaagtcctccgtacctggtctcccacccctctgtcagtgggcatgtgacgtaggaggtccgggtttgtatcaccacctccaaggacgagacattccggggaatctgagagtagaaggggctgtacctcaaccggcagtacgcccgcggttttccgcctcctgttctcagccaccatttcctcctcctctttcccctcatctccgggctcgagctcggccgcggtgggagcgccaaaaatacaccccaagcttggacggttccttttggggagagacacccgccggcggatgcgggaaccacattcatccatggcaaggacccagggccctattcagacgtcgttctcagtgacccagacgctaagcccatatggaagggagagtgggacgccggagcccgcttctacatccaccttgggaaaagaccccaagttagctctcagggctcgcggaccggaagcacgcataaacttctaccctgtccaatcataagcctcacgtgacctgccgcgtagggagggcacgaacagaaaggtgctgcgcatgcgtattgaaaaacctcacctactctcgcgggtcctcagcgttctcctgcggaacctttgaacggggtactcgagcccacaggggaagagcagcggaaggggcctttcggaacgatttggaaygaaaggaagtggaagaaacgcggaaccatggccgctgtggttgctktttgcggtggtctagggaggaagaagttgacacacttggtaacggctgctgtcagccttacacatcccgggactcacacgggtaaagtctccatatcctatgctccattgtagcgctgcaggcattaaccttagtcctaatggttagagtcgtccctgttagcaaaacgactctggtttctaggcgattaagtttctccaagatgggtgggaatctgtaattgcctttgactgttttagtgtcgtctratccactcctttaaagtatttaaacgtatgaggaagttggagtggttcttaaaaagcagagactttcctaagatctctggataatcttagtgaggaagggacatttccagagtcgcccagcagcaaattccagatgtctaaggtccccaaacagaacaaaattgcataatttttgcaattttatcttctctgtgcttctctataaattctttctgggacgggtctgttactttctttttggtatgacagtgcctttctgttgcttctcctataagaatttgcattaagaattttctctaaccatggaatgaagggaaaataaatgtcagaaagagcaggtatgggcgggaaaatatgttcttttccccctaagccctggaaagcacacccatgttgagtcttactctgtcccaaatataaaagtttttaaccattctgaatataatacaaaacctttctttaatatcgtgtcccttaattcatcctgtctccataaaaacaaaaatctttagctattcagctaagaaaaagaaatggttaattgctgtttctgtttaatcgcagtgctttggagaagaggttgttcacaacaggtatccagcaatgaggacctggtaagaatttttttttctattagtaaggcctttgcaaatatgaccaaaatgtttttctttttaaaacgagatctggtattagactctaacatcttttattttagctacttgaatagagttctgccgtaggacaaaacaatttgataattactctgagttcagaaatgatgatgaattgattgtagtcatgtagtcagctgagttttgaagtaggggaattcctagattagaagcaaagctgctataataccatatttttcttcctagatcttaaatttaaggatatgtgatttgggaattgttttttttttttttacatagccctttgtaagcaaatgatatgggaattttaaaaggtagtttgggtgagcagaattttagataactgaaaagagactgtacaaagcttagctataggttggctatagtattaacatggactttctgaaagcacaggttcttgctacatgcaaaggtattttgacactaattagaccatacaaagcacttggcacagagctgaagagtagttacgtgagctgaatgtaaattggaaagtttgaggaattggaaaaaacaaaagaacttgtctagtttctctgagcatctgtcttggtaatctaatccatgcaccatactttaagaaagtaaagggacattatttcttttttagttcataaatcccactttgtctctaatcaaagttatggaccctctccacagaaaaaggcacacagtcccattcatttgaagttttgcatacgattacagggagtcatgggcttcaaagccatttctagattaagaacctctatcctggagacagccatactgactgtaggaaggaggcactgtgacaaaagcattagaggcagtggtggtaacagaaaagccaaaaagactgatacaaacttatatagtagcctggggtgataaagtcaaagaaccttttattacagtaagtcatgggccattatctgtgtataaaaatagtgataaaatacttgatagagacatggggatggataaattagggattgtactcatttaagaatggcatatgttatctattgtgttgtaagtttccttaaatctaaaaattttttcattatctacaatctgagcaaagcattggaacactttcttatyagacatcatttttgttctgccataaaattttattctatgaagattgtactttattccagaatcttcccatgcgttaatccgtaggctaaactaaaacaaaataaagtgcttatacaaaatatgtacacagtaagaaaggtataactaatcctttgaatggatttgaatgtagaatagtaaccttttaaaattcagaattaacacatcctattatcagacttttcgtttttttccctagcccatttcaatggaaaatccttataaagaacctcttaagaaatgtatcttgtgtggaaagcatgtagattataagaatgtacaggtgagatctggttttacttcactatattttagggttttgcttctgatagatctgcttaaagagaatcaagtcagtttatagcaggcttttgtagaggtaactgttttagcaacttcataatttcaaatttggttataattctatgtataagcttatctctgctttattcaagtaaaagcaccttggctttcccccacttactgttatttccactctgtttttttcactaccccaaacatcttaatagctccctgtggcagtaattctcaattggtgagggtcagaactttggaaaaagctcatctggtgaagctgatctctttatctcaccacccatatcactgattcacatattacttatctcttgtctaactctcagcaagttagaagttgcaaatttggggcaagtgaatagcgctagaattctgtatgttggctgggtgtggtggctcacgcctgtaatcccagcactttgggaggccaaggcgggcggatcacctgaggtcaggagtttgagaccagcctggccaatgtggtgaaaccccgtctctattaaaaatacaaaaattagctgagtgtggtggtgcatgcctgtaatcccagctacttgggaggctgaggcaggagatttgcttgaacccaggaggcggaagttgcagtgagctgagatcgtgccattgcactccagcctgggtgacaagagtaaaactctgtcaaaaaaaaaaaaaaaaaaaaaaaagaattccatatattgacaatagtataaagtgatagctgcctttgaggaagaaccaagaaattacaaaaacacacatactaggaagattatgcaaagtgccaagaataatgactagcacctagaaaggttctaaagaagtatttaaataaaacataaattatagcaaatgcctggtgtacttgtacctcttgaaaatctcattaccccctgataatttatcttaatgattatcagagggtaatgtgatagcttgtcaggatagatgaaattttttagtagcttgtttcaagcaatattttagaaaggtatctgtggaagtcaagaaaacagatttaccattgaatgaatatgctgattaatctgctgtttaattatatatagacttgacacactggatagaaaatatttaaaaggtaacaggaggataacaatatttttttcttatattttatgaaatgtgtctgaaatttagtaaagctttatataacctgaaggttgttttttgaaatttacacattcagaaataaataacagatacttttttttcccctccacataaaactccaaaacagcttttgtcccagtttgtttctccatttactggatgcatttatggaaggcacattacaggtatkttcttttttattatgggaatataaatgtagatacgaattatatcaatctatttctatcatttaagaaaactcaaattttcaattgtgctataaattactactagatcagatactacagggactagagctagttactatgaaaaagtctcttaggccaagaggattattattttgctgtcttatgcagagttaactatatagaaaaactgggctttaaaaaactgttgttgatgttttggaatatactataatcattcctagattgatacttaaacttggtgtcagcaaactatggcccataggccaaattcgacctgctccctttttatcttgattaggttcatcatatacaaatgccacttttttttttttttgagatggaatctcactgtcacccaggctggagtgctgtggcacaatctcggctcactgcaacctctgcctcctgggttcaagtgattctcatgcttcagcctcccgaatagctgggattacaggcatgcaccaccacgcctggctaatttttgtatttttagagattgggtttctccatgttggccaggctggtcttgaattcctgacctcaggtgatccacctgcctaggcctcccaaagtgctgggattacaggtgtgagccactgcacccaaccccacttgtttttgtagttttgtttacgtagtgccatatggttgttttcgagctacaacagcagagttgagtggcagtgatggagactgtatggcccacaaaacctagattattattgtggcccttgacaaaaatgatttaccaatccttgacttaaaaacttgttgaggctgggcatgttggctcacacctgtaatcccagcactttgggaggctgaggtgggcagatcacctgaggccaggagttcaggaccagcctggccaatatggtgaaaccccgtttctactacaaatacaaaaaaattatccgggtgtggcggtgcatgcctgtaattccagttactaaggaggctgaggcaagataatcgattgagcctgggtggcggaggttgcagtgaggcgagagagcaccactgtactccagcctgggtgacacagggagactccatctcaaaaaaaaaattgcaaactttaaatattgacattttttatgaataagaaagctttttattttacaggtctttgtgggaagaaacagaaagaaatcacaaaagcaattaagagagctcaaataatgggtaagaaagaatacctcaacaactgaattgagctagctgaaattttgctcattatgttttgtcaagaactttaattatctctttacagggtttatgccagttacatacaaggatcctgcatatctcaaggaccctaaagtttgtaacatcagatatcgggaataaattctatcacgttaccactaataaacttattttacagtaagtggttgtatgatgccaatactgactcaaaccaacctttggatagaaaagtgtttgaggagtgaggtaaagaatgacacttccccttcataccaatgtccattaagcagattgcttatttaaaatgttaacactcatcacattttatctatgttgaataaawgtggttctgtgtgattgtcatttatatctgatccccaaatagctcatacaataatccattcaatagaatggaattaaaactgttcagaatgattttccaactagcaaatataagtatgcctggttaagatatcttccctttgtagaaatgttacattgggatggatagtggtgctgtcacagaaggacaaaatattcctagacgagtctaycctcaaaccagtagtgtcttttacatgaagagatgatttacacctaatagacattgaatatgatagacatacatgtatatatgtatcagttctgagttccactggcctatcccaaatacactggattaccaggcttgtactgtattcaaaatgatagatttgctaaatttcatgcaaaggactctaaactaggggagagattactgtttgtgttgtgttatagttgtgtaataattaaggctgccagatttagcaagtacaaatgtaggacaaatttaaattttagatgatgttttgcaaatttattgcatgatatccagcattttatctggcaactctagccataatgtacttctaaaaaagtatcacttaaggagaattttaatgactcagataaattttcatataaatttctttccatattttgaaaataaggctattcttgcttttccattttattttttaatagacatggtctcaatacgttgcccaggctggtctctaactcctagcttcaatcaatcctcctgacttgtcttccctaagtgctgggattacaggtgtgagccactgtgcctggtctcacttttccaattctaaagaatgtgtctgtgtaagccttcccctcaacaacttagtgaaaggtgaaaaaaaggtttggaaataaaagcatctgatgtttgaaaaagtactttgtgaagtaaatgcactaagagttatctgtgtattactgcaaacaggtgaacatagtaaaaacaaatgaacttactgcaagtagctcaacatagtaaaaacaatagaaatgtttggctttacccatcagccaaataaaaaaatctccttgtaaggttaaaaggatcaaaatgtaggagaccgtgaatattcaccaaaacccttcatcttttcaatttcttcatctgtttctgggctgctcattttggatgctttatcttggttactactaccagtatytgctttagatcgtttgtcttgtgtatctaacaaccgagatctcttgaattgccatctgtcatctaagtctaaggytttatgcttaatgatttgtggtgtactagctggactagcttcaggaatgtcagtgtgttctaccattaaggtcagattgtctactacatcgagatggtggttgtagttacagctacttttagaaacatgtctattttttaaagacataacacatgaatgaagaaattcagaatttggaaaaaaggtccgtaatgcctgacaaagaaaaatgttctcctgagggtctttttggatgttcttctctcctaaacaaaatagaataacagttcaacatataacatttcttctacaaagcttttataattaactatttgtaagtaaaattaagtcaaaaagattttaacagttgtattatctaaagtgaggataacatacataattctgaattctaatttatatgccacagtattctaagacaaaattaaagttgtgttctttcatgtcagcaatatagctaccatagtattatgttctttaaaagcacagaaagggccgagcgcagtggctcacacctataatcccagcactttgggaggctgaggcgggtggatcacttgaggtcagaagttcaagaccagcctggccaacatggtgaaaccctstctctattaaaaatacaaaaaaaattagccaggcatggtggcaggcacctggaatcccagcgtttcaggaggctgaggcaggagaatcgcttgaccccaggaggcagaggttgcagtaagctgagatcacacctttgcactccaacctaggcgacagagcgagactccgtctcaaaaataaataaataaataaaaatttttagcacagaaagtagagatgtgttgtttacttacttgctgcctgaatctgtgctcctctccttttctcaatttctcgttttaatctgtttacatcctttactagtttatctactgcttgttcactgtcttccacttttttgcatatactctgcaaaataaagtaatttaagggcataggtaatatttcaagctgtgtactaatacagtctagattcacaaataatataaaatcattggtggtatataatacccaaaactatttgccttttatataaattttatttattttctggaggatgtcagtaacaagcacttgtaggttataaataagccttataggttgtaaaatgctttttcacatgtaacttctcatttatacagcttttatcatgccagttagttcgctgaaaatatacagaaataaactgaaatattaactcatgggccagctgcggtggctcacgcctgtaatcccagcactttgggaggctgaggygggtagactacctgagctcaggagttcgagaccagcctgggcaacatggtgaaaccctgtctctactaaaaatataaaaaattatccaggtgtggtgatgcatgcctgtagtcccagctactcaggagactgaggcaggtgaatcgcttgaacccaggaagcagaggttgcagtgagccaaaattgcaccactgcactccagcctgggcgacagagtgagaccctgtctcaaacaaaaacaaacaaaaaaactttgaaacaaaaaaaatacagatgcagagttactgcataaatttaacactaagaaactcacagtaagtgaaacaaagtgactatcttactattaygaaaggatactattgaagattttttcctgtaagagaaactacttttgaaaagcagatcacttctgtgtgtctttagttttaaaagtatgaataccartaacttttgatgccataattccatttgggaatatatctgaataacaacaaaaatataagatgatgtttcttagtataacataaaacaactgggggaggggagaacaactaattagtaaaaaaagcaactaatttccaactgtagggtaatagttgttttgccagttttagtggacactttttaggatgtctgccaagcctactttttacaaactttttttgccctgacataagagtttgccagttacccctgtacccacctttcaccagagctgacccaaacagaaccaatgagattcttgcctggcaatctggaggtattacatagccaattggcagatcttatgctctagaagagatctaaatgcaggagctgtgggttggctgttttctggcctgccagtggatgaagaaacaaaaaggtctggaaggatagcaatgtgcagacacagaaagttctatggcattctagctcctggttccaattccttcctaaagttcagctgctttctgcctacagttcttatgatatacctctacattccctattttagcccaagttggtatttttccataacattctctatgaaatatactgccattaaaaataaagaggccgggcaaggtggctcacacctgtgatcccagcactttgggaggctgaggcaggtagataacctgaggtcttgggttcgagaccaacctggccaacatggcgaaaccctgtctctacttaaaatacaaaaattagcctggcgtagtggtgggtgcgtgtaatctcagctacttgggaggctgagacaagagaatctcttgaaccagggaggcggaggttacagtgagccaagatcatgccattcattgcactccagtccaggcgacacactgagactctgtctcaaaaaaaaaaaaaaaaaaaaagaagaaactaaaaacaactaaagaatatgtagcaacagaaacaatgttttatgtaccaagttttttaaaaatcatgacaaatttatgtcaccatgactattgactatatcaaagtatacatatattaaggaaaaactggagcaaatggcagagtgaaaatagttatgttaaaatggtgagattccaggctggatgtggtggctcacacctgtaatcccagtactttgggaggccaaggaaggtggattgcttgagcgcaggggatggagaccagcctggcaacatggtgaaatcctgtctttacacaaaatacaaaaaattagctgggtgtagtggtgcacacctgtggtttcagctactctggaggctgaaagaggaggatcacttgagcccaagaggtggtggttgtagtgagctgagatcatgccattgctctccagcctgggtaacagagcaagacactgtctctaaaaaataagatggtgagattctggatgtttttaccatctaaaattcccgtttcatatgaaaaagtagtgtaatatgaatcaaaatatttattttaactgcttttctgttagtgtgctctactgatgagtgtggtggccatggaaatatactccttagtaagatctccaactgggggaagcatagttgacttaacagccccagctttggacctacyactgtgttaagccacacttcccctgggctgttcctagccaatgactaagcacactgcaggtattagtgcaagtccatgcctayagaacaattttcgggcaactttgctcaaagactccctatcagcctagtggaacgttcttaaaatggcgctgcagtctgagactcttcctaaccacttgtcttcttatccccctctcctttctcaggggtcagacttgcagtgttgtctgaaggctcttcctgcctgttctttcttcctcttctttatccttctcaggcccaataaatctcctgcacttataatcccatcttgacatctagttctaaaaggacctgaactgacacatgaagaagaactgacacatgaagtagagggaagtatactgttcccaaatatacttccctctattctgtaagaaggattatatatccctgcctattaccatgtgatgtgttcaggccagtgaaatgtgagtagaagtgacatggccgttttaagcaaagttttaagagctgttgtgaatttccactagttttttttttttttgagacggagtctcgttctgttgcccaggctggagtgcagtggcacgatcttggctcactgcaagctccatctcctgggttcacgccattctcctgcctcagccacccgagtagctgggactacaggcgcccaccaccatgcccggctaattttttttgtatttttagtagagacggggtttcactgtgttagccaggatggtctcgatctcctgatctcgtgatccgcccacctcggcctcccaaagtgctgggattacaggcgtgagccactgcgcctggctccactagctttcttgctctttgccttatgccatgaggacatgtcccaaataagggctgctccttcagcctggatcctggatgaagatgacattcagaaaaggagtagagctacagccaagataaaatgtgagcaagactaaaccatagttgttgtaagccactgagattgcaatctttgttaactacagctgaagaaatacaactcagtcaatgaagctaaaggaataatgacatctcgttcaacaagggacagcatctatgatggggtctcacaagattatattggagcacatatagaaagctgatatatagcacttgatattggcattacagatcaaataggggaaatgactgatattcaataataatttggggacatttggttttccctatgaaaactaaaaagtaaaaatacatataggtttgtgtaagtatatgtttgcacaatgataaaactgcctaatgacacatttctcagaaggtacatagccttcattaagcaactcataactgtataaatctaatcaagatgtcaggttatcctaaaaaatgtcagtcattaacttgatatgaactctatctagaagtggttgacgtgtttgatatgttaacttacctttaattcctcttgtaatgaagcatacatttcatttatcttatgtacctcctttaaggatccatcttcttcaaaaaatttagagctgtaaaaaattaccatttcctcaggcaaatacacaaaaccattttaatgataaggtgaaaaacttattcattgtcaaggaccaatagaagagtctttttactggttttgtaggaaccataattttgtcaatctatgtgtatagagaaaaaccaaccacaaaacctacttcattgatcttcacattagcaaactttttagcctcctaagtactattgccaggtctcccaaaaaggcgaggatgggcgggggatgggggaagattgcataaaaatagataaaaattgaaggaaggaaaaaaagtctctattggcaatgggaaccggagtcaatttttaaaatattttactgaattcaagttacctttacttgaaagagacatcattattttatgatccataaaataatgaagaaagtaattctaagaaggcatgacttgtaggacatcccaatgtcagagataaatatgaaaaatgtgcatcttgccgggcgcggtggctcacgcctgtaatcccaacactttgggaggctgaggcaggcggatcacctgaggtcgggagtttgagaccagcctgaccaacatggagaaaccccgtctctactaaaaaaaatacaaaattagccgggcatggtggtgcatgcctgtaatcccagctactcaggaggctgaagcaggagaatcacttgaacctgggaaggacaggttgcagtgagctgaaatcatgccattacaccccggcctggacaacaagagtgaaactctgtctttaaaagaaaaaaaaaaaaaaaaaggaaaatgtgcacctcagaatcaatgaaatacggtattcagtttttaaactgctggcactgtggggacacaaaagtaagtaaaatctaaccccttattctcaaagtttacactctagtaggtatcctatagtaccagtgttgctgtttttgacattacttccttacttaatggccacaaagaaagttatatataagcagcctatagtatgagtgagtcttggctaaagtctgatttttacaaatatctaatttcacgcctttaatccgaaccattgccttagaaaattataatttttaggctatatacttattctaacctagaatagatatgctaaactttacaggatatgcaacaagatcctcccagtactatttttttaaattttcttttgtagagatggggttttgctgtgttgcccaggctagtctccaactcctcagctcaagtgatcctcctgcctcagcctcccgaagtgctgggatttgcaggtgtgagccaccatgcctggactaaccactaccttttttgtatcttgtaagtacacaagcagtaacaggagtatgaggaaggtaaaaacagcctagtttacttgagtaatggattaattttcccttgaatttttattctgctgttgtttgagaaataagaaaattaatttcaaagatgaatagaagttttgtgagaaagcagttgaatcttacctgtgtgtttgtactgctcggctaaaaccagtggacatacaggaacctgatacagttttataacccagttgttcagacatgcccagattggcaaccactaaaggtaccctgtgaaaaagtctgacaaaataaaactttagagtataaacttagaatgaaaagaaagattagtatctacctgctggaatagattacttgtcccctacaagatttaaaaaaatacaccccccaaaacccattctttactacttatccaaaatagaatttactgacttgaaacaactgtttttttttttttttgagacagggtctcactcagtctcccaggctgcagtgcagtggtgcgatcatggctcaataatgcagcttcaacctcccgtgctcaagcaatcctcttgcctcagcctcccaagtagctgggactacaggcacccatcaccacacccgactaatttttaagttttttgtagagatgaggtctcctaatgttgctcagtgatcctcctgccttggcctcccaaagtgctgggattacaggtatgagtcaccacactgggcccagatgacatgtaaagctgtgaaatgtgcttagtataatagtgtggaaaaacagtttaatggctcttttgattagtacatgtataaataaggcagtattgagatttaccctatcttccatgaacaataaaattattcttagttggtactcttttaacgtaattctcatattccacgaaaatgtagtttactatatataaaacctgtaaggagtccctggttagactcattttactggaccatcaagagctactttgtttctttgttcagttatagaaaaactgctgaagtatctaggcttaaattctaaattctaaattataccctttatcaatcaattaaaaaaaaagtttttttccaccttaagtagtaaataagagcaaatcttcagtgccagaatacaagtcatcattccacactgggcttctaatttccttgtctgaccattattttcccacctataaattaacagatggtaagatctacttctgaaggttatcgtgacaatctgatgcgacaatatatgagaacactttgtaagctgcaaaaagtactaagtattagatatatttttctattagtttaatacagccagtgactggccaacatttaccctttttgaggtttatataaggaatgttccagtcgatgagtagagcagctttctgttattatacttggtgttaatagcagaaaaacaaggtcttggtttgaaaaatgctcctgcaagtttttgtgaagcagcctctctctaaacgtcatgatctgatctgaatgacgacggaatttgtaccaacctaccacattctgaaatacagaataaaaaggatatacatcttaatagttacaatgatatgtcttactattataattaaataaaataaacaaccttaaaatggctttcttaatatttagaaagatttggggcatatataaacaaagaatacatttaatcatatgctttacttttgtaaaacatacaaactgacttactttccattcatttgaaagggtacggttttcatcaatatagattaaaagggagaaataaattcttgactttctgtagtttcttttatggcatttgctatcttgcaatctcactctttagtcaaaatttaaatgaaaaaaatatcaatgccattgattcacttaaaaggcaatccctccctgaaaataaattaatcgcctgtatggacacttggtttgttaaataagttaagctgaaccctacagcttttacctaaaatttttatgggaatgatatcacctacccgacaaacttggcttcaagattaagatcacattaaaggattttgtaaactacaacatactaagcaaatgtgttaatactactagacctttttttaacttggaaaataattctcctttacttaagacaaagagaaaaccaatcactttgcttagagatctgtgagtttcagcaactaaattatatatttgcacatttgaattgaggaaattaaaattagtttttaaaaataaggcatttttacaggtgcaattttaaatactcaaataataattggggggaaaaaacacaagcattttcagccaaacatatttgttgaaagaaacatttttttttttttttttttttttttttttttttgagacagtctggctctgttgcccaggctggagtgcaatggcacgatctcagctcattgcaacctctgcctcccgggttcaagtgattctcctgcctctgcctcctgagtagctcagattacaggcatgcgccactacgcccggctttttttttttcttctgtttttagtagagatggggtttcaccgtgttggtcaggctggtctcgaactcctgacctcgtgatccgccctccgcagcctaccaaagtactgggattaaaggcatgagccactgtgcccagccaagaaacatctttcaattaatctatttttattttcaaatcaaagttttaagagaaaaagtagtgccttgaaaaaattttgtgtttggggaaaaaatccattttgatcattcaacaacttttaaccaaacacaaagtatgttatagaggatccaaattcagtgctatataggaaacatccctgcagtatctatcaaaaataataactgaggccaggcatggtgtgtggtggcgggtgcctataatcccagctattcaggaggctgaggcaggagaatcgcttgaacccaggaggtgcacgatgtagtcagcctagatcacaccactgcactccagcctgggtgacagagcaagactccgtctcaaaaaaaacaaaacaaaaaaaaccaaaacactacagccaagtaaaataacagaactgattaggtcacagaataaatggtagtgggaagaggtgtggtggaaatataagagaaagagataaatgttaattagtcaaagaaaggattagaacaaaattaatatttttaattactagttttattttcagagcaaccactttcaatttctgggaagaacaaaccttttcttacttactttacaggatactatgatgtcaaacactgcttaaaaattctgtcaaagtactgtgtgtttttaagaaccaaaaacaatgcaaataataccaaaaaaagggaagataaattagagaatacctttttgacatttgataatattttcttcagtgcttgctcatttacttcgcctgaagaattataaaagctgtaaaagccaaaattaaaggtatttcaaatacgctaaaaatataagtaattttattagtattttaaattttagttattcctaacccaactaccaaagcccatatacctatttgcctgtcagatgaagtcctaaaataaacagtagagaaagttctcaaattaactgacttaaagtggtagaaacataaagtccataaagcaatgaaaaggaaaaaggagtaacttaagagacaagttttgggaatcgttttttttgaacctaaaacagtaaactatccatgaaatacaggtattaaaatgtaagttcacataaccggttcacaattcattcagtttactcatttatattttttataacattgatacatacaaaagaatgtataaccagtaatgaagcacaataacaaaaagactattattcactgctagttacaaaagctatgtattttaggaggtggctgggttttttggggtgggggaagggaataggttttgtttggtttagaacagtttgttcaggagttggaatatccaaaatgtaggaagaattaaaagataattccaagtgattctacttccagctttctttcccttccaataacagagactgcaaataatattttcttctttttaccactcattaagatcaacaatattttctatgatggttaaatatgttatacaaaatcctttataaataatttttgccagggcatggtggctcatacttgtaatcccagcattttgggaggctgaggggggtggatggctcgagcccagaagtttgagaccaacctgcgcaatgtggcaaaaccctgtctacataaaaaatacaaaaattagctggggtgtggtggtgtgtgcctgtagtcccagtttctagagagagcgaggtgggaggatcacttgagcctgggaggcagaatttgcagtgagatgagatggcactactgcactccaggctgggcaacagagcagtctctgtcatctatttatatttccaatatttgtctacttacagttccaatatgaaaatacaagaaattcttctctaaagacaagaatttattcctatatttccctagaatggtccacttctgagctcaaatcggagcataaagcagtatattagggtaagattagtaacaggataactgcacatcatctctggaagcactaggtttatgtgaagtttctggggagaagatgaaggggg

SEQ ID NO: 97271 - DNA, 74404 bp, Homo sapiens
agtggtctgctacacagaagacacacaaacctggaggcagcaatatagtaaagtgattaagacaacaggatttggagcaagaactgtactatctcaacttttcagggcctgattactgtcgtaaaatctagataatataactagcttaacataacgggtcttcaataaacagcagattttatttgtacagtaggagctgcagttatctggaagcctagatttgtgtctcagtcatgccacttaactgctgcgtgcacaacttttatgtctcggggtttacatttcatatttatatagaaatgtaaataacaaggcaatcaatacctcctaagtgccgattaacagtggtaacgaagacgagagaagtaaacgaaggcgataaaactggtcaactctttgcatctgggaaggatgccaaaagtttgcagtttcaagttccaagtcctccgtacctggtctcccacccctctgtcagtgggcatgtgacgtaggaggtccgggtttgtatcaccacctccaaggacgagacattccggggaatctgagagtagaaggggctgtacctcaaccggcagtacgcccgcggttttccgcctcctgttctcagccaccatttcctcctcctctttcccctcatctccgggctcgagctcggccgcggtgggagcgccaaaaatacaccccaagcttggacggttccttttggggagagacacccgccggcggatgcgggaaccacattcatccatggcaaggacccagggccctattcagacgtcgttctcagtgacccagacgctaagcccatatggaagggagagtgggacgccggagcccgcttctacatccaccttgggaaaagaccccaagttagctctcagggctcgcggaccggaagcacgcataaacttctaccctgtccaatcataagcctcacgtgacctgccgcgtagggagggcacgaacagaaaggtgctgcgcatgcgtattgaaaaacctcacctactctcgcgggtcctcagcgttctcctgcggaacctttgaacggggtactcgagcccacaggggaagagcagcggaaggggcctttcggaacgatttggaacgaaaggaagtggaagaaacgcggaaccatggccgctgtggttgctgtttgcggtggtctagggaggaagaagttgacacacttggtaacggctgctgtcagccttacacatcccgggactcacacgggtaaagtctccatatcctatgctccattgtagcgctgcaggcattaaccttagtcctaatggttagagtcgtccctgttagcaaaacgactctggtttctaggcgattaagtttctccaagatgggtgggaatctgtaattgcctttgactgttttagtgtcgtctaatccactcctttaaagtatttaaacgtatgaggaagttggagtggttcttaaaaagcagagactttcctaagatctctggataatcttagtgaggaagggacatttccagagtcgcccagcagcaaattccagatgtctaaggtccccaaacagaacaaaattgcataatttttgcaattttatcttctctgtgcttctctataaattctttctgggacgggtctgttactttctttttggtatgacagtgcctttctgttgcttctcctataagaatttgcattaagaattttctctaaccatggaatgaagggaaaataaatgtcagaaagagcaggtatgggcgggaaaatatgttcttttccccctaagccctggaaagcacacccatgttgagtcttactctgtcccaaatataaaagtttttaaccattctgaatataatacaaaacctttctttaatatcgtgtcccttaattcatcctgtctccataaaaacaaaaatctttagctattcagctaagaaaaagaaatggttaattgctgtttctgtttaatcgcagtgctttggagaagaggttgttcacaacaggtatccagcaatgaggacctggtaagaatttttttttctattagtaaggcctttgcaaatatgaccaaaatgtttttctttttaaaacgagatctggtattagactctaacatcttttattttagctacttgaatagagttctgccgtaggacaaaacaatttgataattactctgagttcagaaatgatgatgaattgattgtagtcatgtagtcagctgagttttgaagtaggggaattcctagattagaagcaaagctgctataataccatatttttcttcctagatcttaaatttaaggatatgtgatttgggaattgttttttttttttttacatagccctttgtaagcaaatgatatgggaattttaaaaggtagtttgggtgagcagaattttagataactgaaaagagactgtacaaagcttagctataggttggctatagtattaacatggactttctgaaagcacaggttcttgctacatgcaaaggtattttgacactaattagaccatacaaagcacttggcacagagctgaagagtagttacgtgagctgaatgtaaattggaaagtttgaggaattggaaaaaacaaaagaacttgtctagtttctctgagcatctgtcttggtaatctaatccatgcaccatactttaagaaagtaaagggacattatttcttttttagttcataaatcccactttgtctctaatcaaagttatggaccctctccacagaaaaaggcacacagtcccattcatttgaagttttgcatacgattacagggagtcatgggcttcaaagccatttctagattaagaacctctatcctggagacagccatactgactgtaggaaggaggcactgtgacaaaagcattagaggcagtggtggtaacagaaaagccaaaaagactgatacaaacttatatagtagcctggggtgataaagtcaaagaaccttttattacagtaagtcatgggccattatctgtgtataaaaatagtgataaaatacttgatagagacatggggatggataaattagggattgtactcatttaagaatggcatatgttatctattgtgttgtaagtttccttaaatctaaaaattttttcattatctacaatctgagcaaagcattggaacactttcttatcagacatcatttttgttctgccataaaattttattctatgaagattgtactttattccagaatcttcccatgcgttaatccgtaggctaaactaaaacaaaataaagtgcttatacaaaatatgtacacagtaagaaaggtataactaatcctttgaatggatttgaatgtagaatagtaaccttttaaaattcagaattaacacatcctattatcagacttttcgtttttttccctagcccatttcaatggaaaatccttataaagaacctcttaagaaatgtatcttgtgtggaaagcatgtagattataagaatgtacaggtgagatctggttttacttcactatattttagggttttgcttctgatagatctgcttaaagagaatcaagtcagtttatagcaggcttttgtagaggtaactgttttagcaacttcataatttcaaatttggttataattctatgtataagcttatctctgctttattcaagtaaaagcaccttggctttcccccacttactgttatttccactctgtttttttcactaccccaaacatcttaatagctccctgtggcagtaattctcaattggtgagggtcagaactttggaaaaagctcatctggtgaagctgatctctttatctcaccacccatatcactgattcacatattacttatctcttgtctaactctcagcaagttagaagttgcaaatttggggcaagtgaatagcgctagaattctgtatgttggctgggtgtggtggctcacgcctgtaatcccagcactttgggaggccaaggcgggcggatcacctgaggtcaggagtttgagaccagcctggccaatgtggtgaaaccccgtctctattaaaaatacaaaaattagctgagtgtggtggtgcatgcctgtaatcccagctacttgggaggctgaggcaggagatttgcttgaacccaggaggcggaagttgcagtgagctgagatcgtgccattgcactccagcctgggtgacaagagtaaaactctgtcaaaaaaaaaaaaaaaaaaaaaaaagaattccatatattgacaatagtataaagtgatagctgcctttgaggaagaaccaagaaattacaaaaacacacatactaggaagattatgcaaagtgccaagaataatgactagcacctagaaaggttctaaagaagtatttaaataaaacataaattatagcaaatgcctggtgtacttgtacctcttgaaaatctcattaccccctgataatttatcttaatgattatcagagggtaatgtgatagcttgtcaggatagatgaaattttttagtagcttgtttcaagcaatattttagaaaggtatctgtggaagtcaagaaaacagatttaccattgaatgaatatgctgattaatctgctgtttaattatatatagacttgacacactggatagaaaatatttaaaaggtaacaggaggataacaatatttttttcttatattttatgaaatgtgtctgaaatttagtaaagctttatataacctgaaggttgttttttgaaatttacacattcagaaataaataacagatacttttttttcccctccacataaaactccaaaacagcttttgtcccagtttgtttctccatttactggatgcatttatggaaggcacattacaggtattttcttttttattatgggaatataaatgtagatacgaattatatcaatctatttctatcatttaagaaaactcaaattttcaattgtgctataaattactactagatcagatactacagggactagagctagttactatgaaaaagtctcttaggccaagaggattattattttgctgtcttatgcagagttaactatatagaaaaactgggctttaaaaaactgttgttgatgttttggaatatactataatcattcctagattgatacttaaacttggtgtcagcaaactatggcccataggccaaattcgacctgctccctttttatcttgattaggttcatcatatacaaatgccacttttttttttttttgagatggaatctcactgtcacccaggctggagtgctgtggcacaatctcggctcactgcaacctctgcctcctgggttcaagtgattctcatgcttcagcctcccgaatagctgggattacaggcatgcaccaccacgcctggctaatttttgtatttttagagattgggtttctccatgttggccaggctggtcttgaattcctgacctcaggtgatccacctgcctaggcctcccaaagtgctgggattacaggtgtgagccactgcacccaaccccacttgtttttgtagttttgtttacgtagtgccatatggttgttttcgagctacaacagcagagttgagtggcagtgatggagactgtatggcccacaaaacctagattattattgtggcccttgacaaaaatgatttaccaatccttgacttaaaaacttgttgaggctgggcatgttggctcacacctgtaatcccagcactttgggaggctgaggtgggcagatcacctgaggccaggagttcaggaccagcctggccaatatggtgaaaccccgtttctactacaaatacaaaaaaattatccgggtgtggcggtgcatgcctgtaattccagttactaaggaggctgaggcaagataatcgattgagcctgggtggcggaggttgcagtgaggcgagagagcaccactgtactccagcctgggtgacacagggagactccatctcaaaaaaaaaattgcaaactttaaatattgacattttttatgaataagaaagctttttattttacaggtctttgtgggaagaaacagaaagaaatcacaaaagcaattaagagagctcaaataatgggtaagaaagaatacctcaacaactgaattgagctagctgaaattttgctcattatgttttgtcaagaactttaattatctctttacagggtttatgccagttacatacaaggatcctgcatatctcaaggaccctaaagtttgtaacatcagatatcgggaataaattctatcacgttaccactaataaacttattttacagtaagtggttgtatgatgccaatactgactcaaaccaacctttggatagaaaagtgtttgaggagtgaggtaaagaatgacacttccccttcataccaatgtccattaagcagattgcttatttaaaatgttaacactcatcacattttatctatgttgaataaawgtggttctgtgtgattgtcatttatatctgatccccaaatagctcatacaataatccattcaatagaatggaattaaaactgttcagaatgattttccaactagcaaatataagtatgcctggttaagatatcttccctttgtagaaatgttacattgggatggatagtggtgctgtcacagaaggacaaaatattcctagacgagtctaycctcaaaccagtagtgtcttttacatgaagagatgatttacacctaatagacattgaatatgatagacatacatgtatatatgtatcagttctgagttccactggcctatcccaaatacactggattaccaggcttgtactgtattcaaaatgatagatttgctaaatttcatgcaaaggactctaaactaggggagagattactgtttgtgttgtgttatagttgtgtaataattaaggctgccagatttagcaagtacaaatgtaggacaaatttaaattttagatgatgttttgcaaatttattgcatgatatccagcattttatctggcaactctagccataatgtacttctaaaaaagtatcacttaaggagaattttaatgactcagataaattttcatataaatttctttccatattttgaaaataaggctattcttgcttttccattttattttttaatagacatggtctcaatacgttgcccaggctggtctctaactcctagcttcaatcaatcctcctgacttgtcttccctaagtgctgggattacaggtgtgagccactgtgcctggtctcacttttccaattctaaagaatgtgtctgtgtaagccttcccctcaacaacttagtgaaaggtgaaaaaaaggtttggaaataaaagcatctgatgtttgaaaaagtactttgtgaagtaaatgcactaagagttatctgtgtattactgcaaacaggtgaacatagtaaaaacaaatgaacttactgcaagtagctcaacatagtaaaaacaatagaaatgtttggctttacccatcagccaaataaaaaaatctccttgtaaggttaaaaggatcaaaatgtaggagaccgtgaatattcaccaaaacccttcatcttttcaatttcttcatctgtttctgggctgctcattttggatgctttatcttggttactactaccagtatytgctttagatcgtttgtcttgtgtatctaacaaccgagatctcttgaattgccatctgtcatctaagtctaaggytttatgcttaatgatttgtggtgtactagctggactagcttcaggaatgtcagtgtgttctaccattaaggtcagattgtctactacatcgagatggtggttgtagttacagctacttttagaaacatgtctattttttaaagacataacacatgaatgaagaaattcagaatttggaaaaaaggtccgtaatgcctgacaaagaaaaatgttctcctgagggtctttttggatgttcttctctcctaaacaaaatagaataacagttcaacatataacatttcttctacaaagcttttataattaactatttgtaagtaaaattaagtcaaaaagattttaacagttgtattatctaaagtgaggataacatacataattctgaattctaatttatatgccacagtattctaagacaaaattaaagttgtgttctttcatgtcagcaatatagctaccatagtattatgttctttaaaagcacagaaagggccgagcgcagtggctcacacctataatcccagcactttgggaggctgaggcgggtggatcacttgaggtcagaagttcaagaccagcctggccaacatggtgaaaccctstctctattaaaaatacaaaaaaaattagccaggcatggtggcaggcacctggaatcccagcgtttcaggaggctgaggcaggagaatcgcttgaccccaggaggcagaggttgcagtaagctgagatcacacctttgcactccaacctaggcgacagagcgagactccgtctcaaaaataaataaataaataaaaatttttagcacagaaagtagagatgtgttgtttacttacttgctgcctgaatctgtgctcctctccttttctcaatttctcgttttaatctgtttacatcctttactagtttatctactgcttgttcactgtcttccacttttttgcatatactctgcaaaataaagtaatttaagggcataggtaatatttcaagctgtgtactaatacagtctagattcacaaataatataaaatcattggtggtatataatacccaaaactatttgccttttatataaattttatttattttctggaggatgtcagtaacaagcacttgtaggttataaataagccttataggttgtaaaatgctttttcacatgtaacttctcatttatacagcttttatcatgccagttagttcgctgaaaatatacagaaataaactgaaatattaactcatgggccagctgcggtggctcacgcctgtaatcccagcactttgggaggctgaggygggtagactacctgagctcaggagttcgagaccagcctgggcaacatggtgaaaccctgtctctactaaaaatataaaaaattatccaggtgtggtgatgcatgcctgtagtcccagctactcaggagactgaggcaggtgaatcgcttgaacccaggaagcagaggttgcagtgagccaaaattgcaccactgcactccagcctgggcgacagagtgagaccctgtctcaaacaaaaacaaacaaaaaaactttgaaacaaaaaaaatacagatgcagagttactgcataaatttaacactaagaaactcacagtaagtgaaacaaagtgactatcttactattaygaaaggatactattgaagattttttcctgtaagagaaactacttttgaaaagcagatcacttctgtgtgtctttagttttaaaagtatgaataccartaacttttgatgccataattccatttgggaatatatctgaataacaacaaaaatataagatgatgtttcttagtataacataaaacaactgggggaggggagaacaactaattagtaaaaaaagcaactaatttccaactgtagggtaatagttgttttgccagttttagtggacactttttaggatgtctgccaagcctactttttacaaactttttttgccctgacataagagtttgccagttacccctgtacccacctttcaccagagctgacccaaacagaaccaatgagattcttgcctggcaatctggaggtattacatagccaattggcagatcttatgctctagaagagatctaaatgcaggagctgtgggttggctgttttctggcctgccagtggatgaagaaacaaaaaggtctggaaggatagcaatgtgcagacacagaaagttctatggcattctagctcctggttccaattccttcctaaagttcagctgctttctgcctacagttcttatgatatacctctacattccctattttagcccaagttggtatttttccataacattctctatgaaatatactgccattaaaaataaagaggccgggcaaggtggctcacacctgtgatcccagcactttgggaggctgaggcaggtagataacctgaggtcttgggttcgagaccaacctggccaacatggcgaaaccctgtctctacttaaaatacaaaaattagcctggcgtagtggtgggtgcgtgtaatctcagctacttgggaggctgagacaagagaatctcttgaaccagggaggcggaggttacagtgagccaagatcatgccattcattgcactccagtccaggcgacacactgagactctgtctcaaaaaaaaaaaaaaaaaaaaagaagaaactaaaaacaactaaagaatatgtagcaacagaaacaatgttttatgtaccaagttttttaaaaatcatgacaaatttatgtcaccatgactattgactatatcaaagtatacatatattaaggaaaaactggagcaaatggcagagtgaaaatagttatgttaaaatggtgagattccaggctggatgtggtggctcacacctgtaatcccagtactttgggaggccaaggaaggtggattgcttgagcgcaggggatggagaccagcctggcaacatggtgaaatcctgtctttacacaaaatacaaaaaattagctgggtgtagtggtgcacacctgtggtttcagctactctggaggctgaaagaggaggatcacttgagcccaagaggtggtggttgtagtgagctgagatcatgccattgctctccagcctgggtaacagagcaagacactgtctctaaaaaataagatggtgagattctggatgtttttaccatctaaaattcccgtttcatatgaaaaagtagtgtaatatgaatcaaaatatttattttaactgcttttctgttagtgtgctctactgatgagtgtggtggccatggaaatatactccttagtaagatctccaactgggggaagcatagttgacttaacagccccagctttggacctacyactgtgttaagccacacttcccctgggctgttcctagccaatgactaagcacactgcaggtattagtgcaagtccatgcctayagaacaattttcgggcaactttgctcaaagactccctatcagcctagtggaacgttcttaaaatggcgctgcagtctgagactcttcctaaccacttgtcttcttatccccctctcctttctcaggggtcagacttgcagtgttgtctgaaggctcttcctgcctgttctttcttcctcttctttatccttctcaggcccaataaatctcctgcacttataatcccatcttgacatctagttctaaaaggacctgaactgacacatgaagaagaactgacacatgaagtagagggaagtatactgttcccaaatatacttccctctattctgtaagaaggattatatatccctgcctattaccatgtgatgtgttcaggccagtgaaatgtgagtagaagtgacatggccgttttaagcaaagttttaagagctgttgtgaatttccactagttttttttttttttgagacggagtctcgttctgttgcccaggctggagtgcagtggcacgatcttggctcactgcaagctccatctcctgggttcacgccattctcctgcctcagccacccgagtagctgggactacaggcgcccaccaccatgcccggctaattttttttgtatttttagtagagacggggtttcactgtgttagccaggatggtctcgatctcctgatctcgtgatccgcccacctcggcctcccaaagtgctgggattacaggcgtgagccactgcgcctggctccactagctttcttgctctttgccttatgccatgaggacatgtcccaaataagggctgctccttcagcctggatcctggatgaagatgacattcagaaaaggagtagagctacagccaagataaaatgtgagcaagactaaaccatagttgttgtaagccactgagattgcaatctttgttaactacagctgaagaaatacaactcagtcaatgaagctaaaggaataatgacatctcgttcaacaagggacagcatctatgatggggtctcacaagattatattggagcacatatagaaagctgatatatagcacttgatattggcattacagatcaaataggggaaatgactgatattcaataataatttggggacatttggttttccctatgaaaactaaaaagtaaaaatacatataggtttgtgtaagtatatgtttgcacaatgataaaactgcctaatgacacatttctcagaaggtacatagccttcattaagcaactcataactgtataaatctaatcaagatgtcaggttatcctaaaaaatgtcagtcattaacttgatatgaactctatctagaagtggttgacgtgtttgatatgttaacttacctttaattcctcttgtaatgaagcatacatttcatttatcttatgtacctcctttaaggatccatcttcttcaaaaaatttagagctgtaaaaaattaccatttcctcaggcaaatacacaaaaccattttaatgataaggtgaaaaacttattcattgtcaaggaccaatagaagagtctttttactggttttgtaggaaccataattttgtcaatctatgtgtatagagaaaaaccaaccacaaaacctacttcattgatcttcacattagcaaactttttagcctcctaagtactattgccaggtctcccaaaaaggcgaggatgggcgggggatgggggaagattgcataaaaatagataaaaattgaaggaaggaaaaaaagtctctattggcaatgggaaccggagtcaatttttaaaatattttactgaattcaagttacctttacttgaaagagacatcattattttatgatccataaaataatgaagaaagtaattctaagaaggcatgacttgtaggacatcccaatgtcagagataaatatgaaaaatgtgcatcttgccgggcgcggtggctcacgcctgtaatcccaacactttgggaggctgaggcaggcggatcacctgaggtcgggagtttgagaccagcctgaccaacatggagaaaccccgtctctactaaaaaaaatacaaaattagccgggcatggtggtgcatgcctgtaatcccagctactcaggaggctgaagcaggagaatcacttgaacctgggaaggacaggttgcagtgagctgaaatcatgccattacaccccggcctggacaacaagagtgaaactctgtctttaaaagaaaaaaaaaaaaaaaaaggaaaatgtgcacctcagaatcaatgaaatacggtattcagtttttaaactgctggcactgtggggacacaaaagtaagtaaaatctaaccccttattctcaaagtttacactctagtaggtatcctatagtaccagtgttgctgtttttgacattacttccttacttaatggccacaaagaaagttatatataagcagcctatagtatgagtgagtcttggctaaagtctgatttttacaaatatctaatttcacgcctttaatccgaaccattgccttagaaaattataatttttaggctatatacttattctaacctagaatagatatgctaaactttacaggatatgcaacaagatcctcccagtactatttttttaaattttcttttgtagagatggggttttgctgtgttgcccaggctagtctccaactcctcagctcaagtgatcctcctgcctcagcctcccgaagtgctgggatttgcaggtgtgagccaccatgcctggactaaccactaccttttttgtatcttgtaagtacacaagcagtaacaggagtatgaggaaggtaaaaacagcctagtttacttgagtaatggattaattttcccttgaatttttattctgctgttgtttgagaaataagaaaattaatttcaaagatgaatagaagttttgtgagaaagcagttgaatcttacctgtgtgtttgtactgctcggctaaaaccagtggacatacaggaacctgatacagttttataacccagttgttcagacatgcccagattggcaaccactaaaggtaccctgtgaaaaagtctgacaaaataaaactttagagtataaacttagaatgaaaagaaagattagtatctacctgctggaatagattacttgtcccctacaagatttaaaaaaatacaccccccaaaacccattctttactacttatccaaaatagaatttactgacttgaaacaactgtttttttttttttttgagacagggtctcactcagtctcccaggctgcagtgcagtggtgcgatcatggctcaataatgcagcttcaacctcccgtgctcaagcaatcctcttgcctcagcctcccaagtagctgggactacaggcacccatcaccacacccgactaatttttaagttttttgtagagatgaggtctcctaatgttgctcagtgatcctcctgccttggcctcccaaagtgctgggattacaggtatgagtcaccacactgggcccagatgacatgtaaagctgtgaaatgtgcttagtataatagtgtggaaaaacagtttaatggctcttttgattagtacatgtataaataaggcagtattgagatttaccctatcttccatgaacaataaaattattcttagttggtactcttttaacgtaattctcatattccacgaaaatgtagtttactatatataaaacctgtaaggagtccctggttagactcattttactggaccatcaagagctactttgtttctttgttcagttatagaaaaactgctgaagtatctaggcttaaattctaaattctaaattataccctttatcaatcaattaaaaaaaaastttttttccaccttaagtagtaaataagagcaaatcttcagtgccagaatacaagtcatcattccacactgggcttctaatttccttgtctgaccattattttcccacctataaattaacagatggtaagatctacttctgaaggttatcgtgacaatctgatgcgacaatatatgagaacactttgtaagctgcaaaaagtactaagtattagatatatttttctattagtttaatacagccagtgactggccaacatttaccctttttgaggtttatataaggaatgttccagtcgatgagtagagcagctttctgttattatacttggtgttaatagcagaaaaacaaggtcttggtttgaaaaatgctcctgcaagtttttgtgaagcagcctctctctaaacgtcatgatctgatctgaatgacgacggaatttgtaccaacctaccacattctgaaatacagaataaaaaggatatacatcttaatagttacaatgatatgtcttactattataattaaataaaataaacaaccttaaaatggctttcttaatatttagaaagatttggggcatatataaacaaagaatacatttaatcatatgctttacttttgtaaaacatacaaactgacttactttccattcatttgaaagggtacggttttcatcaatatagattaaaagggagaaataaattcttgactttctgtagtttcttttatggcatttgctatcttgcaatctcactctttagtcaaaatttaaatgaaaaaaatatcaatgccattgattcacttaaaaggcaatccctccctgaaaataaattaatcgcctgtatggacacttggtttgttaaataagttaagctgaaccctacagcttttacctaaaatttttatgggaatgatatcacctacccgacaaacttggcttcaagattaagatcacattaaaggattttgtaaactacaacatactaagcaaatgtgttaatactactagacctttttttaacttggaaaataattctcctttacttaagacaaagagaaaaccaatcactttgcttagagatctgtgagtttcagcaactaaattatatatttgcacatttgaattgaggaaattaaaattagtttttaaaaataaggcatttttacaggtgcaattttaaatactcaaataataattggggggaaaaaacacaagcattttcagccaaacatatttgttgaaagaaacatttttttttttttttttttttttttttttttttgagacagtctggctctgttgcccaggctggagtgcaatggcacgatctcagctcattgcaacctctgcctcccgggttcaagtgattctcctgcctctgcctcctgagtagctcagattacaggcatgcgccactacgcccggctttttttttttcttctgtttttagtagagatggggtttcaccgtgttggtcaggctggtctcgaactcctgacctcgtgatccgccctccgcagcctaccaaagtactgggattaaaggcatgagccactgtgcccagccaagaaacatctttcaattaatctatttttattttcaaatcaaagttttaagagaaaaagtagtgccttgaaaaaattttgtgtttggggaaaaaatccattttgatcattcaacaacttttaaccaaacacaaagtatgttatagaggatccaaattcagtgctatataggaaacatccctgcagtatctatcaaaaataataactgaggccaggcatggtgtgtggtggcgggtgcctataatcccagctattcaggaggctgaggcaggagaatcgcttgaacccaggaggtgcacgatgtagtcagcctagatcacaccactgcactccagcctgggtgacagagcaagactccgtctcaaaaaaaacaaaacaaaaaaaaccaaaacactacagccaagtaaaataacagaactgattaggtcacagaataaatggtagtgggaagaggtgtggtggaaatataagagaaagagataaatgttaattagtcaaagaaaggattagaacaaaattaatatttttaattactagttttattttcagagcaaccactttcaatttctgggaagaacaaaccttttcttacttactttacaggatactatgatgtcaaacactgcttaaaaattctgtcaaagtactgtgtgtttttaagaaccaaaaacaatgcaaataataccaaaaaaagggaagataaattagagaatacctttttgacatttgataatattttcttcagtgcttgctcatttacttcgcctgaagaattataaaagctgtaaaagccaaaattaaaggtatttcaaataygctaaaaatataagtaattttattagtattttaaattttagttattcctaacccaactaccaaagcccatatacctatttgcctgtcagatgaagtcctaaaataaacagtagagaaagttctcaaattaactgacttaaagtggtagaaacataaagtccataaagcaatgaaaaggaaaaaggagtaacttaagagacaagttttgggaatcgttttttttgaacctaaaacagtaaactatccatgaaatacaggtattaaaatgtaagttcacataaccggttcacaattcattcagtttactcatttatattttttataacattgatacatacaaaagaatgtataaccagtaatgaagcacaataacaaaaagactattattcactgctagttacaaaagctatgtattttaggaggtggctgggttttttggggtgggggaagggaataggttttgtttggtttagaacagtttgttcaggagttggaatatccaaaatgtaggaagaattaaaagataattccaagtgattctacttccagctttctttcccttccaataacagagactgcaaataatattttcttctttttaccactcattaagatcaacaatattttctatgatggttaaatatgttatacaaaatcctttataaataatttttgccagggcatggtggctcatacttgtaatcccagcattttgggaggctgaggggggtggatggctcgagcccagaagtttgagaccaacctgcgcaatgtggcaaaaccctgtctacataaaaaatacaaaaattagctggggtgtggtggtgtgtgcctgtagtcccagtttctagagagagcgaggtgggaggatcacttgagcctgggaggcagaatttgcagtgagatgagatggcactactgcactccaggctgggcaacagagcagtctctgtcatctatttatatttccaatatttgtctacttacagttccaatatgaaaatacaagaaattcttctctaaagacaagaatttattcctatatttccctagaatggtccacttctgagctcaaatcggagcataaagcagtatattagggtaagattagtaacaggataactgcacatcatctctggaagcactaggtttatgtgaagtttctggggagaagatgaagggggtggcattttatgtagaaactgayataacatgcagaattcatgtcaaactgcataattttttttgagacacggtctcgctctgtggttcactatagccttgacctctgccctcaagcaatcctttcacctcaccctccctagtaatggggactacaggcatgccaacacacccagctgttttgtattttttgtaaagagggagtttcgccatgttaccaggctggtctccaactccctgagctcaagtgatccacccacctcacctcccaaagtgctggaattataggcgtgagccaccatgacccacctgcataattttttaaaaagtgactttaagtttcagaagccgggcacagtggctcacgccttaatcccagcactttgggaggctgaggtgggtggatcacttgaggtcaggagattgaaaccagcctggccaacgtggcaaaaccccatctctactaaaaatacaacaacaaaaaaaaattagccaggcgtggtggtgcaggcctgtggtcccaactactcatgaggctgaggtgggagaatcgcttgaacctgggagttgggaagctgcagtgaactgagatcacaccactgcactccagcctgggcaacagagtgagaccttgtctaaaaaataaataaataaataaataaataaataaataaataaataaaatctctatctatccatccacacactaagtttcagtaggctatttcccaggtacttcctccacatttctgaggtaaccaaatcagtgtatttcagtggaagtctgcatcctaacgtatttagtgcagggttaacaaactttctgtaaaggcttgtatagaaaatatttcaggctttgatggccacatccagtctctattgcatatttttcctccttttcttacaaccctttaaaaatgtagtaaacaaggccaggcgtgggtgtctcacacctgtaatcctagcactctgggaggccacagtgggtggatcacgaggtcaagagatcaagaccatcctggccaacatggtgaaacttcatctctactaaaaatacaaaaaaaatcagccgggcttggtggcacccatctggagtcccagctacttggaggctgaggcagaagaattgcttggacctgggaggcagaggttgcagtgagccgagattgcgccactgcactccagcctgacaacagagcaagactctgtctcaaaaaaaaaaaaaaaaagtagtaaacagtctcagatcgagggccacataaaaactacatcgtggggctctattttagcaacccctgtaattagagcaggaagaggaagaaactgcatagtatgatgctggattagagctcaagaaatccttattcttctcatttttgccctaccattaactagatctgtggtcttggttaaatcatgaacttttcaggcctattattgtgttgtttaatgaagtatgtagttaccctctgaatgagaggtatttcacatgtctctcctaatgcctttccaccccgctttaatcctgtaagagctaaaaggctcaggcattggtttctcatcactgaaatagatggtttcttcaggtctcagcttctattaagttagtctaattattaatgtggttgaaaaaggtactgaatcactttttgctgttcctttaaatcctttgttggtccagaagatccttcaataaagtcctttttatgagtctccactaagaattcctcagtcatctaacaaatatttttgtatgtccattacacataaggcagtataggaactgtgccttttcttggtatagcagtttaaaagaccacactaagctccttttttctgttctcctcctacagttagttctcaccttaaccatatgctccactgtaattcttatataactttaaagatgtgtatagtacatagtctgtaagatagttatgctgatttttcttttcctttttttggagacagggtcttgctctgtcacccaggtcatgcagtggcatgacctcagctcacttcagcctctttctcctgagctcaagtgatcctcctgcctcagcctccccagtagctaagactacagaagcatgccatcactcctggctaatttttgtatttttagtggagacagtgtttcaccatgttgcccaggctgtttgtgctgatttttcttgcgtggtttatataaatcataaaactatttcattaaaattacaccatgctatggttacatgattacatgtgtttgctttatgaaaattcatttatttgtgtacttttctacgtgtatgttatactcaataaaagctaaaaaatacacaatgtattagagttaacagtactatgactatctgtaggactaagtgcaagcattcatcctagaaaagcaataagaaacaggttaaagaacataaccagttgagtgcaatggctcacgcctgtaatcccagtactttgggaagcagaggaaggaggacggcttgagcccaggagtttgagaccagcctgggcaacatggcaaaaccctgtctctaccaaaatataaaaattagctgggtgtggtggctggtgcctgtggtcccagctacttggggggctgaggtggagagggtcacctgagcccagaaggtgaaggctgcagtgagctgtgttcacgccactgcactccagcctgagtgacagagtgagaccctgtctcaaaaagaaaaagaacataaccagctaacagacaaaaaataacactaaaaaatataagtgaggaaccagttgctaaaatatgctgaaataaaagggtagaaaaaagggctgctattgatgatgtataagaacacttcatttactgagtttataatatgcaatgaggtgactgggtgtgagaagaaaaagcaattctcaacgtaaactggtgcctgggaaaggtaatgaagatcagcmttaagtaatataaatacagagaaagaactrctagggttgacaatacacaagtgattttttcagctatttaaaaaaaactttccattctactcagtaccaccatgtataggttataactaagataatctgttagttttaaaaactatttcacttgcagagagtaattttcacaatggatcatttacttactagcactactacttacctaaaaagctgatagcatggaatatatttctgaatgtctggaagaaaaggatttttagttatgattacattaattcaattcagaatcacctgaatgctgcatattgagcctttacctcacgccaggaagtactttaccactgattatctgatttttatcctcacaacaaatctgcgacatatactatcattattcccctttcaaagatgatataacaggtaaagagagataagtggctcacccaatccagtggtagggccagagttcaaaacccagagcctcgcctggaaccacaatgctatatttcctctaaataacggtctaataagtccaacacaaaagataaattcaaagttgtcacattttcaccgagttctaaaaaggctgtgctctaaatgtgcccaattaataaactcacctgttaaaggaatttaaaatgatgaaaatctccttaaccaaagcaatggaataatatgttgatcttggattttacgtgtttaaacatctgtgataatccaacatttaaaataactggagcaaataccttagagcttagcactgtacctaataccacaatgcagttgctcagtacacatttgcttaattaaatgcctagaactatgttagatactttgggcggcacgctaatttcaattagggaaaaaaaatgctctaagggcttgcttttattttttaatttttaaaaaataatcttgtattgctataaagggcttgcttttaaaactcaagtgtccgaaccaaaaaaaaaaactacagtaaaattataaactacagggttttaatgcttccgggttgccactgcagtggcatttctgactgtgggagcctcagtttcccagtcatctgatgagcctgagcagcagcaaagtaccactgtaagccatgagatgtctcgtctgaactggaaaccctttgtatatgacgccttgcctctatcactgctgagtttggaactttccccatggaccttgccaaaacacgacttcaggtaggttcaaggccaaagcattgatgtccgtttcaaagaaacaaaatatagacggatgtttcatgctttgttttggatctataaagcggaaggtgtattggctctgtattcaggaattgctcctgttttgcaaagacaagcatcatatggcaccattaaaattgggatttaccaaagcttgaagcwattatctgtagaacgtttagaagatgaaactcttttaatcaacatgatctgtggggtagtgtcaggggtgatattttccactatagccaatcccaccgatgttctaaagattcgaatgcaggctcaaggaagtttgttccaagggagcatgattggcagcttcatcgatatataccaacaggaaggcaccaggggtctgtggaggagtgtggttccaactgctcagcatgctgccatcgttgtgggagtagagctaccagtctatgattttactaagaagcacttaatattgtcaggaatgatggaagacacaactttaactcactttgtttccagctttacatatggtttggctggggctcttgcctctaatccaggtgatgtggcaggcactcacgtgatgaaccagagggcaatcgtgggacatgtggatctctataagggcactttggatggtattttaaaaatgtggaaacatgagggcttttttgtattctaaaggattttggccaaactggctttggcgtggaccctggaacatcattctttaaattacatatgagtagctcaagaggctttaaatctaaggactgaattatatgtgagcccagccctgccagcctttctactccttttcccttttcccgtgttctaatgtattttggcaaagttctaagtgtttaccaaaccgttggtctcctaagggcctcctgatggaagaacagtaggatgttggttcaaagttatttatatgtttgtgttaccatgttaacttttccctgagagaaagtgttaacattgagactctagccccagattggtatcttctatgaagatggatactaatggatgacactgaaaatggcctgctttccaaatgtgggttaaatgtaactggttgggccccagacttgggctagagcagaaggcataggccagggtggttactgctatatatattatagacctcggttctcattaaagtgtttattgacagaaaaaaaattataaactgtattagcatatgtataaaacatgacaaaagcccagtttccttaagtaatgtgattacaaatcactaaaagcaaaacagtacaaatgcagccaaagaataggcctatccttttcagagaaaatggccaagaaaaaaagtaaaaagtatcaaaaaaatacttaacctcttttgtaattaagaaatgcaaattaaaatgctatttttttcacttatcaaattggcaaagattaaaagatttgataatacctagtgttggcaagagcatgggggccgggcatggtgactcacgcctgtaatcctagcactttgggaggccagggcgggtagatcacctgaggtcaggtgtttgagaccagcttggccaagatggcaaagccccatctctactaaaaatacaaatattggctgggtgtggtggcagtcgccggtaatcccagctactcgggaggctgagacagggataatcacttgaacccgggaagcagaggttgcagtgagccggaatcccaccactgcactccagcctgggtgacagagtgagactctgtttcaaaaaaaaaaaaaaaaaaagagtatggggacctaggcacttttatatactgtggagaagcctaaaatggcataagttttccaaaaggcaatcagctagtctacctccaggagtgtgactttcaaatatacactcaacagcacaaagaaatgtacaatactaaatgttcatggtaatactgtttatgttaacaaaaaaacccagaaaatcattcttagatggttaaaaaaattatggtacgtctatacaacaggatatatgcagccagcagaaagaatgatgggccgagtatggtggctcacccctgtaatccaaacactttgtaatgacaggaggattgcttgagcctaggagtttgagaccagcctgggcaacaaagtgagaacctgtctctacaaacaataaaaaattagccaggcgtggtggtgcatacctatggtcccagcaatacaggaggctgaggcaggaggattgcttaagcccaggaggtcaaggctgcagtgaccagtgtttgtgccactacactccagcctggctgaaagagcaagacctcatctcaaaaaaaaaaaaacaaagagtgatgaattatacacacagatactattctgtacttgtgatatcttgggagatattaggcacatatagtaagatcccatttgtgtaaataaaaagtatacacatttggccgggcatggtggctcacgcctgcaatcccagcactttgggaggccgaggtgagaggatcacttgaggtcaggagttcgagaccagcctggccaacatggtgaaaccccatctctactaaaaatacaaaaaaaattagccgggcatggttgcgtgtgcctgtaatcccagctactccggaggccgaggcaggagaatcgcttgacctcgagaggcagaggttgcagtgagccgagatcatgccacttcactccagtctgggcgacagaatgagactccatctcaaaacaaaaacaaaatgtatatatacacatatatatacacacacacatttacatttgtgtgttttatgaatattgcaagctagtaagaatccatgaaacagtagttgccactaaggaaactaatgagagtttaaattttttatttcctactttatatatttctatttttaaacttgtaaagtagcaaacaaaaataacatacagtatgagtacaaactgatataatctttccggaaagcaatctgctaatgcagatcaaaaaccttacaagtgttcataccctgtgacacagtaataccatatctaggaatctataatagataacgccaaatattgatatacaaggatattcactgtagtatactttatgataatgaaaaactagaaacagctgattataacatatttaaaggaatgtttaaatcacagtaaggccacagggtagaacacaatgcagttatgaaaaatagtattgtaggccaggcatggtggctcacgcctgtcatcccagcactttgaaagaccgaggcgagtggatcacttgaagtcaggagttcaaggcaagcctcgccaacataatgaaaccccatctctaataaaaatacaaaaagttagccgggcgtggcagcacacgtctgtaatcccagctacttgggaggctgaagcaggagaatcgcttgaacctgggaggcggaggttgcagtgagccgggattgcgccactgcactccagcctgggcaacagagtgagactctgcctcaaaaaaaaaaagaaaagaaatgaaaaataatattgtagaggattatgcaacattgtaaagtgatcatgacacaatatgatgccaaaccttttataaagtacactaccaattttgtttaaaaatacatacacatatatagagaaaaactatattagacaatcagaaaactccctatacattttatttcttttaaccatttttttccctatgcattttaaaggttctcccctgcttttccctaaaagagaagctgccaccagttataactgctttagcacccactcctcaaaccctttacagcctggtctcttccccattacgctccagaaattactgaggattttcagtcatctaataatctaattactgcattttctcagttctcatcttccaacttttctgcagcatttaacattttatctttttccttggtcttcctattgccgggccatcttcctactaaacagcaggtgtttcatccttgtttccctggcagtaatcttatctgcttcctaagtctcatactatttcttactttagaccagtccatggtcataattttaactgcaaaatgagtacaacatatccttttaaattattttaaaattaatatatatttcttatttttctttttttgagacagagtctcgctttgttgcccaggctgtagtgcagtggcacagtctcggctcactgcaacttctgcctctcaggttcaagcaattctcgtgcctcagcctcccaagtaactgggattacagacatgcaccactacacctggctaatttttgtatttttagtagagatgggtttcaccatgttggccaggctggtctcaaactcccaacctcaggtaatccgcctcggcctcccaaagtgctgggattacaggtgtgagccaccttgcccagcctctgtatttcctaatttaaaaataataatttacgctgacccctttcagcataaactatcaaatataggagacacagatgattcaaatataggagaaataaataactcaccaattgtataaacaacttcaacatcatccatttgggaatcagtaatgctgttcttggcttcaccttttacttccccaagaagaaaaccttcctatgaagataaagaggcaatatatagaatacactgatagaattactgttcacttaactaaccgtatttcctgagtattttactatgtatacaatatgtgctaccagtcgggggcacatatgaaagatctgagatgcttctagtttacttgggaaagatgaagagttaaataaaaatgagaagaggctaggcaagatggctcacgcctgtaatcctagcactgggaggccaaggtgggcagatagtttgaacccaggagttaaagactagcctgggcaacagggtaaaactccgtctgtacaaaaaatacgagaaacattagttaggcatggtggcacatgcctgtagtcccagctacttgggatgacgtgaacccaggaggttgaggctgcagtgagctatgatcacgccactgcactccagcccaggcgatagagtgagactctgcctcaaaagaaaaaaagtagaaataaagaggagaggaagggaaagagattagtctagcctgaaataatcagagtagccctggggaggctacagattagccctgtagccctggggaggctacagattagactaaagctatgggcaatatttgtgtaggcagagcatgaagcactgggcacacttggaagcatataagacttaaagccagaaatgagcacacactgaagaatgagcagagcactttgccttggagcagaaggaaatcaaagataaataagaacgagccaataatgggacaccccgaatgactactctggatttaaccacatgtgcttctgggagttacagaaagcttctaaggtacgaaatgacaagattagtgttttctgattaaaactcatgcacaatatgaaagatttaaattcaatttcagagtctgctttctaaaaggagtgctgtgagcccgattcttttaaaactacttgtattctgccaccccagtggtaatttatctgagttttggggaattcaatttctctaggcacacttaamgacccaatgtgcttgacaatgaagattttatatcttttttttttttttttttgagaagaggtctagctctgtcatcacccaggctggagtgcagcggtgcaatcactactcactgcagctttgacctcccaggctcaaacaatcctgctgcctcagccttccaagtagctgggtctacaggcacgtgccaccacgccgggctaatttttaaaatttttttgtagacatgaggtctccttatgttgcccacgctggtcttgaactcctgggctcaaatgatcctcctgcctccgcgtcccaaagtgctgtgattacagaaatattttatattctttataattaataatgcttttttcccctaaaagtaaaaaaggattatttccataatgtgagtctttactggaatcacgcggggggatatccagaatctagtgttcttgattttgatactcaaaagacgaactcagggaagggaagcaggggggcaatgcaagtgcaactagccagaaaaaccaccctttaaagacttcaggaaaaagatctgagaaacaggggcctccctagcactcaggtacttcccaagggctaatcgtttaagctaccgaggatttacggtcccactctatctacactacaggtattccaaaataatttccacagctacacatatattttaaatggtcatatatttgttctttattaggtattactttgtaaggttatctgaaattgtatacataaaacataccaattccaacctttattaggattgtgccaaagagcaattttgtaatgtttagattttgtagagaccgggtctcactacgttgtccccgatggtctcgaactcgtgggctcaggtgattcacccgcctcggcttcccaaagggctggaattacaggcgtgagccaccgcgcccgacctatattaaggcaattttgagtaaaatagacgttatatcttaaaatgaacttagcagaaattactaggcattgttcagcagggtattctccgaactgtaccacacagcagggaagtgtatttcagatgcttagactttctttctgcaagttactgaaagtgctacaggacattaactacttccgagctcaacgttttacagcgtttctttaatttcatagaacttttagaaaataggcaacgtacttttaaaaactgttttaacaaatttaataacgcaaataaaaagatatctgatataccagattaagctgttccatccactaagatttgccactggacgcaacatctatttttattcccttaccatcctaccatcgcaacaaacacgcacagacgctgctctgcatgaaaaagtccgcctggttttgcaaacgcctgtcgggcgtcgcgagaaacggaaagtttaccgcaggctccgcagagcagcggaaagacgctccgtgaactttccatcttttcacgcccaagtttccacagctacaggggcgccgaggaaagatgggagcgtgtgggacacttgggtcggaaaagggaaataacggaggatagcagagggagggctaatgctggagaagacttcgtgggcacgaggcacctcagggaccgctgagggggagagaaggcagagccgcgaccgcagggaggaggcgcggcggcgtcgggggagcgggcggggaccggagcaacagcggggaggcaggccgcgcgcagggctcttcccaggcgacgccggaccccgccccgtccctcggctcaccgtgtccgagtccgtgttgaggtgctggaaagcgagtgcgccgagcacaaagcccgagagcaccgccgacgtactctccccctccatgctaccgccgcctcaggctacacaagaggacgagggcggggcgcgcggaggcaagaccctgtggtggcagcgaggcggggcccagcgaggaggcggggcctgcgccggcgcacgggctgctgcgcgctccgcagaggggcggggcgagggggctgagggcgggcgcgggcgggtccccagccgcgcgctcggctcctccttcgcttctgctgccggcctctcccggaaggccgctgcatgtcggtaccactgcagagggctgcgaattgcttttggtggcctgcgcctgctgagcgacctgtcacaaacatgcaaagctatcaaaatgaacacggttgacagggtcattttaagacaagcaatgattacaagaataaaagagttgagtagcaacattacgatgccacagtggatatgccacggttttggttttcaagctgcattttagcacccttcactcactgaaacttacagaatactaataaccatttggggattgtctttgctagaactctctagccatgttctgtgtctgtgtgtttgtgtgtgtgcatgtgtgtgttcccttgcttttagaaaacttcagcctaatttaaacaatacatggatatttaatgttctgacagtttaatgataggcataatcatagtaagctggttcatttaatgtaaatggtaaggtgagtggaccagggcttggcaaatgtattttmcacacacacacacacacacacacacgtaaaggtatgtttcttaaatgactgaaagtaagcataatagcagactactgaattagtgtggcacatttgtgggttttgttgtcaagcagttgtctgtggctgcgtaacacacaatacatatgtatataattaatgattatatatttattccctagaattaagtttcttgccttcattttgtaggggtgaagggaaagctctgccctctgaaggttcactggagtgaactaacaaaagaaaagatgaacagaaggaaaagggatacgaatttattttattttttatttttttgagactgagtctcgcttggtcacccaggccagagtgcagtggcaccatctcagctcactgcagcctccacttcccgggttcaagcgattcttctgcctcagcctcctgagtagctgggattacaggcacgtgccaccaagcccggcttatttatttattttttttgtatttttattagagacaaggtttcaccatgttggccaggctggtttcgaactcctgacctcgggtgatctgcccccttcggcctcccaaagtgctgggattacaggcgctcccgactggcatacaaatttattaatgtgccctggagaaaatcacagtagagtgattacccaataatccaatgaggttcagatgcttatgtacactttttcataagggagagggagatggaggaatgtaagtaattttgaggatcacaattgattctttggatgagcttgagggattgcttgcaaagaattctttgtggaagttggatgagcccaaacagcagtcaataacttagtacaaagttcctctgggctctagatttgatgtttgactttcagtcttctttccacagtcagtagataatgaaatttcaatgaaggggtggaagacaattgtcgtagggttgataaagagtggacagtcgtgcaggagtatgattacacaaagggagtatgatgtaatggtaacaaactgggggaacttagaatgggctgtttgttcaggttcttctctgtgtcctggtgtcttcagaggtaaggatrttccttttctctatgtaaagggagggtrcctctcaaatgatggtcttatgacctacttcagggaaggacaccgggttttatggcctgcctcaagggagatggccagagtattctttctatggtttatggcctgcttcagggcaaaagragtgaggggaaggtgmaaatgacctctttgctctgctattttctcaaatgctcaggtgctatattttggagtagtgtgtcctgaaccacatcactagttttacttcctgcaacccagagcagcacagtagctgaaccaaatactccttcggaagccaaaaaagcttgggtatgagtggagataaggagaaatagtagatgagagtaaaggaataaataaacgggttatataatgagggaaatccaatattcattaagacctccaaagaaactcaaagcaagggatgatattgtctcttatcttaattatatcagatgcctgaaataatgaagatatatattgctaagaactctgcttttgaaacctgaaaagatcaaatggaagcctgagtggccacaccctgggaggcattttcttttctttttcttttttttttttttttgagacggagtctcgctctgtctcccaggcaggagtgcagtggcatgatcttggctcactggaagctccacctcctgggttcacgccattctcctgcctcagcctcctgagtagctgggwttacaggcgtccgccaccacgcccggctaattttttgtatttttagtagagacagggtttcaccgtgttagccaggatggtcttgatcccctgaccttgtgatccacccacctcggcctcccaaagtgctgggattacaggcgtgagccaccgcgcccggcctggcattttcatatgataggctgatggactggacaggttattagtaattgaatggggttttagaaatgtgcaactatcttttaactcttatgattctttgctataaggaatcagtggtcaaagatcaaggatttgtctgtagtatagtaaaaaagaaaataaatatttagtctttgtcctgagttcctggcgtgggagcttctaaaaccttaggaatttactggtttttgtatgctaaagaatgactcatgggagagtgtattcgtcccttcttgcactgctataaagaaatacctggccgggaacagtggctcatacctataatcccagcactttgggaggctgaggtgggcagatcacctgaaatacgagtttgagaccagcctgaccaacatgacaaaaccccatctctactaaaaatacaaaaattagccaggcctggtggcgtgcgcctgtaatcccagctacttggaaggctgaggcaggagaatcacttgaacctgggaggtggaggttgcagtgagccgagatccttccactacactccagcctgggcaacagagtgagaatctgtttcaaaaacaaacaaacaaacaaaaagattgggcacagtcactcatgcttgtaattccagtgttttgggagtctgagcagagagtatggcttgaggtcaggagtttgagaccagcctgggcaacatagcaagactctatgtcttcaaaaactttaaaaaattaggccaggtgcggtggctcatgcctgtaatcccagcactttgggaggccaagatgggtggatcacgaggtcaggagttggagaccagactgccaatatgatgaaaccccgtctctactaaaaatacaaaaattagctgaccatggtggtgggcacctgtaatcccagctacttgggaggctgaggcaggagaatcacttgaacccaggaggcggaggttgcagtgagctgagatcacgccactgcactctagcctaagtgacagagcaagactccatctcaaaacaaaaacaaacaaacaaaaaattagtccaggtgtggtggctcgtgcctgtaatcccaactcacgccagtaatcccagcactttgagaggccaaggcaggtggatcacctgaagtcgggagttcgagaccagcctggccaacatggtgaaaccctgtctctactaaaaatacaaaattagcgaggtgtggtggcgtgtgcctgtaatcccagctactcgggaagctgaggcagaggtgcttgaacccaggaggccaaaggtgcagtgaggcaagattgtgccactgccctccagcctgggcaacagagtgagactctgtctcaaaaaaaaaaaaaaaaattaaaaaagttagttggccaggcacggtggctcacacctgtaatcccagcagtttaggaggctgaggtgggaggattgcttgagcccaggaggcagaagttgcagtgagctgagatcatgccactgtactccagcgtgggccagacccagtttcaaaaaaaaatcagtcaagtgtggtagtgcacacctgtagtcccagctactggggaggctgaggcgggaggattgcttgagtccaggagcttgaagctggagtgagctttgattgtgccacctcagcctgggaaacagaatgagaccttgtctcttaaaaaaaaaattagaaagaagaataactatgaaaataagagaaacattttagctgctgtattagaatcatgttaatgatagggttgattgcttcagaaggatgtgcttgcttgcttaaattgggatccaataatattcatctctgttaaatttttggtattctattttaaataggagggttaatggaacctcaaataattgcaagaaaaaactgtatcttttacttttctatttgaatttttagatattgatttttttcgcatgaaaaggataagaatatgatttttaagtaatgatttcactcacaacagatcaacttttaaacaaatatgcttgcaaataaatgagtatcataaagggaaatatatcttatcttcatagcatattattaattatactatttattcaaaatgaatggagaatgtgatggccatggacatgctccactctggttgaacctgctgggggagccacggttggcagaaagcctcccacttcagctcctgtgagcattgctgccctctaaccttccctgccacagcatcagtgaccatggtggggtattaacacaggcccattcttataagatgcaggattcctgtaatgggactttggctcaaggactctccatcagcctggctaagattatgttagcttgcactgaagtctgagactcctatccttcccttcctcctttcccaggtgtcagataagcatggttttctgcagcctctccttgcttactcctgctctcttccctttatctttcacagacatttccccaataggtctctctcttgcacatggactcctgtctttgtgtctgcttttcagagcatcaaaagtgaaacaaagtgcttgcttttccatatcacctataaagggctttcagagccataaagatcacattttcaaatatctgccaattaaaaaaaacttcaaatacaaacatactcaaaatataatatgatgaatttcattttttaattatagacatgatttatttctaatggtgaacaagtattattttaattttttttttttttttttttttttttttttttagacaggatctcaatcctgttgcccaggctggagtacagctgtgtgatcatggcttactgcagcctccacctcccagggtcaagcgattctcccacctcagcctcttgagtagctgggattacaggtacaygccaccatccctggctaattttttgatggtttgttgagatggggaggtctcactatgtggcccaggctggtctcgaactctcgagctcaagcaatcctcccgcctcagtctctcaaaaggctaggattacaggagtgagccactgcacctagataagtattatttgttaaggctatgttatctgggaaatactattataaacacattttgttttctttgtaatatttttgtgtattaaaaacgtaatgagagttttaaaaatctctgataaaacttgatataactctaagattatagacacagaaataaatttatctgaggttccagggaaatttgaagatgtattaatgtgataacattccaacttgttattatttcattccatctgttaaagaggcataaggaaaattacacaaacaccgttaagaaatatgccccctcaggatgcacctctacctggtgacctgcaggggacactgtgatagtagttctgaaggaaaaggcctttgattggggttcagagattattattatgtaaaaatagttaatagggcttaatctgttataatgtgttaaaataggctactttgaaaatccatggtgatttagtaaaaatgacttaaatgctgtatcttggataagaatcattgttttttttttaaaaaaatacccttgcasatccacaaatataaaaacaatagaactctggcaaaggagataaagtaactgcagaaatagtagtgctgactgatgctttaagaattattgcagacagggttaagaagctaatttgaattccaacagagtcctccttaggataaattccaagaccaaagtaaaagtttcagcagtgtcagttcagctaatcctgagaaggcattcagatagaaaattccaagaggcattagtttgatctgagcttgtatggacaactctaggtataaggttgtttctggtagaaaattaatttctatagcttcagtgaataatttaygctagtttaaataatgaataagtgactggcttgggttaaacaaaaaaagcacctgcctctgggtgaggtggctcacacctgtaatcccaactactagagtggctgaggtgggaggattaattgagcccaggaatttaatgttacagtgagttatgatggcacmactgcactttagtctgggcaacagagcaacgtgctgtcacaaacagacaaaaagtatgttatatatttatataatgaaataagagaaagttcccataatccttccatccaaagatattacagtgaatggtttggcttatattctttcaggtttttatctattcatatgtgtattaatgtatataggtatttgtgtatattttgattattatattatattacattatatttatttatttttttgagagattctcactctgttgcccaggctggagtgcagtggcactatctcagctcactccagcctctacctcccgggttcaagygattctcctgcctcagcccccaagtagcagagactacaggtgagcaccattcccagctaatttttgtatttttagtagagacggggtttcgccatactggccaggctggtcttgaactcctgagctcaggtaatcctcctgccttggcctcccaaastgcagggattacaggtgtgagtgaaaatcatttaaaaatcaaaatctattttcacttttaaaaatacatattatactttattattaatttttgtaatttaaacttattaatrgggttcaggacacaccaccccaaaataggactgtagaatccagaatgtgctatcccaaatatgcctctttgtcataagaattattttgagctggttattttgagaaacgacagacataggagcagttctggaaagttacccttttgtaagagaaatttaaagctataaaggaaatatctatttgtaagtgtatctccctctctgaatcaggaagagaaggacractaaatctttagagacttaatcattggaaaaggcatcaccttaatctgtattaaaaaaacttaccctggatttatgatatctttcctggccatgtcatttttttttttttttttttgagactaggttttgctctgttgcccagcttctcactacagcctcagtctcctgggttcaagtgatcctctcgccttggcctgccaaagtgttgrgattaggtattacagttgtgagccactgtacctggcattttggttcttaattattgaactgctgggcatagttgggcacagctaagtgtttcctggatttttttttctttccytaggaarattctcatctcttaaagggcaaaaatcttgctttccactttccttatggtcatgaattcacagctattgactgcctgctttacatcaggcactgtgctagttgctggaggtacattgaataacaaaatagagatagtgcctgccctaatagtatttataatccagtgggggaaaggaaaattacatacatcatctctcatatgatgacataattaygattctaataaatacgtagtaggaaaaatagaaaactagaagcaagggtaactgagatacccactcccctattgctgggatcagagaaagtcttctcaaggacctggatacttgggaaaaggaaaagaagtggggaggagtgttctcagttaaaggaacaccatgtgtgaacaccctgaggcaattagaagattctaaaacctggagtgtgagagggagggaggcaggaggtaaaagctggctagtgagaagggccagaccatgctggctgttgtagcataggattttagaatttgtctttttggttttgaaacaaggtttcactttgttgtccaggctgtggtgcagtggcacgatcatggttcgctgcagcctcaacctccctgggttcaggtgtttctgccccttcagcctcctgagcagttgggactacaagcatgcaacaccacaccaggctaatttttgtagcaataggatttcgccatgtttcccaggctgatctccaactcctgggctccagcaatcgtcccaccttagcctcccaaaatgttgggattacaggtgtaagccaacacgccgggcccagaatttatcttaaaagagtggaaacagccaggtgcggtggctcacacctgtaatctcagccctttgggaggccaaggcgagtggatcacctgaggtcaggagtttgatactagcctggccaatgtggcaaaaccccgtctctactaaaaatacaaaaaattagccgagagtggtggcaggcatctgtaatcccagctacttgggaggctgaggcaggagagtcacttgaacccaggaagcagaggttgcagtgagccgagatcgtgccactgccctctagcctgggagacagagcaagactgtgtctcaaaaaaaaaaagaaaaaaaaaagaaaagaaagaaagaaagaaagaaagaaagaaagaaagaaagaaagaaagaaaaaaaaggccatgcgtggtggctcacgcctgtaatcccagcactttgggaggccgaggtgggcggatcacaaggtcaggagactgagaccatcctggctaacatggtgaaaccctgtctctactaaaaatacaaaaaattacctgggtgtggtggcatgcacctgtagtcccagctactcaggaggctgaggcaagagaattgcttgaacccaggaggtggaggtcgcagcgagctgagatcacgccactgcactccagcctgggcgacagagcaagactcaatctcaaaaaaaaaaaaaaaaaacaacattgtggaaatggccggtggcccaggcctgtaatcctagcactttgggaggccgaggccaggagttggagaccagcctcactaacatggtgaaaccccatctctattaaaaatmcaaaaattagccaggcatggtgtcaggcgcctgtaatcccagctactccagaggctgaggcacgagaatcgcttaagcctgggaggcagaggttgcagtgagctgagattgcaccactgcattccagcctgggcaacggagtgagactctgtctaaaaaaaaaaaaaatatatatatatatatatatatatatatatatatatatatataaacatgtatatatatatataaacatgtttatatatattttttatatatgttgatatatatgtttatatataaatatttttaaaaattatatataatttttataaatatatttatatatatatttttaaaaattatatataatttttataagtatatttatatataaatatgtataaattatatataatttttataagtatatttatatataaatatatataaattatatataaatatttaaaaaatatataaacatgtttatacattatatgtttatatatattttatatatagtttttatatttttatatataaatatatatttatgttttatatataaacatatataaaatatataaacacatatataatatgtataaacatatatataaaaaacatacttaaaaaaattaaatttaattataaaaagatactgaatgggctggatgtggtggctcacgcctgtaatcccagcactttgggaggccgaggtgggaagatcagttgaggtcaggagttcgagaccagcctggtcaacacagtgaaaccccatctctattaaaaatacgaaaattagcctggtatggtggcacactcctgtaatcccagctactagggaggctgaggcgggagaattgcttgaacccaggaggcagaggttgctgtgagccaagatcgctccactgcactccagactgggtgacagagccagactctgtctaaaaaaaagaatactgaatggatagaagctaaaaatgctacaaaactcatctaattagttgctgtcaatattacatgtttttttcgttttttaaaaaataataattgtatacattcatgggctacgtaatgttttttttttttgggggggacggagtctcgctcttttgcccaggccggagtgcagtgatgcaatcttggctcactgcaagctccacctcccgggttcacgccattctcctgcctcagacttccgagtagctgggactacaggggcccgccatcgcgcccggctaatttttcgtatttttagtagagacggtatttcactgtgttggccaggatggtctcaatctcctgacctcgtgatctgcccgcctaacctctaaaagtgctgggattacaggagtgagccacggcgctcggccctacataatgttttaatacaaacaatgcatagtgatcagatcagggtaattagcatattggtaatttcaaagatttatcatttctttgtgttgacaacatttaatattgtaagaattaaagaaagaggagagaaacacaaaggatggcttttcagtcaacaggggcaggtttattttaaataaacctgagaagggcggttggctgagttaggtcagagccacactctctaacagactaagagtttctaaagattcaggataggagagtttataagaggcttggactgcttctgtgtctctttgttgtgcttatctgggagggacagttgcgtttctattcccatacacctttttgcagctgcaggcatatcccccaagtctgcttttagcttctctatcttagtattcctgaagggaaagaaaagtgcttattaaggcccactgtcttactggggcccattgtatgagggtgaagtttggcagttacccaagagactttctcctcacctccctctgtkyccaagcggtcttatctgtgttttactgtctgctctttctggctgcttgtagttagaagagaagtgatttccttgaaatgcatgaggctagaaagggagctggaacttaaagtggtggtgtttgtccgagatgacggtgctcctgctctagcaaatatcctgccaggcgtagtggctcacgcctgtaatcccagtactttgggaggcggaggcygggggatcacctgaggtcaggagtttgagaccagcctggacaacatggtgaaaccccatctctactgaaaatacaaaaattagctgggcatggtggtgcacacctgtaatcccagctacttgggaggctgaggcactaaaattgcttgaaccggggatgtggaggttgcagtragccaagattgcaccactgccctccagcctaagtgacagagcaaaactccatcttaaaacacacacacacacccacacaaacacacacacacagagcaacattcaatatcctctcttctagctatttgaaactatacaacgcattattgttaattataagcaacctgcaatgctgcagagcactagaacttatcctcctatctagctgtaattttgtatyctttagcaaatctctacctatcctccccttcccagtctctaatatcctctggttccacattttacttctattagatcaactttttttagcttccacatgtgagtgagaatatgcggtatttaactttctgttaagatcatttgcctactttataatcagacgttttcttgytttgttttttgctattgagatgtttgaactctttgtatcttctggatattaatcccctgtgggatgagtagtctgaaaatattttctctgatcctgtaggttgtcttttcactctcttgattgtttcctctgccgtgcagaagatttttagtttgatataatcccatttgtttatttttgcttctgttgtctgtgcttttgaggtcttattcgtagaaccaagcctggtgacatattgattttgaacttagagcttccagaactgtgagaaagtacatttctgttttttaagccacccagtctaatgtaacaataatatatttagataccttttaacttctctccctgcccccaccaaatatctaatggtcagaataaataataacagggaagacaaacatgttttgttttgtttgagaatgagatgcacctgatcacagtggattttaagctctttttgtatatatactagggaatggctggatgtcttttttcataattattatactaggatcacatactagttagtaacttcaaatagggcagtcagataggcttcacgtgcctccttcaagcaccaaaagctatactctggaaactccaagatcagtgttaaagtcctacacaatttctcacaccagatgctggatgagacatttgaaaaataaaagtttagtgaacttctaacaatgtctggtttcaaggaatgccagagtgccaggcctgtagtgataagatttcttcactccctgcttgatttgcaggcaatcagcttagaaagagctgtggtatagaaaacttgttccttaccagcccsctgccttttgcctggagctcagcaagctagaggtggcattgataccagaaagagatggctgagcagctgcaaacacaactgagagaggatctgggctatgtaaattttatttcaaaataaattgctaccttcacaaagttgtggaaaagttactgcatttagatgtgacaattaggctaggtgcagtggcttacaccctaatcctaccacttcaggaggccggagcaggaagattgcttgagcataggagttaagaggctacagtgagctatgactgtaccactgtactacagcctgggcaatggagcaaaaacttgtctcttggagaaaaagaaggaaaagaaaagaggagaggagagagagaaagaaagaagagagggaaagaaagaaaaaggaaagaaagaaagaaaaagggaagaaagaaaaagagagagagagaaagaaggaaaaaaagaaggaaaatggactctctatgtcctgtgggttcatgctgaaaagttaaaaaacaataaaataaggacaaattctttgatagctgtttaaagagacagagaggaaatacatataatgatcttatatattactgtgtgtggtagtttgtctgcaaacatggccatcaacaatttctcctaccctatgcactcatgctgcttctcccatcaagtagtctattttcccttccttttaactgaggtggcctggtgacttcctttaatcaatacaatgcatcctgtgtgactctgccacttccacacttaggctttaagtgttctggaagcttccaccttcaacatctttgaagtcagccactgtgctgtacaaaagctcaggccagaccactgaatgatgagagccatgtggagagacactctagaagatgagcttctctggaatggtttggccccaggtgtgcttcgggctgaacatagcctcatgagtgacttcaaatacaacaagtggagtggaagaaccacccagctaaattcagtcaacctacagaatcaagagaaataatagatcattgttattttaagctactaaattttagagtgattttttttttatgaagcaagagaaaactaaaatatcttgtgtaaatgtttatttttatttttttgagacagtcttgctctgtcacccaggctgaaatgcactggcacaatctcagctcactgcaacctatacctcccaggtccaagcaattatcgtgcctcagcctcccgagtagccagcattaaaggcatgcacccccatgcccagctcatttttgtatttttaggcgagtcagggttttgccatgttggccaggctggtcttaactcctgatgtcaagtaatctgccaggcttggcctctcaaagtgctgggattacaggcgtgagccactgcacccagactaaatgtttatggtttttttttgttggtttgtttgtttttgagatggagacgcgctctgccacccaggctggagtgcaatggtgcgatctcggctcactgcaacccctgcctcccgggttcaagtgattcttctgtctccgcctccccagtagccgggattacaggcacatgctgccacrcccggctaattttttgtatttttcagcagagacggggtttcactgtgttgcccaggctggycgagaactcctgagctcagacgatccacccgcctcagcctcccaaagtgctagggttacaggcatgagccaccgtacctggccatttatgtatttttcagtctcctgagtggctagactayagacatccaccactagtcagctaattaaaaaaatttttttttgtagacatggggtcttggtgtgttgcccaggctggtctggaactcctggcttcaagtgatcctcccaccttggcctcccaaagttctgggtttacaggcatgggccactgtgcccagctatctgctgttcttaatccatgagactgtgatgataatttgggacatctggtctccaaagagaaagaagctggatggctcatggcctgacaattgatgtagctttactgaatgctttacagatacggaaagctaagagtaatgcaaaactacaagggctgcatagtattccatggagtatatgtaccacattttctttatctagtcttccattgatgagagcatgtcctttgcaagaatacggatggagctggaggccattatgttactggtggaaggtatctgagttactgrtggcaaatctgtatgggtctgcagcaacttcaattcttacctcctcagaagaaagaattcaactgagaggtataaggcagaaaaggagaccgaaacaaatttcagagcaggagtggaagtttatttaaaaggctttagaacaggaaagaaagaaaaggagagtaggcttgtaagagacccaagcaggcactgagatcaagtgtggtgtttaaccttgaccctkgaactttataggctggctttcccatgactcttcccttaggatgggctgcctacacacacagcgccctccttatctttgggtgcacgtgtttaggaagttgtacacatgcccatctgaagctttctcccctttttyggtggtgttttcttggagggtcatactccaccattttgtctcttaatgcgcatgcctgggaagttgcttcgcyctggtgtctgtattcaattaacaccttagtgcaaaaggtgtggaccatcaggaaatggcctctccctggcacyggctgccaatktatcacttttagagaggtgatgtgataattactgaaccatcatccacattcctagtgggttggggagtcttctcctgacccctgctcatgcctaactacctgtaacaattatccttagcaaactaatccaggaacagaaaactgaatatgcatgttttcactaacaagyagtagctaaatgacgagaacacatgaacacaaagaarggaacaacagacactggtgtctacaggagggtggagggtgggaggagggagaggatgaggaaaaataactaatgggtactaggcttaatacctgggtgatgaaataatctgtacaccaaacccccatgacacagacttacctatgtaacaaacctgcacacgtatccctgaacttaaaaattaaagttttttattttacttatttatttattttttagacagagtctcgctgtgttgcccaggctggagtgcagtggcgcratcttggcacactgcgaacctttacctcccaggttcaagcgattgtcctgccgcagcctcccaagtagctaggactacaggcacctgccaccacgcctggctatttttttttgtatttttagtagagatgggtttcactatgttggccaggctggtcttgaactcctgacctggtgatccacccacctcggcctcccaaagtgctgagattacaggtgtgagccactgggcccggcctaaaattaaagttaaaaacaaaacaaaacaaaaaactataagggccagacccttactcagggtcttttatggaactttctctgactggccccaaaccaacactgctatagcccaagtctcagtcccactactactgtgtgtagcgttaagattctctactctcagagtctaagccgaatggcagaagacaagataaaggaaaggttttccttcctccttctaatgaaaggtgcactgccccacattattttctgttctagaatccgtctcccctcaggaggactgccacacctccaagggaagaactgcaccatyacagagggtgtggtcttgccctccacaactctcttagaccaattgcctcagaacccattgaacatttctctttcttctttctttctctttctttctttctttctttcttttctttctttcyttccttctttctttcctttccttctctctttcttttctttcctttcttctttcttttctttctttcttctttctctgtctctctctctccctttctctctcttttttttgacagagtcttgctctgtcacccaggttggagtgcagtggtgctatcttggctcactgcaacttctgcctcccaggctcaaacgattctcgtgcctcaacctccagagtagctgggattacaggcactcgccactatgcccggctaatttttgtgtttttagtatagatggggtttctccatgttggccaggctggtctcgaactcctggtctcaaatgatccacccgccccagactcccaacatgctgggattacaggtgtgagccactgtacccagccccactgaatattttgcttaaatctttggcaccctttaacaaggtaatggcatttgatgcccttttaagtaaattaattaacaacacatttacatcccaactaaaagaaagtactagaatatatgaatgaggattttgtataagtagctgaatagtgggattgggaagtagtataaatagcactcggaaaatcaggttttagtataccagtaatatatatgtctatagaaccccattataaacctgttamattttagtgggaagtcattaaagcctgcaaaaatgaggaatgtacccaawaggcagaaccggagactatgattttaaaaactatttaatgtaggctgtgaagaactttgcattgtgagaactccttcctttcttgctccctggctatcttggtggctgctcttgactggggggcatcgcatctctaaggcaggaagatgctggctgcagtgaagatgaaaaagtcactagagttgataaactctaggttccaactcattgtgaaaagtggatagtacatgctgggatgcaagcagactctgaatatgatcagacaaggcaaagcgaaatcagttgacctcaccacaactgcccagctttgaggaaatataaaataaagtacaatgccacactggccaaaactggtgtccatcaccacagtggcaataatttggaattgggcacaggttggggaaaatactgcacacactggctatcattgaccccattctgatatcattagtagcatgccagagcagactggtgaaaagtaaaacaagcacaatttttctttttctttttttctttttctttttttttttgtccaggctggagtgcagtggcatgtgatcttggatcactgcaagcyctgcctcctagkttcaagcaattctctctcctgcctcagcctcccaagtagttaggattataggcgcctgccaccatgcccagctaagttttgtatttttaatagagaagrggtttcaccatgttggccaggctagttttgaactcctgacctcaagtgatctgcccgcctcggcctcccaaagtgctgggattacaggcatcagccaccgtgcccagccatcaagcaaaatttttctttaataaaacttgcctcagcttgtttcaaacaaatatttaacataaaagtgaagtcataattttttaagaagaataaactatggtacaagtggcccaatttccaaaaattagactcttcccccaaactttttttctttattaatcggagaaagaaaccagtgatataccactgggcatattttgaaggttgcatatatgctacaatattgtctcatgcatttggacttttcaggtttttttcttaagatggtcatttttttcttcactcatatatttttcatccctatttcattttatttatttctgagatggagtctcgctttgtcgcattggctggagtgcagtggcacaatgatggctcactgaaactttgaactcctaggctcaagcaatcctctcaccttggcctcccaaagtgctgtgctgggattacaggtgtgatctactgcacccggcctatttatgtgtgtgtgtttttgtgtgtgcgtttgagacagggtcttgctctgttacccaggcgggagtgcagtggcacaatcatgactctgcacggcctcaacctaccaggatccagtgatcctcccatctcagcttcccaagtagctgagaccacaggcatgtggcaccacacctggctaataaaaagatttttttgtagagacagagtcttcctatgttgcctaagctctatttatgttttaaattaatctttgctcattactgtggtgagttactcttcacagaaatgcatcaggaaattgaaacagacttttttgtaatgtaaaagttgtgattggctggctggggctgggggcaggggcaggggcaggaagtggagaagtactgtgtgtctgttgtgtttgtacactatttcatttcataacaaaccactattctactatatcaaagtcatagattaaaaaatttaggctcacagaagttatttgctgaaggccatgctcacttcagaccagacactttgcattcattgtattacataattttgtctcactaaggtcctaagagatgctgtacttttcctgtttaggaagaaactgaggcttaatgctttccttcaactcaaactcactgttatctgactctaaggtctgcaccttcacctgagttcactgtgagtgaacctgtagcctggggacagagatcttgttactgaaacatgagtggtttggtctaggtcctgctgcttgctgcatagaaagccaatcactgaaacgaygagtatcaccaaggaagaaagctttagtcagatgctgcagccaaggagatgtgagctcagtctcaagtccatctccctgactactaaaatgccaggtttatatatcagggacgaagtgtaacaatgtgtaagaaaacaagaactggggaggggcaaggaagcagtcacctggtgccgtgatctggtgactttcagttctttgatacttatattttgagaggcctgaaggacctttcctgaggaaggaactctgataaaataaatataaccttcaagctgagaccagaagggtcaatttctgtgttaatcaaaaagaatagtctatgagactattgggccagtttcaatcttttttttttttttggagcaacatgctgttttaatgagcacttgggtgcaggcgggctgaggcctaaaatggtgtcagccccaagtgaagatgaggcaaagattttataaacaggaagtgtcctagtctgacgtaactgctacgtcgtacctggatggcctctttcttgagcttcaggcgtacgtgacttccggctggctctcttcctgcttctgctgtcttgctgacacacgctgctgatgcaggtggccttgcgccttgggactgggcctgagcaggcaggagtcactcatccccttaggctttcaggccctggggagaatcttacattcttgtctatttggttatagcaaagggaaaaggaatgactttctcaataactacttcaggcatgacatagggggtggcgtggrcaccttggaaaaagaaaaccttaattttttgggtattcttgagagatgggttggtagccaccaygtcgttctagcaggagcattgtttggattgtctggaaacacwtctgtgcctgcaagacagttatgttgagaggacaaggcggtgttgacagggagaggcatggcctcatttgctgcttcacaaatgaaagaccatgtctggattaaggaagggaggtaattcttgagtggctcagagtctggtaagggtggaggccccaaaacaaaagtttggccatacatgatttcaaagggactataaaaagaggatgtctttggtgttgtgcagagtctcatgagggcaaaagggagatttttttgttcacgactggtgggtgtctagagccagcttggtgagttgggctttaaggacagagataactttttaaactttgcctgaagattgaggcctgtagggtgtgtggaggacccattttatacctaaggatgtagagacgccttgggtaatttggctggtgaaggcaggtccgttatcggactggatggctattgggagtccgaaaccgggaattatatgcatgatgagagtttgtgtgacaatatttgcactttctgaagtttgtgaagttgttgggaatgcttctacccacccggagaaagtacagacaaagactagaagatagcagagctgtttatcgggtggcatgtgagtgaagtctacttgccaatcttgcccaggtacctggccctgggcttggtgggtaggaaaagtccgaggcaggagggagccctggggtgacactgagtggcagatagagcaggactgggtaatttctcaaacacggctggaaaggtgaggacaagtgagaatagggcggagaagttgcaggagaggtttgtaaccaacatggaaagagttgtggaggctttggaggtgaggaaggctttgagartgaggaagaataaagctccgtttcttgacataccatggtccttgcttttgaaggttttgggcccggaagtcctccttttcttctgaggagtaaagaggagagaacaaggatagggacagagcatggctgggtttagatgggagctggttagcatggtgatgtggggagtttcaatgaatagagcatacagttggaggagctgtggggcagagaagagacttagtacactgcggtgagccagcatgtctttgatgttatcggttgaataaactgttaggttggcatggacagaaagttttaggctttcaaggcctaaaaggagagcagctgccaccaatgctcagagacaggcaggccatccgggaactgtggctttaagctgtttagagaggtaggcaacaacctggagagtgggtcccttagactgggttagaacgcctaatgcaactccacgccgttcatcgctatagagggagaaaggtttggtgaggtctgggagagtgaggagagkggctgagatgagagccttttggagtagatggaaaggttgggtaataggctrtgcagggtttgaaggcccatggagagggcctttagtggcttggcataacggtttggcaagtagagcaaaggagggaacccagagtctaaaatatcctgctagtcctagaaaagagagaatgtcttgcttagtttgtggaggcgggagggactggaggagggatacgtggtcggttgtgagccctcaggttagcggggtaagggctaggcctagatagtgaatgagggggtgcatatttgtgctttcttaggggagacctgatacccctgttctgccaagaagtttaaaagagagagatactatgggcgttgcagtctctttgggaggggctacacaggagcagatcattaacacattgaaggagagtggacagttttagggataaggtacagaggtcacaagcaagggcctgtctgaaaaggtgggcgctgtctctgaaaccttgaggtagtacgcaccaggtgrgtggacgtgaaatgtgggtgtcagggttttcccacgtaaaggcaaagaggttttgggaatcagggtgtaaaggaattgtgaaaaagcatcctttaagtttaggacagaaaaatgggtggtattggagggaactgcggaaagtgaagtacatgggttaggaactactggacatactgggagtacagcttggttaatgagcctgaggtcctggactaagtgattaagttccatctggctctttaacaggtagaattggtgtgttacaaggggagtttgttgggcagaatagatgactggtgaggaggtgagaaatgataggctttaggcatatgagagctgcttgggggatgggatactgcttctgtgataggaaatgggtgggctgtttaagggtaatgtggacggggctrtggtgttctgcgactgagggtgtggaagtatcccaaaaagcggggttaactacggatgggggataagaaaaggttgcatgttttaaggtgggaggttggaggagtagaagaaagttagaagccccagaggggtctgggttgatgtgttggrtacgatggggaacgtggaagtggagagtattgtgaagttttgaaaggatatctctgcctaggagcggagatgggctcgagggcaggactaagaaagagtgagtgaaggaaaaggtgttcagggagcagaaaaatgaagtggggggctcrgggtttggagacttctctatcaattcccacaacagagacttgggaggactggatgggtcttgaaaaattaggtaaagcagagtagtaggttgctcggtattaattaaaaaaacatactggcctayccgccaccatcagggttacccttggcttggatgaagcgatggtagttgccggggtgtccgttccagggcaccatcagtcttcagcggctaggccaatgagatccgggtaggaggttctggccagctcaggaagggatggggcagtccttgcgggggctgctcacagtcccactgccagtggggtcctctgcagagggggcacggcttggtggtcttacttgggtttgggcattgtttggacaagtggccttcattgccgcacttgaaacaggtgccaagtggaggtggattgctaggaggcttctgtgtggagctgtggcctcgtgggcctgcagggcctctaatggcagaggcaagcatttgaaactctgcgtgtttttgccttttactttcctcatcatgattgttaaagactttgaaggctaaattaagaaggtctcgttgtggggtttgagggctgtcgtcaagtttctgaagcttgcaccaaatatcgggggtggattgggagatgaaccaaaggtttaaaatggtggttccttctgggctgactgggtctaggttggtatattttctcatggtttcagttaaatgagagagaaaaagggctgggtttttgtcaggaccttgggtgatttctgaaagtttttcatagtttacygctttatgggaaccctttttgagtcctgcaagaagacacacaatcatgtggtcttgatggcggcatccagaggcccccgttttgataatcccagtgggggtcctggttggggaccccctttgcaccagtaggctgggcaggagcttggtgatgaattgtatcagcgtatacctgagctaggrtccagatatggtcccagtcttctggggtgagggtggaagagaggataatgtagaggtcatgccaggttagttcataagactgcataaggtactgaaactcccaaatataagaggtcgggtcttctgaaaatgaactgagtcttttgttaatttgagagagatcagtgagggagaagggaacatgaactctaacaataccttcagttcctgctacttcctgaagggggcactctagcacaggagctgaagtaagaatggggcatgggccaaagatggcgcctgmgccagtatgggcaggagagaaggaagaacttggaagtggttcctgctgagggtttgaagggggaaggggagttaacaggcagtggaggatagataggggcgtaaggtggtggaatgggtttacaaacctcaggagagggcagtagaggaggagaatgggtacaggcaatactagaattgccctgaggaggggatggtgtaggaaaagaagtggatacagctgactgggaagatggtggctgggaagatgatcactgggaagacgttggctgggaaaatggcagctgggaagatggcggctgagaagataacaaggaggcttggggggttaaagaagatgattgagaggaaggggtaggggctgggaggggtgaacagcagtcagctagattgaacgagggaaaaagaggtagggtcgggaggagaaaggctatcagggcggtgagaatggaggagaaggatttgaacagataagcaagaattgcagaggtcaggttgtgagctgaatgcaaaaaggcctggacataaggaatttctccccatttctccagacgttggcaataattgcttaagtcagttaaaactgtaaactcgaatgttccattgtgggccatttggagaggcagcctagagggttgttttttggaatgtaggaccaggagtttcccataactgagggtaggctcgggagaacagggaaaagtagaccatcctggacagccggagggagacaatgaaaggagcaatcatcaccgctgcctttttcgtttgggaacaggatcaaatggcttagaggtgtccccctaagaccagatgatcagcaagtgcctggcacacatgggagccttcttggaccaatgttggattttcgtaccggagaaaccaagagaagccgtgcagattttcccctgtaaaccaaaccaggctcccggggaaacttaccagtaggcgagtccagtgatggatgtgcatgcacagagaggtgactggaggctgaggagcttcctttgtctggctactgtggcctgctttctggggtggaggggtaggtccataggggatgcagacctgaacccctcccgggtttcggcaccagatgtaagagtcttgtatcggtctgaaccctgagagcgagctgacagacaatatggggcggtgtggagcaacatgctgttttaatgagmgcctgggtacaggcaggctcaggcctaaaatggcgttagcgggccagtttcaatcttaagcacattgttgacaaatagaccactttcsaatttagggcagcactatttgcagctctctaccttatgacctcttactacaaataagacttatgcagtgatgatcaaaacttggggaaagggttgcctgagctgaaagagaaaactaaaatatattttggaatctcattttgagtcaattgtgaactgtttctttgttgtgggaaatcatgtgaatggaccctttaattgcacaaatgtaaagcaagcacttatccttcatttttaggaggaaactgaaagaaaagattgtagatgttttagacataagtggtgggcagtgccaattttaagtaattgtgtatrgttaaatgattactgtgccctgggactcatttacttctgtgttgaaagatgtttcttgactttatttacacctgatgagtgtggtacagcaaagtagaccttcccttgggaagataggtgtgagcttactcaagaattgctttagtctggacaacatagtaagaccctgtctctgcaaattatttatttattcattgatttattttattttatttctttttttgagacagtctcactctgttgcccaggctgccgtgcagtggcgccatctctgctcattacaccctcctcctcccaggttcaagcaattctcctgcctcagcctcccaagtagctgggattacaggtgcctggcactgtacctagctaatttttgtttcgttttgttttttttgaggcggagcttccctctgttgcccaggctggagtgcagtgttgcaatctcggctcactgcaaactccacctcccgggttcaagtgattctcctgcctcagcctcccacatagctgagattacaggtgcctaccaccacacctggctaatttttgtagtttttagtagagatgaggtttcaccatgttggccaggctggtcacaaactcctgacctcaagtgatctgcccgccttggcctcccaaagtgctgggattacaagcatgagccaccatacccagcctatttttgtatgtttagtagagatggagtttcatcacgttggccatcactggccagggtggtctcgaactcctgacctcaggtgatctgcccacctcagcctcccaaagtgttgggattacaggcatgagccaccatgcccggcctacaaattattttaaaaatagctgggcatagtggcacacacctgtagtcccagctattcaggaggctgaggcaggaggattgcttgagcycaggaggttgaggctgcagtgagccatgatcttgctactgcactccagcctgtgtgacacagtgagacccagttggaaaaagaaaaagaaaaaaaagaattgcttgccgaagatcagagattttgtcctagagtctttaccttcgaccaggagagcagtaaggagggatgagactgggcttggcataacccaacctatgctggattgttgataacttacacatgactataagactgagtaaatcacaatacagtgatgcttgctttagaaatgacggctctaacagcagagtggaaaatagtttgaaagatgcaaaagtggattccttctaggttactctgtatttatagtcctttcttcaccaggcatgggatcattttattcattaacctcctaagattcatcatcatatctgggatatatataatatattatgccttccacatttgcctatggaataaatggactttttcattaggagattactaataaagtaattatatgtatggagtaagacatccccagattgtcagaatttgaaaataagaatattctttgagaatgagaataatatatatatttatttattgcctatcatttcccccctcaattgcttattctgaaccaaggggatgattgaaactatgcataatgtcatttgtagcaataaatcccatcacaaaaaaactggtaaatgtggtcctgaagagatgtggggaacacccatgaagctgacctgagtagatttcccagataaatgactaaaaatatgactaatatgaaagtaagttgtgatatcactggttattgtaatctgtttaacgaaggaagacagggagtccaggygaatcgggaacacagggagacaccagagagccccacctggactgtgtgcaggtcacctggccaacagaggcactgcatgttggtcactcatccttcagccacacaacagtggcctcatttcaggcttttcctggcctggataaaaaagccctcaacagtatactgctctctcactctcatttcttctgacgatgagtttggacttccatccctctgacatagtgaaggaggaggcattatacttcaaagatgttctagttactagaaaaatacatacagcacagtacawggcattctgacttataactcagtctcctgtgaatttgattattatgaactggccacaagatttttgatgaaatcatggttttgatcttaaaatttaagagccacggtcgggtgtggtggctcatgctggtaatcccagcactttgggaggctgaggtgggcagatcacctgaggtgggcagatcacctgaggtcagaagtttgagaccagcctgaccaacacggtgaaaactggtctccactaaaaatacaaaaattagccaggcatggtggcagctacctgtaatcccagctactcaggaggctgaggcaggagaattgcttgaatccgggaggcggaggttgcagtgagccattgcactcgagcctgggcaacaagagcaaaactccgtctgaaaaaagaaagccacttcatgtatatcaaagggagataatcacacttaggtagtgctgggcccctgtttttgacattctgtcttactgtaacaacacagractcctacaaaaggaacctgtctcatcaggatagctcattcctaggcaatcttgcaggatctctgcaagagatttatatatttgcatggccttggctataggaatactggggagactgggtcacagtattatccaggtctcttggtattatctagataggagaggagctagtaagaaactgccccagctgggcgtggtgkctcatgcctgtaatcccagcactttgggaggctgaggcgggtggatcacgagggcaaaagattgagaccatcctggccaacgtggtgaaaccctgtctcttctaaaaatacaaaaattagctgggtgtggtggtgcgtgcctgtaatcccagctacttgggaggctcaggcaggagaatcacttgaacccaggaggcggaggttgcagtgagccgaggtcgtaccactgcactccaggctggcgacagagcaagactctgkctcaaaaaaaaaaaaaaaaaaaaagaaaaagaaaagaaaagaaactgccccaggctggtggctcatgtctataatcccagcactttgggagactgaggcaggaggatcacctgaggccaggagtttgagaacagcctgggcaacatgatgaaaccctgtctctactgaaaatacaaaattagctgggcatggtggtgcgcatctgtggtcccagctactcaggaggctgaggcctgagaataacttgaacccaggaggcggaagttgcaatgagccaagactgcrtcactgcactccagcctgggcaacagagtaagamwctgccttaaaaaaaaaaaaaaaraaaagaaaaaggaactgcccctcaggagcacttttataaagtgtgttagtgttctccagagagcagaaccaatagaatatagacagatagagggaatttattagaggacttggttcatgtgattatggaagctgagaagtcccacaacaggcagttgtaagctggagatcctgggatgctggtagtgtggctcagtccaagtctgacagcctcagaaccaggaaagctgatgtgtaattctcagtttgaggccaaagacctgrgcacatgcagggttgctggtgtaagtctgaagttgcaaggccaagtctggagttcttatttccaagggcaggaggaggaaagtgtcctcgcttcaggaggggaaaaagaaaatcctgcttctcttcttttttgtgctatgtgggcccccagccaactgctcatactgaggatggatctttcccactcagtccaccaactcacacgcccattccctcacagacatgcctggaagtaatgctttaccagttatctggctatttcttaatccagtcaagttgacatctaaaattaaccatcaaaagtcaatccccagccagccatgttggctcacgcctgtaatcccagcactttgggagatccactttgggtggatcacttgaggtcaggagttcaagaccagcctggccaaaatggtgaaacttcatctctactaaaaacacaaaattcgcatggtgtggtggcgcatgcctgtaatcccagctactcagaaggctgaggcaggagaatcgcttgaaccttggaggcagagatggcagtgagcctagattgcaccattgtactccaggctgggcgacagagcgagactccgtctcaaaaattaaaaaacaaaaaagttcaccccttgtcagcttggcacccacatgtatctccttaaaacatayttaatttccaagtaaagacaataacaaggtaataattctgattaacatgataaaactatcttgtgtacaaacaaaagtgcgtgtatctcttccctagaaaaggaaataaagtccctgggtgatgtttactcttttcctkatatmctataacttaaatactatgaagtaaaattagcaatacttaaatactgacacaaagtcaatgtactttatgttatatgataaaagaataagagaggaacaaaaacaggtcatttgcttaatatgtgtatatacacaaaaacatattctttttttaaagttatttattttttattttgagataggatctcactttgttgcccaggctggagtgcagtggcaaaatcacagctcactgcagcctcgatctcctgggctcaatcagtcctcccacctcagcctcctgagtagttgggactacacacatgcacsaccacacccagctaatttttaaatcatttgtagagataaagtctcactatgttgcccaggttagtcttgaactcctgggctcaagccatcctcttgcctcggcctcccaaagtgctgggattacaggtataaaccacaatgcctataaaaatatttttaacaaaatagtgaggaaataatcatgacaattatagtcctcagttctgtaactggtcatgtggttatagttggtatttataaccaccgtcttccagtacacattctgtattccttttgccttcagcaagcacctcacttggttgtggttccttacctggcagggtgacccaaacctttatttctgaagggtcttggccagtcataatcctgcctggattgggttgttgtaatttcccattgaccttaatcacagggtaaggtaatactagtagatgccctaagggatctcctatattccagacacatgcttccttaccaccattgtggaataatagtccaatttccccttagtagtctggatcagtcatcccagtcaacactgtaactcccttcttagcctattgactcagaagcatgaggaaaccaaagtggctgggtagcagtcttaactttcagttcaatgaagtcattgttgtgaatcttggtagcaacattcatccctctggaactgagacctctaggccagcagagcacaaagttgcacaaacaggaagcaaggattttgctagttggtcactaggggtgatggtgactggcgccattcccatatcccccttgattcattgattcatggactcataaatcctggcaatgggattaatagtaccatatattgaatgctgattcagagcacatacagccttctggagaaccttgccccagcctttcaaagtattgtcacctagctggcaccrtaactgactttgaaaggccattccatcattctgtcaagccatatgcctcaggatattagggaagatgataagaccagtgaattccaggaacaagagcccgctgatkcacttctttggctgtggagtgagttccttggtcagaagcactgctgtgtggaatactatgatagtggataaggcattctgtatttttgtttttgtttttgagatggagtttcactcttgtcacccagactggagtgcagtagagcaatcttggcttactgcaacctctgccacctgggttcaagcgattctcctgcctcagcctcccgagtagctgggattacaggtgcacaccaccactcttggctaatttttgtatttttagtagagatggggtttcatcatgtttgccaggctggtctcaaacccttaacctcaagtgatctgcccacctcggcctcccgaagtgctgggattataggtgtgagccactgcgcccagcctgataatgcattctgtaagtacatggatggtagttttggcagaagcactgtgtgcagagaaggcacatccatatccagagcgtctattccagtaaagataaartgctgccccttccatgatggaagtgtcccatgtaactggttgactactctggggaatgatgccatatcaggggctcagtgctggtctctgctgctggcatattggacactcagcagtggctgtagccaggcccatcttggtgggtgaaagtccatgatgctgagcccaatccatattgttcatccctcccaccrtggccactttgttcrtgagcccattggccattgacaggggtgactagggtaagaagccaattggtatccacagaacaggtcattctagccacttgattaccaaagttttcctgtgctgaagtgaccctttggtgagcattcacatgggacacaaatatcttcatgtcttttgcccactcagagaggtctagccagtaactccttcccaaattgctttgtcaccagttctctaatcatgttcctttcatgtccctgaccatccagccaaaccactggctatagcccatgaattggtatacaactgctcatctaagaacatcctcacagatacattcagatgtaatgctttatcagttctctaggtattctttaatccagtcaagttgacatctatcaccacaaaaaggcagatcaacaggaaaatttaagaggctgagacttcagtccgtagtaagaaaagagatattttccttgattcgtttgacacatgtaggtaagtgaatcacctgctttttaaggtcttttataataatctcataagctaggttttcctggtttcaaaaaacacttcctctagcttcaagttcatcagattcagaaccatatcaccattctcctaggatgctcaaacaggagaattctcagatcccagagttgttgtttataaactctaacttaataaatattaggctaggcacagtggctcatccatgtaattaatctcagtgctttgggaggcagagatgggaggatcacttaagcccaggggttcaaggctgcattgagttatgatcacaccactcactcaacagagtgagaccctgtctctaaaaatctttttttttttttttttttgagatggagtttcacacttttgcccaggatggagtgcagyggtgcaatctcggctcactgcaacctccacctcccaggttcaggcgattctcctgcctcagcctcctgagcagctgagattacaggcacgcgccaccacgcctggctaatttttgtatttttattatagacagggttttaccatgttggccaggctgtaaaaatctttttttaaaaaagaaatattggatttaaagaataggtgtcagccatgttgtaagtgcaaatttggcaatatacaactctaaatggttactcatgaggcatgtgctaattgtaggtcatcctattaatgaaaaccaaaacaaaaatttttcacaggtggcttacaggcctttgagagtgtgtctgtgcccctcatgagttccagggaccccattttgagaaccaatgagaattcttttcataggattatttactcatgcattgcatttatattgagatcttgccccaaatrttatcagtcttctagtgaaaacaatatctgatagatttaaatataagtaaaacaaaaaagtttttgttaaaataacaataagaatagtggaaataagtgaagcataggaatcatgctaggaaattagggtccttgacaccattacctgtttcaaactctggtttgatggggagtgtttttccttcagaactctaggaagaagacaccaggaggggataaataagagtaatggtggctgggcgtggtggctcacacctgtaatcccagcactttgggaggtggatcatgaggtcaggagttcgagaccagcctggccaacatagtgaaaccctgtctctactaaaaatacaaaaattakccaggcatggtggcatgtgcctgtaatcccagctacttgggaggctgaggcagaattgcttcaacccgggaggcagaggttgcagygagctgagatcgagccactgtactccagcctgggggacagagcaagactccgtctcagaaaaaaaaaagagtaatggttgaggcattatgaataatagaaatgtgttataacagccatcaccgtagttgaagagattttatttttaacagaggccagggtacattgaagctagtaattagtcagcaaattattttctttttaattgttgccatcagctagttgctctctgctcaaagtgcagaaataaactttagcactttatattacagggtggtgacagcagtccattaattaaagacaactcttgatttgaacagacttttagcttgtgaacttgtagaataaaagagttcaagactaattctgggaaaaatttgttctctttatcaatctacttatttttatcctgctttagtaaagggagggtatgcctcttaataacatttaagaaactgrtaagtttctagtttgggcagcctgtctaaatagttaattcacagctgcattttgttttttttttttatctaatttttaagttttttaggccaggcatggtggctcatgcctgtaatcccagcactttgggagtattgcttgagttcaggagtttgagatcagtgtgggcaacatagtgaaactctgtctttacagaaatttttttaaaattagccaggcatggtggcacgtgcctgtagttccagctacttgggaggctgatatgggaggattgcttgggcctgggaggttgaggctaccatgagccgtgatcgcaccactgcactccagcctgggcgatggggcgagaccttgtctaaaaaaaaaaaataaataaaagatttaaagatttttattttccctgaactgttaataatactttaaggaccaaagacagaaaagtcaatctctatgacttttctaatcacgaatgtctcttggtggtgtgtgattataccattagagatttataaatcatgctcgatgtcaccaaatcatcaggacattatgtatatgcctatgtgtatgtgtgcacgtgtgtgtgtagatgtggttgcaatactctctctaaagaggtgagagccttacccactcaggtagggttagaaggctagataktgtatcagcatctagataaaatgttgctatcatccagaaaattctaatataaagccaaatttaaaaagcctgttaaaggttttcatggttataataataataataattctaaaatcagagaaatattctgggtggatattattggggataatgtagctaaaacttcctgaggaagaagcctctccctgagtgagtatttttttttagtggaaacttttaacaacatttttatcatctttccattttattctccttcatcacctttcttcacttcccagaggtgtcaaagtctatggtggagtttttggtcctagtattatcctggcaacacagggtacttggccctcaaattccttctctaatctttccttaaaagaaagaaggaaagaaggaaagaaagaagaaaagaaaagaaaggaaggaaggaaagaaaaggaaaaacttacttcttcatgggaatcggctactggggctcagaacacaataccccaaactaagggcatgctgagtaatggtttttttttgttgttgttttgagacagagtctcgctctgttgtcccagctgaagtgaaatggcatgatctcggctcactgtcacctctgcctcctgggttcaagagattctctgcctcaacctcccaaagaactgggattacaggtgcccaccaccacgcccggataatttttgtatttctagtagagacaggatttcaccatgttggccaggctgatctcaaactcctgacctcaggtgatccaccctcttcggcctcccaaggtgctgggcttacagacatgagccactgcgcctggccagcatgctgagtaatgtcttgtcttatttttcttttcttttcttttctcttttcttttttcttttcttttcttttctttctttctttctttctttctttctttctttctttctttctttctttctttctttctttctttctttctctcttctgtcccacacatacaactcactctctctctttctttctttatctctttctctttctctctctttctctctctctctttcttttttttttgactgagtctcactctattgcccaggctggagtgcagtggcatgctcctggctcattgcaacctctgtcttccaggttcagcaattctcgtgcctcaacctcccaagtaactgggattacaggcgctctccaccacgcccggctaatttttgtatttttagtagagatgggatttcaccatgttggccaggctggtctcgaactcctgacctcaagtgatccacccacctcggcctcccaaagrgctgcaaagtgctgggattataggcataagcgacctygcctggccctctttcctttttagagatagggtctcgatctgttgcccaggctggaatgtggtggtgcaatcatggctgactgcagccttgaactcttgggcccaagggatcctcccatcccagacgtccgagtagctggtactataggcatgtgccaccatgcccagctaatttttaaatttttgtagagatggggtctcactagtcccaggctagtctggaactcctggtctcaagcaatccttccatcttggcctcccaaagtgttgggattacaggcatgagccactgtgcccagctctggcattttgagtrcattgaactaaaggatattggaaggcctcagaagcaaggactttctttttttctttttttttttttttgagatggagttttgctctcgtcgcccacactagagtgcagtggtgcgatctcagctcactgcaacctctgcctcctgggttcaggtgattctcccgcctcagtcttctgagtagctgggattacaggggcctgccactacacctggctaatttttgtgtttttagtagagagagggtttctccatgttggccaggctggtcttgaactctcaacctcagrtgatcagcctgcctcggcctcccaaagtgctgggattacaggcgtgagccaccatgctcagccagaagcaaggtctttctgactttccccaattctcctgtctccccactctgcctgtctttctccccggaagcaattcctcttttccaaggtgggtcatagacactagaacctctctgccccaaagcaagccataaaacctagaacattcactctctatttctttgcctttcttccttgaacaccattattccagagggattctgtgagaggcatttgaaccagagcaactccatcttgaataggggctaggtaaaatgaggctgagacttatttatggactgcattcccagatggttaggcattctaagtcacaggatgagacagaaggtcagcacaaggtcgtgaagaccttgctgataaaacaggttgcagtaaagaagccggctaaaagacaccaaaaccaggatggcaacaatagtgagctctggtcattctcactgctacactcccaccagcaccgtgacaatttacaaatgacatggcaacatcaggaagttaccctatatggtctgaaaaggggaggcatgaataatccactccttgtttagcatatcatcaagaaataaccataaaaatgggcaaccagaagctctcagggttgctgtgtctatggagttgccattcttttattcctttactttcctaataacttgctttcactttacggactcatcctgaattctttcttgcatgagatccaggaaccctctcttggggtctggatctggacycctttcctgtaacagtcctgccttacctgggaggaaagaatgctacacagagaggccaagaagaatctgaatggacaggccttgctgggtgtctgccctcagtctattaccattaggctatagccttttgtccaatcacagttctacatacctgtccattcttcatcgaagtgaagcataaaaatagacagttttccttggggcttgaggtcttcatttctgaaggcgcctatgtcgtgttaaactttgattaaataaatttgtcgttcttttctcttgttaacctgtcttttgttatagggctgttggctgtgaccctggtgatgagtgaggaaaggtatcacacctttccttacgaatactgaaaatctaaagctttgtagtgttggrgtattagaagtcccaggggaagaggttctgattaactggcactaactgaagtttatcaacagttaaattcaaatgcctactgaaagaggctggacaggtgatgaaaagcagaaagtaagctggggttaagacacattttgataagtacttaggtacaaagtacatgtcattttcttcttcttctttttttttttttttgagacagagtctcactctgtcacccaggttgaagtgcagtgctgtgatctcagctcactgcaacctctgcttcccgggttcaagcaattctcttgcctcagcctccttagtagctggggttacaggtgcaccacatctggctgatttttctatttttagtagagattgggtttcattgtgttggccaggcaggtcttgaacccctgacctcaggtgatccacccacctcggcctcccaaagtgctgggattacaggtgtgagccactgcttgatataagagatatgtcaatgccagggtgatgacaaaagaccgtggaagagatggagaggggacacactgaagaggttacgttctgcagacatgtgagctcagggttgcctgtgttggggctcaggacccaccaccccaaaacatgactataggagaccagactatgacacctcaaaatatacttctttggcatatttcaagctggttattctaaggaactgcagacacaggagtagctctgaaaagctcttgttttataaaagaaatttagatctataaacgaaatctacattagtaaaagtatctatcaggaagctctgaaaaactcattttataaaagaaatttagatctataaaggaaatctacattagtaaaagtatctgtatcaggaagagggctacttcagattacttttattacctgagagacttcatctgcataacaagatagctttcggccgggtgtgtttgctcatgcttgtaatcccagcattttgggaggctgaggcagccagatcacctgatgtcaggagttcaagactagcctggccaacgcagtgaaaccctgtctctactaaaaatacaaaaattagccaggtgtggtggtgcacgcctatagtcccagttacttgggaggctgaggtgggagaattgcttgaacccagaaggcagaggttgcagtgagctgagatcgtgccactgaactccagcctgggcgacagagcgagactccatctcaaaaacaaaaacaaacaaacaaacaaaaccccccaaaacaagacagcttttatctaccatgcatttcctcccctcaccctctcataacttgtctttaccacaccccaaaagctccaagcccgtattcccttcagtagctcagagtgctttgaaagcttcaatcacccagccccttttcaagttccatattttgtgggactcttgtacatatatatgtaattcagtatgttttttctcctgttaatctgctttatgtcaatttaatttatagcccagccaaaagagatatacgagaaccgagaagggtggagggaagtaatttttttccctctctaacacctgattttagaataatataggcattttaattttagtgtcaatattttaatatgtgggcaatcaattcaaatttttaaaatgtatttatttacttttttgagacgaagtctccctctgtcgcccaagctggagtgcagtggtgtgatctcagctcactgcagcctctgccttccgggttcaagtgattatcctgcctcagcctaccaagtagctggcattacaggcacccaccaccacgcctggctaatttttgtatttttagtagagatggggtttcaccatgttggtcagtctggtctcgaactcctgacctcaagtgatccacctgccttggcttcccaaagtgctgggattataggcatgaatcactgagcctggccatttatttattgaaacagggtgttgctctgttgcccaggctggtgtgtggtgacatgatcatggcttactgtgtaatcacctaacaggttcttcctgtgggctgcacagacaaaatcaattcactgtgaccatgacattgtagtaaggaaagagtttaattgacataaggctggccacaccacatagggagatggagttattactcaaatcaatctccctgacaattcagaggctagggtctttcagggatagtttggtgcacagtgggctaagggaatgggtgctgctgattggttggagaagcaatcatagggctgtggacaatggtccttgcacactgagtctgcttctgggtaggggctacaggaccagttgaactaagagttgagggtctgggtggagccatctagttctcagaaatgcaaaagtctaaagagatgtcccaaaaggccaatcttaggttctgaaatagtgaattggagaagttgcgagtcttgtgacctccagaataatggctggtaattgtttaagcccacattttagcagaattcgggcccctgtcatccttctaacctgctggactttctttagttttagaaaggcagtttagttttgggaagggttactatcatttaaactacaaatttctcccaaagttagcttggtgtgcacccaagaataagcaaggatagcttggaggttagaagcaagatggagtcaactatgtcagatttctcttactgtcataattttgcaatggcaatttttcaactgcaccctctatctcccaggctcaagcaatcctctcaccccagcctcctgagtagtggggactacaagtgtataacacttggcctggctaatttttaaaatttagtttttgtagagatggggtctcactgtgttgcccaggctggtccaaactcctgggctcaagcaatcttcccacctcagcctctcaaagtgctgggattgcaggtgggaaacactgcccagccaattcaaagtttttagagaacattttatgagacctttgtaaagggcatctggcctgtggttctctggcttgtgactgctgatttacatataaccagtatataaatgagttgggaagaggagagcctgggctttctcttcagaggtttctcttcacctgtgtacccactccttcaagcttcatacttgcccctgtgagaccctccattcaattcagcaagtgtgtaatgacaacatcgtttgccctgggatgaaaattctcacctctagctctcactactactttgaagacttgatatagtaggttcaggtatcagatactatgacagtggttccaataagactagattaagtcccagcactttgggagggcaaggcaggcagatcacctgaggtcaggagttcaagaccagcctggccaacatggtgaaacccagtctctactaaaaatacaaaaattaaccagatgtagtggcgtatgcctgtaatcccagctacttgggaggctgaggcaggagagtcgtttgaaccctcgaggtggagcttgcagtgagctgagacggcgcaactgcactcaagcctgggcaacagagcgagtttctctttaaataaataaacaaacaaatagataaagtttagcctaaagctacctccttacatattttaagtttggcctaaaggtttatctgtacatagcaaactggatgtgtaaatggatgtgtaaacagactataacctactcttgtagcaagagcaagaagccaactctcaagacagcagccatacttcaatcattcacaggtggccagctatttaagcaagacaaacactgagctgtaaccaatccagctctttctgtacctcacttgcattttctgtgtgtcactcttttttctgtctataaatcttcgctgaccagacagtagtgccagggttgctctgaatctatttctggttttggaaggtgggctgtctgactcatgaatcattctttgctcaattaaactctgtttaatttgtctaaagtttttaacagtagatccaaggattaggctttaagcctaagaaaagcctaagaaaaagttggatgtatcaatcaatattatccttgaaaagttccctagaaattcgccatcatggtgaccattttagacgacctctcaccatgttagttttccttctgaaactgccttttgcaaaaattatgacagtaaaaaaaaatctgacatagaaaaattatgacagtgaaagaaatctgacctaactgactccttcttgcctttaacctccaagctgcccttgtccattcctgggtgtaggccaagctaactacaggaggaatttagcttatcatttaactttgaaacaaagacgatagctgggataacaaaggttcaagcgattctcctacctcatcctcctgagtagctggaattacaggtgcctgccactatgcctggctaaattttgtatttttagtagagattgtgtttcaccatgttggccaggctgctctcaaactcctgatctcaggtgatccgcccaccttgaccttccaaagtgcagggattacaggtgtgagccaccgcacctggcctaaactctctattgcaattctcttgtcttaataaattggctttatttgggcagtgggcaagaagaatctgttgggcagttatgcttccattattggaatagattcattacttcttggactgagcacaaatgaagtacttatgtggcttttagggctgagcagtttgaaaatataaactatagctttaaacactaggattgcactccatggagaaaatgttcacattttgagagaccttcccccaggaactgagagttctagaaggaaaagcacatttatattccccatttcaaaaaggtctccgagtggaatgaccactattttaatttttgttatttacattattttagtcatataatttaattcacatatgttaaatagggcacagggtattaggcaattccactgtaaataatgtacctccaagtggcattattttttgttggatacttactttcatgtaatccagcatttttccaagtgtagcccagctactcctggaaggcttcgccacctttcagggggactgggcactgtggctcatccctgtaatcccaacattttgggaagttgaggcagcaggattgcttgagcctggaagttcaataccagcctgggaataaagaaactccatttgtacagaaaaattaaaaatttagctgggtatggtggtgtgcatctgtagtccagctactctggaggctgaagtgggaggatcgtttgagaccagtaggttaaggctgtagtgagctgtggtcatgctactgtgctccagcctgggtgacaaagtgagaccctgtctggaaaacaaaaatctttcagagggtccatgaggtcaaaactatctttttttttttttaatactgagatgttattttccttttttagcctcattctctcatacatgggatttattatatttttgatgcatcgaactggccaggatatagtctccagttattcaggggctatagtcctctagttacaatctaggtgttactgtgaagttattttattgatattgatattttactgatagcttcttgtgccttagaatttcagtcagctccatctgatagcctgccctgtgtatttcagacttgccttgcctgtccccacaattgcataaatgattgtttacagtaaatctcttaatacatatttccttctgttctgattaagattttgactgatagaggccaggcatggtggctcacacctgtaattccagcactttgggaggccgaggcaggtggatcacttgaagtcaggagttcgagaccagcttggccaacatggtgaaaccccgtctctactaaaaatacaaaaattagccggcagtggtggcacgcgcctgtaatcctaactacttgggaggctgaggcaggtggatcacttgaagtcaggagttcgagaccagcttggccaacatggtgaaaccccgtctctactaaaaatacaaaaattagccgggagtggtggcacgcgcctgtaatcct

SEQ ID NO: 97272 - DNA, 28232 bp, Homo sapiens
agctagtgcatagtatggaattttagtcatgtaaaatcaaagcacagggtttgataggcagtctattttgctttataagatggagcatatattagtattaatgtaggacttaacaggttctgctgctcacatgggagcaaggatgagaggaagtggagatcttacacaagaattcttaaaaagagggaccacttctcctctgcctggctgcattggctattgagaagcagtagtggaagagctgaatgacaggttaaggtttgccaagtgagcttgtagggctgtgacattcaagagatgcctgctcatggtcctggaatttccctagaaaatggcactttctgttcattagacttacagaaatgtttgttaactctggagatttttggcaagaaactttatgtatcacagcctcagggaatggcaggttatttgaaagtgcttcttaactaatgattttcttatagtaatttccagcaattcaactatgagagtgttgttcagcactagaaaacaaggagctgtctttctctgtctgtctccctctctctcttttgccaagtcacagtgcatgtcacaagagtgcaatgtctaacataatgtttgggtcagctcttcgggtttaagaaaaatggagacgtggaaaggagagcaaatagatcctaaatggaattccgtagacaaggtggtacaggcatcaggcacttgaggtgagaggagaccctgaggtcagagacttcagtcttcttctgttttccccttaagatcagctcctcttttcctatgacagcaattccttccctctttgattttgtgaaatctaacatttgtgagggtgtacatttgattgaggccttttttttttcttaacggcatctaattttcattccacaggatgcatattggcacataaatgtaattgtacttctcatgcaagccacagggtgtcatgccttcctctcctgttgccagaaggatctctgagatccattttccgtttgcttagctgctaatgccatttctcgttctccccagtgttcctgacaggcagcgatcggattcccatctacggcatggccagtctgcagattgtcatccagtccacagccagcggggaggagtacttgccggtggcccacacttgctacaaccttcttgacctccccaagtacagcagcaaagagattctgagtgcccggctgacccaggcccttgacaactatgaagggtttagtttggcctgaggcttctcagcttgtccagtatttcccttcgttcctcagtgtccacattgaggcctatacagaaaatcatggggagtgatttctatttttttattgtctaagtgggttgggacttttaaatactgagcctggttgatgtgtttctgggattgtatagcagtaaacaacctttttgaaaaattagaggttggggatggggtgaaaaattggcccttgtatgggaggtgtttttgtttttgttttaaaccaaactacccagtattccttgcacttgtgaatgtgttgcactctgctggatgaaatggcagtggatttttaaactttaatttcccaaatgtctctctcagccctgatgttttctcacagtgcttccttgtccttctcttaacttctcattcctctataagaatgatttagactgacctgtccttttttatctgcgcatgcgagaacatcaccttcctctgtacacttggaaatgcctctggcttgttgcagccctcctttaacccaaaggaggaaaggactgcttcagaaactcccaattccaaaaagctgagtctgggtccattattttggcagaactcctaagaatttatgggagcctatataaacatatcttgcttttaaaaagttcttgagggaatagcaactttcccatggctgtgcctatttcctagaccttttaaaagatgtgcagagcagcttagcattcgttgcagctgagcctaattttttcttgctcatccttgtccctttgacaataaggttaattgatagacccaccacctcttgcactctcgcttttggagcaagttgcattaactattttgagtctctatattgtccaagaaaagtagaaataataaatttactttccctttttctatcaccttatgtcctctaccattttctccttcctcccttcccttattttctccttttcgtaccctgtgtcctccctgattttcctttcgtttcttctttattttatcccattctctgttacttgactcagtgctcccttcctctcctctccttctagtggatgcatgcagcctttttttcaatttttatttaaattgcaaaatttttactcagattttttttcctcttccctaattgctaagatttaaggacgttctttattatgaaactttatcacattcgaaatgtttgtttacagtgggattttaggggggattgtgtttaaatcaaatatatgtattttaaaaataatgacatgctcaaccttcctcatcatggagtaagaaaattctacatgattaaagaatccatgtaagtctaattttaaattcctagtaactagagaaaagacttatttatataaaatgaagtatttatgaactgtgataaagcatcaaatcttgatgaaggattgtagatttttgctttttctttttgtttttaaaacttattccaattgctaaattggtagtttttcagtctttataaatacaggattaaaaatatatatacagttatatgaaatgtttattttctatgtgtgtgcatatagttcaatattatgcaataaatttggtgttttaacttaaaactatttcttattgtacttgcagaatggatagcttgcttttagtagaagcattaggtcgtatactcagataatctaatagaaggtcagatttgattcctgcataagaaagtagagccaagtgctgcagaaatggagaagaaagcaggggcaaggagcagatggcattaaggaagaatgaagtttttgaaggttgggatggacgaaaaggtgtttctcatggagagggatgctttagcaaaggctcaaacattggggcatatttaggcaagagccaagaacagtttgaagggaacatcagaggaaataggcaaataatagtaaataatggtaagtaagacttgggagaaagaaggtagatttggggctgaggaactagcctaacactggaactttagtagtagccaagtaggatttgtttcaatgttcagaacttgagggtgataagacctgagccgggtcttaagaaggaaaatgtggatggtctaaatctggaggtattgaggtgggaaggactgaagcagaaagacaggagctgagacagcagtgacagtggcagcagcagaactagagaagagtatctgaggagaggtagggggagtgagtggaggtggtaggagcctgcagggagaaggaggcactaaaggtggatcagagactggttcatttagtgattggtgattgttaggccatttaagcacaccaaaagtttgtgagacacagcaaaaaaaaaaaaaaaagaaaggattttaagtaaattggtaaagcaagtaaaatgtattgttttgccagattaaaaaggtggtttaaaggtggtaaagagaataggagctttccattaataagctccattcaacaaacatttaataatctacataagtgctacatttgaggagttaaaaacaaaccccactacatttaattttgcacagaaattgccaaattattttaactaactttgaggcctcagaattctcatccatgaaatgagattggatcagatgatttctaaggttactttgagctctaaaattttataattccattactgagagagtgcctgaacatagagatacccaatacatatttctaaagatttgttgcatgaatgatatcttatgctgcttctaaaacactatgatttttctaagatagtttccttttccccttcattaccaatgctttagaagacttaaatcttctgcataggcatttctggatttgcctacccacctaccaaccttccctcccctgaaaactttcagatgcttcttcattgttttagtcatttaccactttaatgaaattatctggcaactttattgtggtgggtggggatcaatgacggtgtaatgaggcaattagcaaattctgatagttccatctactccatgtgaaagtctcttgatgttttatatggtactcttattaataatcccagagagcaggggttggcaaactatggcccatgggctaaaatggtttttacattttaaaagggttgaaaactttaaaactggaaggatacatgacagagactggatggcctacaatgcctaacatattatctagccctttacagaaaacaactgaccaatccttatgagaccagacttgcaaaaattacagtaacagagtgaaaaaccttcttgaagtgttaggaggaacttgagtcataatttgatgttgaatcagagagaacaactgtttgggcttatttgcctcagaggtaagaaaatcaagttttaactaagattaacccacagaagtagatattaatactaaggtttcgacctaataataactaacctgtattaattgtgtgcagtgtaccagacccatatgagatcctgcaccaacatttgctatgcactaactagtttaattgccattaccagggtcctcctggctctgctatttactagctgtttgaccttgggcaggtttcttaacctatgtctcattttcttcctcttcaaaatgagaacagaaatagtgcctacctcatggagttgttgtgaggattaaatgaattaatggaaagcatatagaatagcgcttagcacataataagctctcagtacttagaattaccattatcccagtttttcacatgaaggaattaattagagaaaatagttgctcattatcacaaaatagtgggacctggacttgaccattaatctgtgttatgcccagctgctagagatgggcaacaaattggattaaggctgctcagtagccaaataaaaaggaatgttgtaatgtggcaggtaacttctttgaccacatatctgcaaagacatcgcaccgagttccacgtatctgcaaagacatcgcactgagttccacgtatctgcaaagacatcacactgaattttgttttgctgccagtgtgcaattcagtagtgatcagtgcagttctcatgtcatttgcagtgggtctcaagtgaagctggaggtctctgttggtagttagtagccaggaaccaggtatgcttaatgccttgcattgcatagaacaattcctctttatcctgcccaagatgccagtgggcactgctatggtctgaatgtttgtttccctcttaaaatttatgtgttgaaacctagcccccaagatgatggtattaggaggtgaggtctttgggaggtgattatatcataagggcagaaccctcatgagtggtattagttcccttataaaagagaacccagagaggtgccttgccttccctaccatgtgaggacacagcaagaaggcacaatctgtgagaaagtaggccctcgccagacaccaccagtgctttgatcttggatttcccagcctccagaactgtgaaaaatgattttctgttgtaaattacctagtgtttggcattttgttatagtggcttgactggactaagacaggcccctttgtaaaacactgagagagggatggacttcataccctttaggggatccttctctgtagaattctttttttcagaagatttttttttttcttttattaataagctttttatttttgaatacttttttattggtacatagttgtacgtattatggggtacttgtggtattttgatacaagcatacaatgaatgcataatgattaaatctgggtaattaagatatcaaaacatctatcatttctttttgttggttacattccaaatcttctagctatttttaaacatacaataaattattaactatrgccaccctattgtgctatcaaacaatagagcttattccatttaactgttatttttgtacccattaaccaacctctttttatccctctcctcctagtatttgcccagcctctggtaactatcattctattctctacctccatgagagcaactttcttagctcccacatgtgaatgagaacatgcaatatttgtctttctgtgcctggcttatttcagttaacatcgtgacctccagttccatccatgttgctgcaaatggtaagatttcattcttttttcatgactgaataatattccctcatgtttatagaccacattttctttatccattcatctgttgatggatacttaggttgagtctatatcgtggttattgtgaacagtgctgcaacaaacttgggaatgcagatgtctctttgacatactgatttcctttcaaattttgggcatatacgtagtagtgggattgctggatcatatagtagatctatttttagttttttgaggaatctccatactgttttctatactggcactaatttacattcccaccaaagggtgtgagcattcccctttctctgcattcctgccagtgtctgttattttttgtcttttagataacagccattttaacaaggatgagatggtatctcactgtggttttgattttcatttccctcattattagtgatattgagtattttttctaatacctgttgtctatttatatgtcttcttttgagaaatgtctatttagatcatttgcccatttctaaatcacattttttttttttactcttgaattgtttgagttctttatacattctggttaatcttttattggatagacagtttgcaaatatctcctcccattctgtaggttgtatctttactctgttgattgttcccactcctgtgcagaagctttttagctttatgtaatcatatttatctattcttgctgttgctgcctgtgcttttgaggtcttacccaaaaatctttgctcagaccagtgtcctgaagcatttccccaatgtttttcttctagcagttttatataatagtttcaggtcttaatttcatcaatttcgatttgttttttatacatagtgagaggtatggaatctagtttcattcttctgcatatggatatccagttttctcagcaccagttattgaagaggctgtccgttttctaatgtatgttcttggcaccattgtcaaaaatgacttggttgtaaacatgtgaatttatttctgggttctctattctgttctatcggtctatgtatgtgcctgttttcatgccagtaccatgttgttctggttcgtatggctttgtagtttttttttttttttttttttgagacggagtctcgctctgtcacccaggctggagtgcagtggcatgatcttggctcactgcaagctccacctcctgggttcatgccattcttctgcctcagcctcccaaatagctgggactacaggcgcctgccaccatacccagctaatttttgtatttttagtagagacagggtttcaccgtgttggccaagatggtctcgatctcctgaccacatgatccgcccgcctcggcctcccaaaatgctgggattacaggcatgagccaccrygccctgcctgtagtatatttttaagtcaggtaatgtgatgccttcagcttttttttctcagggttgctttggctattaggagtcttttgtgatacatacgaattttagaatagttttttttttatttctgtgaagaattttattggtattttaatagggcttgcattgaatctgtagattgccatgggtactatagatatttaacagtattagctctttcaatccatcagcatgggaaatctttccatttatttttgtcttcttccatttctttcatcagtgttttatgttttcattatagagatccttcactttggttaaatttattcctgggtatttaattttttgtagctattgtaaataggattgttttcttgatttctttttcaaattgttagctattggtgtatagaaatgctactgatttttgtatgttgattttgtatcctgtaactgtactgaatttttcagttctaatagtttttggtggagtctttagatttttctaaatatgagatcatgttgcctgtgaacaaggatacatgttcttgcctgtgagaggaagaacaaggcttcttcctctccaatttggatgccgcttctttcttgcctaattgccctggctaggacttctagtactgtgttgaataaaagtggtgaaagtgggcatctttatcttcttccagatctttgaggaaatgttttcagttttcctcttattatggagacagagtcttgctctgtcacccaggctagagtctggtggtatgatcttgtctcactgcaacctctrcctcctgggctcaagcaatcctcccatctcagccttctgagtagctgggactacagttgtgagccaccccaacacccagctaatttttgtattttttgtagagacaggattttgccacatatatgggatttattgttttaaagtatgttccttgtatacctagttttttgagagtttttattatgaagggatgttgaattttagtgaatactttattcagcacctgttgaaatgattttatggtttttcttgattctgttaatgtgatgtattgcgtttatagatttgtttatgttatccttgtatccttgggatgaatcttacttgatcatgtgagatctttctaatgtgttgttgaatttagtttgcttgtattttcttgaggattttttgcatctatgttcatcagagacatcagatcatttttttgttatatccttgtctggtttggatatcagggtaatgctggcctcatagaagtattcccttctctttaattctctagaatagtttggatagaaatggtattagctcttctttaaatgtttggtagaattcaacagtgaatctgtcaggttctgggtttttttgtgttgttttgatttgttttttttgatgggaagatttattactggttcaatcttgttactcattgttggtcttacaggtttcgtatttctgcatagttcaatcctagtaggttatatgtatttaggaatttatctttttttcctaggttttctaatttgttgtcatatagttcataatggtcctaatgattctttgtatttttgtggtataagttgtaatgtcttctttttttttctctgattttatttatttgggccttctcgctttttttcttaaatagtctacataatggtgtgttgattttgcttatttttttaaaaaaacaacttttgttcttctgtattttttttagtctcaatttatttctgctctgatctttattatttctttccttctactaattttgggtttggtttgttcttgcttttctgtttccttgaggtgcatggttagactgtttatttgaaatacttctattttttgatggaggtgtttattcctataaacttccccattagaactgtttttgctgtatcacataggttttggtatgttgtgcttacattttcatttgtcacaaggaatttttagatttccttttaaatttcttcatagacccattgattgttcagaagcatgttaattttcatgaatttgtacagtttccaacattatttctgttattgatttctagttttattccattgtggtcagaaaagatacttgatatgatttcaacttttaaaactttgttggccgggcgtggtggctcatgcctgtaatcccaacactttgggaggccgaggtgggcggatcacagtcaggagatcgagaccatcctggctaacacggtgaaaccccgtctctagtaaaaatgcaaaaaattagccaggtgtggtggcaggcgtctgtagtcccagctactcgggaggctgaggcaggagaatggagtgaacccgggaggtggagcttgcagtgagccgagatcgtgccaccgcactctagcctggtcaacagagcgagactccatctcaaaaaaaaaaaaataataaataaaaataaaaatttgttaagaattgggtctgtcttggagaatgttccatttgcttttgagaaaaatatgtattctgcagctgttcgatggagtgttccgtaagtgtctattaggtctgtttgatctgaaatgcgatttaactccaatgttccttgttaattttctgtcagaattacctgcccattgctgaaagtgagttattgaagtcctctattattgtattgcattcagtttctccctttaggtttattaatattggtattatatatttgggtgcactggtgttggatacatattacaattgttacatcctcttgctgaattgacccctttatcattataaagggatcctttttgtcttttttttttaatcattcttaatctgatataattgtagctactcctgctcttttttggttttcatttgcatggaatatctttttccatatcttcactttcagtctgggtgtctttataggtgaagtgagtttcttatagacagcatagactttggtcttgtattttttaaaaaaaatccattcagcctctggatgtcttttagtttaagaatttaatccctttacagtcaagactattattgatagttaagggtttactactgccattttgttacttgtttctaggttgttttgtagatcctttcttctgtttttcctttcctcctatatttctttgtgattaagtgatttcctctagtaacgtgttttgattctatgctctttatttttagcacatctattataggtttttgctttgtggttaccaagaggcttacaaaaacatctaagaattgtaacaggttattttaaactgataatgatttaacttttattacaaggaaaactatgaaaaataaactctagtctaatccaccccccacattttgactttttgttaaaaaatttacatgtttttatattgcctatccttaaccaatttgtacagttattattgtttttaatagttttgtcttttagttttcagacttgtgatataagcggtttactttccacatttacagtattattctgattttgtctattacttttaccagtgagttttataccttcagatrtcttgtttattactttttttwttttaatagagatgggattttgcyatgttggccatgctggtcttaaactcttggcctcaagtgatccgcccacctcagcctcccaaagtgctgggattacaggtatgagccaccatatccagctagatgttttcctattacatgttagcacccattatattcagattgcagaactctgtttagcatttcttataaaatgggtatggtgttgattaattccctcagcttttgtatgtatgtttgtgtttcttatcctttgtgttttaaggatagctttgctgggtagggtattcttggttgacattttcttcagcactttgaatataacatcatgccctttcctggcctgtagggtttccactgagaagtctgctgaaagctgtattggatgtggtatgtttcttttatcttgctgattggagtttttttctctttgtctttgatttyggctaatttgattatgatgtgccttggggagaattcctctttcatttgaatttgattggtgacttctcagcttctgtacctggatgctgttcgtctttctctaaatttgggaaattttcagccattcattctttaaatatactytctaggccttttttttccttgtctgctgtgggaattccaattacatggaggttagtacacttgatggtgtaacataattttttgtaggccttcttcactgtkttcattctcttttctgtttactcctctgactgggtaatttcatatgttctggcttaaagcttgctaattatttcctctgtttaatcaagtctgccgttaaagctttctcaggagtttttcagttcagttattgtattcttagttttaggatttctctttgatttcttttaatwttttctatttctttgtcattgtctctttttgtttctggattgtttttcaaatttcacttcccrttctggggaggacttatattgagcaccagaactaaacgactgtactggaatgaacttgttgccctgttgtcatttccagtctcgcaaaggcacagtgaatatcaaaaattaaatgatgttctggaactaaattgctgccttgccattgtttccttgtctggagaagacttatagcaaataccagagtttaaatgctgccctgaaacaacactgctgccctgccgttgttttccagtctggggaagacttaaatgggcactggaacttaatctcgaccttttagttgtttctgagctagaggaaggctccactcacgcacctgggatttgtggaaaacccagctggggatttgggccttcctctggattgtgcccctgaggcactatggtcctggccagtttgtttaacttggcatccccactgatcagagtgcygagatcagctttctgtgatgaacacccaggtcattgtttccacctcaccccaagtagttaagctttcctgacactcccaatggttctgatcaaataggaccagaatggacttcgcatgaagattcctagaccagtggggagatcgaatattcacctccaattccctccttcactagcaaccatgggtctagggaaaatctctgtgagtggtactatgccagcttaggggaaggggtggcacagtgttaaatgactgttcatcctacctgtcatggcttctctcaattctgtgtgccttggtggtttctctgcttcccctctgagttctggtatattcatggtggtattcttgtcattgaatggtttctaattgtatttttgtcagggacgtgatgctgggggattgtctgttccaccatcttgctaatatcactctgaaactctatttttgaataattttagatctatagaaaagtagcagaaataatacagagttatttgatttttcactcagtatccccaaatgttaacatagcacygtggtatagttatcaaaccaaggaaccaatattgggaaattactattcatgaaacttcactctttttttttgattttaccagtttttccactgatgtctgtcccaaggtctaattgaggatcccacagtgcatgtatttcaacaggcttttagtaaatattgggattccaggctttgtctctggctagatatgagagtacaaatcctctgtgcccctccacctccccagacagtcatgctgtacaatcttgggacatagggtaaagtgaagggcctcttcgggcaggcaggtaagtcatcaggccactccatgggccctgggagaccatcagcacacagttgggcccttcctcagcaagcagctctgtgttctcagcagtatgagtaagcattgaggcctcaatagttggcaaaaagcagatcttcctgtgggaaaaatactttgaataaggaagaaaaaggagatttgtattatataagtttggctgtctctaatttaaagaaagttaaactttattgcacaacgactactagttctttcttcttcttcttccttctcctyctcttccttctcctttttctgtctcctcctacttctccttgtcctttttctcctcctcctcctccttcccttctcttcccttctcctcctcctcctctttytccttcccttctcctccttctcctccttcctctatctttttctcctcctccttcttctctttcctttctccttcttctcctcctccttctcccccccttctctttctcctcctccttctccttctttcttctccttcttttcttctcctcctcctccttttctcctctcctcctccttttttcttctccttcttctcctcctccttctcttccttctcattcttccccttcttcttttccttcgtttcctccccccctccacctcctctcaaatttagttttccacggaatcccccatcctttggaaattttttttttgcttagtatctgttcatttcttccagaatcatagtttggaattaatggacacatagtagttaatcagatgatagagattaaagtgaagggaggcatacactggaatagcaaaatatgtttgcagtgaaacccaatgaatagaatacttcatgttagggtgaagtattggaggaaaaacaaatactttcattaaaatcaaagctactcttcagaatttcattattttcttttaatgagaaatgtatgtgtkggtcgtcttgtcgtctttgactcttaaaatgtaaccaagcaaattttaaactacatctctaaagtgcctaagtgtgatgcctacgttacctttaacttaacttcgttagtggcagaggttccatgagttatgagtactctgctctgtgaatgtctccatttttgaggtgcctttgtggagtattgatagggaccattcctgggctccacttacagacttctgttggggaataggatctcacaaagcagaacaggagtttgtgataaggaagaggacaaagagagcagrtccttgtgttcttcaaaaacggtgaacattatcctactgattttggaccaagggagttctccagtgggaagtgacacagaacctaccacagtgccttccaatccaggtttttggtaatgagtgatgaatgaatcccatgagagcagagccccgtggagcgggtggcaaatgttgctctctgactacagttctctccttagggatgctaacacagactgcctcagatgcaggcagggctgcttgtccacactgatcaggcatggatttgcattaacatctgtagtgccctttacttgtgcagtgagatactgggatatacaacagaataggtgctggaagaggcatccactacagtgtgggcagactctttggatctgtattaataacagcctctcccgtggattagctagtccaggctttggtgctttatttcctcccaaaataatggagtgtgtactccttagttatgtgtagcaccaagaaaattaatccagatgtcatcttttttgtttccccctccagcgtggctggatacttggcagggcacagaatcacatggtcttcagatcttctaaaagctgattttcctgggcctaatcccatgagagttggagacagtctatgataattactgattcagctcctgctggtgttgaacttactgagaaacttaaacaagaattaaaatacacacccacacaccctcagatggagccaaacactaaaccagattagtctttcgtggtcaccttttcttcaggattaggaggatcagaaagcaagagcagattctgaaacactgtaaccccattccctactgggtcataagaggctggtgctcttgaggacgaaggtcggcagcaggtgccaactaggtactggcttctggtcccagcagagctggcctgccacagcccaagcgtcttgttttggttaaaaaatgagtctcttggcctttcatgcctgggcgttctccggaactcagatgtttgtgaaccaggttcagggactctcaagttcaagtcactggcagattggagaaaagacctagaagttctaagtgtctgaggtaatgagaggagggacgcaaagcctcattcaatgagactgcaaagtcacctgaatgggaaagcttgccctattgctggcctcggcaatggcaccttcaggttgtcccctgtacgggttgatgagggagtggaggaccccaggtcccttcttaatgtcagccttggccacaggtttcgatgaaatttagtatgttgattaggagctgccaaaatcagagcaactcccctcccaaggggacgtttagttttcagttgttaaaaatacaccctgagacagaaattttgggacacttaagtgactttgaaatccatccaaaggttactctgttccttcactccacacagctcaggcatttccatgttggtctcagctgccatctcaatggtttattctttttacatgttggascagatctggacctcccaaaatgttttgaggagaagtgggcttagaggggttttccctgctctgtgagagaaggaatttagcaaggattaatttttctaagaaggtggcacaagttttgatgtgatttgctggaaaatagtaatagtcacaatttatcttattcccccaagagaatgggakgatgttcccatggaaccttgctcatcctgctagcaataacttgtattctctttctgattcacacaaacaaggatcagagggtgatggtgggggaaatgataccaggaaatacagttcgttttttgcagggattcagaatgtgttgctggacttcaagataggaagaatctttgccttgatggctgatgacagtaaccaccccatcyaccatcatctattaaggatttactgtgtggtcactttacagtcatccaagtaaattttcataatcacctgattacatgggtaccgcttttcagaaaaagaaacagatttctggagggtaagtaacccaaatcgtacagctgagccatctgtctgcatctcaagcattgaggcagcattcggcctccgagggtgttgtcaaatgtgctggtctctgttaactcagggttttggattaatgggtggagctgctcattttcacaaacacccaggatgcagtctgcaccctctatttaaagtgaggtccctggacgagcaacacggcagcacctggctgcttgtcagcaatgcagaacatcaggcactccctggagctacagcacaagatccccaggcaggcgcatgtgcatccaagtttgagccgcactgctttctgccactacggaggaatgtatcctttactctcttcctccccttcgtctcatcttgtttggtaattttaaattatttaaaagttatagaaaatcatagtgcctcaaaatggcttaccaagaaatactcaaagctgtaggatcagaagcttgacatgaagatttstgtgcatctttgaattgctttasagaaattaaagaaaaatccagacatctaaaagattataatttcagaattcatagtaacatggggatcttcttggtgtcagaactgagttcttgctgaggtttgcattgggccctgtctccgggcagctgcagcataacacggagtcacccttgctgtctaagccttgtggctggaggggaagagtgaggaccaagctgtyaacaatcccagacctgccaagccccatttgtstgtgtgcctgccaggattctaagactgcatttgggaattttgacttttactgaatgtgaaattctgtgtatatatagccttggtgagctgacccagtcagggatgactctgatgtacttttgtcttacaggattcagaatccatggctggaagaggtagtaaggccattgggagggcatgcctctcctcagcccacccccaccctgtgtgggtctccattctgaaatttccattcaggtacttcacagttctgcaaattatgataggattagaagtgaagacattgttggggggttcagaggacatcaggctttgtactaggctgtggaacctggtgtacttgggcttgtgtaactttctggtccctcaaaagaggcaacatcagaagattaaagaaagtgagaatcactaaatatagcttgtcatttctgcccaaattttattacttgagcccagagttaccaaaattattcagggtgagcttcagttttggcaggacagcattaacttgcatctgtgttagcagtattgcatctttgtactccgaagtcagacagatttgagtttgaatccttgttttagcactaggaccttattccagcctttttttattttttaatttcaggcttagcatatttctaatggttactttctgtcacttagagaatgtgtagcagcacatgaaggacactgcatgcctayccaccatggcagctttgtgtccccagctgtcaggtgaggcatggaactcctgctgcccaactctccaggctattcgaggcctgagcgaggagggcacacttggccagggataggaaggaacaggcagtgcaaagggtgaggtgctccctccacacgactgaaatgtgtgtttctgcaagtctctcagttctctggtggccttactagtttcagaatagtaaatggctaatgtatttattcatgatggcctcattggcttgggagatgtacttaatttttaaaaatttgctttaattccctcatttctgcacttctccagtgctttctatgaattttttaaaggcaactgagccatgagagcacaagcccatttttctagctgcaaaacggacatgcctgaagtgtatgctcagctcgcatcaccttccagtgccctscctggagctagaacaacaaaacttaatcctcaggaggcttctgaggggctccagggagtcacaggattacttaaagaagggaaaggtcagaccctgatcctgatgccactgtcaaaaattctagcactttcatagtttaaaatattttacatttatacaaaatagtcatgtataaaatgttttttgttcagtttacatttttaaaaaggacaatggtaatttcaaatgccttctgcttacatgtcatgtaaatattgttaggagcccatattttttacaaaaactattatttgtggagattttcatgactgtataggtgttttcagttggaggatttgccaaacctgtgttttgaggcacacacgtgatctctgcttgggaaagtggccagtgccactgtgcagtgcccagcatttatacgtgactctgtttggtgtgtgctgtgttggtcaccacttaaagtagagccagtgtgcacaatttgaatatataaaaatttgaaaatatgtttagccagtctactctttagtatatattttgagtgagtgtcaagtggaaaaaaaacagtaaaaggaaattaatgaaggaaaggaaagcactttctgagttctgtcaaacacaagagcttcagaggaaacagtgcttcaagactgtagtatagtttgtccctcctcattgatttaactaagtggatactgaaaaaatatcacagaggcattgatcttggtgcagaaaccacctctccctgactaggggaaaataagctagcaagcagtgtgtcaggaagacccctcttgaaagcaaaacagaatttagactacagctagctttcacaaagctgttagcagtttatggtgttcaactataaataaatataccaccaaaagcataaggtgttactcttaagaaaatggcatgtttatcagattaaaaagctctaaaaccaaaaattatccaaaaagttaaactctgtgattagttctggacacagggcccaattctgtcgtctcttgagaactaggcaacccctgggcagaaccagcttgattagcaccatggccatccctttatgatgataacaaacctaaatattcaccttataaggaattctaagctcaaccacatttacaaatgctcagccctcggggttccaagactgctggtcttgggataccttagtgcggcatttatgacacaacacagctttgaggcatttgtccttggctggaaatgtcacacctgggagcaggcacaccctgcaagaggctattccgctgccacccaagcaatgaattatgagacaaagcaaaaattacactgatgttacagagacatcastgatccctgcaatgagtaataatcttcttttgactttgaactggtaggcaaatggaagaaatcttaacagctgacaacatcctagctggtaattaaaaaaataatttttagtactccagtttgaaatttggtctttcacggaaattttccctcatttgggaggtcaccaaaattgtgctagctttttaaatttttattattttttttaaagcagcacaggacaaacttctaccatcttgaaaaacttctaagctgtcccttatcctaaatcttgcacctacaagtcttagaaagtgaatctgaactaaatgattcaaagatgaaacataatgatatcatacttaatataaacatctatttcarygtttacgccagactgaacacaataaaagtacttatgaaaattataagtctgcactctttaattcttaagtttacttacacttatgaaataactcttgacatttattttgttggcatgtgctaattaataaacacatattcccaacacagcaaaggaaaaatcccagtccagagcattttgtctttgtgaagccaattaattaagacaccgcctctagtgccttgagattctgggctgcagaaatggttgctggggaacacatctccctcggcagagccagaaaccactgactgactgactaacaaacatttcttcaaataagatctagtgtgaaaagggcttcctctcatttcwtctgggctccattccatgaagaatataagttagttagttagttagtggaaattacaaaggaaaacacaacatctcatacacaatttattttatataacttacttggtgttttcttttattgaatcatacaaattcaaatggggattcctraataaatctttagttaatttacctttggcagaaacaacagattccaaaacaattagtagcatctcatttatttgtagcttaaaaaaaaattctgtagcgtatttttccaaaaacatagtcttaaacaaatgtgctttaaaagctaactggtaatgatctgattaatatcatagcttatttaagagagctattaaaggacagactagacatgtatttttaaaaaaacacaatttttggtcatgtgaatgattcatgttcagatttcaaaaataggaaacatcctaaagtgcatcattttatttataatctcactccttgaaattatagcaatctgcaatgtaaacagtagagcaaagaattccaaactatatttttatgtacatttaaacctgtaggattatgtacygtctttgtgtatggattaaaaccagggcacttccaacacatagctcaagcttccatacgattaagagcaaacttaaaggcattctttttccccatccttaacattcagctgacagaagagagctgctacctcacttcagcaatggaaaatgttgctgtaaatcccattggaccagccagtttctcacgaccctttaaaactgaaaacgggtcagtatagttttacattctttttcttttccttaaaactgtgccctttcagaaggcaactttcaaaacatacgagggtgcctctgctgtgtgttcatactgtaacacgtcgtctaaggcagagctcctgaagcaccttctctggtcagccgtggcaggcgagcagatgcctgggctcggcctcgcaaagcacaaaggtggacacagaacccactgtccttggcgcaggagttaaaaaagtaacagcaaatcatgaggtgacatcaggcacactgaagagmtggaggatttggtgtcttacatttcctggtccctccaaaatgtctaatatagacagttttgtgacaaagtctttgaaaaaaattataattggccacacagcatgacttcttttttttctttttatacatgatctcgaaaatagtgtgatttagattctgccttgggctgagctctgagggctacatttacctgtcagtttggggattttagtgmagattttttttaaaaaaattaaactctggtaagtactcaggaggctgagaacacaggccccttctctccccgatcctctgtatgcaggctgacttaagcccctttatgtttggctagtgccacaacaaaacagccccaaacagattgccatragcatgctrgcctggcttggtgtttgacgataaaatcagactggtaagtgcagtcagtgttcaggaaagaatctccaggctcttctcccatgacctggttttaaaatcagcattcatacagctgcttaccatctctctgtcctctgcagatgacccggtcctaggcagggaccaaaattccttgtcagctgaggaagtcctgaagaaacatcctgaagatgatgactgcactgccatcgtgggcagatgcagcttccatctacctgagggctgaaggggaaaacctttcacacacgtgaggaaggcgcagctctgtggaaaggtcactagaatggcagcggcagcaaatagggctccaatgcacgtttgcagttaactgggtccaaggagagcatggccctccacagcaagtttgctctatagaataaagtcctgagcttgtttttatcacagttagacagagaatggtctcttgtttctcagttatccagggaagaacagtgtatattctctgtagatgagtgttgtctaatgtagtgattaatctctgctagtgttaggaaagctccactactgtgtgtgtgtgtgcgtgcatgcgcgtgcgcatgtgcacatactgcagtcttgactttccaattacaaaatgcctaagtcaggtcacattgtcttcttccagccagtttctaaggcaggcaatggaaacaggagccgatgccaaatggtctagaggcagaagggctgcatgctttgcagggccagccccaaggctgccttccagagctgcactttctctggggacagtaaactctcaccgcagctgccggccccctgtgcttggccatgcccctcacatggacttggaatcagtgtctctcttgctgatgagcacctccaggagcctcagtttcgcctttatgtgcttatattcactgtattcttcagccataggagtgcggtcttccttctggacatttctaatgcaaataaaggaaaaaggggtctgaggatcattttctgtctttgctagatactattcatcgggcaaattatcattgtttagaaactttgcagtttatcaacttgtagaatcagtgttgccgagtggcccttggtctcaagactggggctggatttagacaagtaatgaaaatgtttcacccagaaggcaacatgcaactgagtttttatatagttaatctggcatcctgtatgataagaaggctaagaaatgcagaaattctctctgctaagtatgaattcacattgagctctcatacaccaaaatcttttattcatacttaatgttttctcattcttatatatttcatctcgtgaaattttaaatttttaattagcaactggtccacaacttagtttttttttttttttttttttccaaaaacagatagttaatactcctacttatcataaaactgtgttagaattcagcagctggattacataatactattataataagcctttattattgagtaactttacatacataatatttatatgcacaagtatttgagagcttataggtcaagccctgtgctaagtactttgtacccatgatctgatagaacccttataacaccttgatgagatgcagccattttctacacactacacatgatgaaaccagcacaggaaatcagataacttgcctgctcttggccaccacgcggtgcgctgctgctttgtgttttatgggaaattgcacatggcaaacattcaaccataggcttcctgcctttattattaaagggcaaatatgggtaaggaggatagcatggggcttgatttgttcaatgacctaaaaataaactgatcttattcataccctgccttgttctaggaaaggattctagtggcttctcagcagagggcagggcaaggaacaggtgctcaggaattggagcatctggcacgcaggcccccactgcactctgaggggcttcactctcctcagacacgaagtcatggaaccagagcttatctcctaagtccctcatagttctaaacttttttgacaattaagttaacgtcctccattgacattttcttaaaacctgggtggtttgcgtaattctacatgtataagatatctgtgcataatgtgacttagaataatataaaaaaggataagccaaaaaataggcttagatgaaagactggaaagatacacgtcaaaacattaattctgacttgtctttggttattattgttttgggaattactacttaaatttgcttacctatattttctaaatactgtgcaatgggtgggaaatgaaaagcaagtgtttaggtataaaaatatatgagacatatccaaatcagagatcctaaaagtaaattcatacaataattgttaaactaaactgaaatacaatatattttaaatgacaaagttaatttttatggtgctttcatttccccaaactttcaagaagtataaaagaggactcaagagaaacaatacttacatagcttcagtaatctgggttaaatccaatttaaaatgataaaacctaactccaatgtaagagatgcaaatctgttcctggttctttcctcaggctcctactgtgactttcggtaagatttttgtgtgctgttgcttgtaaacatgaaagactaaattgtgccttaaaattcactggcgagaggcagcccatcaaccaggtagatttactgcttttcttttctttgttttttttgagacgaagtcttgctctgtagcccaggctgcagtgcagtggcgtgatctcggctcactgcaaccttggcctcccgggttcaagtgattctcttgcctcagcctcgagtagctgggattacaggcctgtgctactgcacccggctaattttttgtatttttagtagagatggggtttcaccatgttggtcaggctggtcttgaactccttacctcatgtaatccaccctccttgacctcccaaagtgctaggattacaggcgtgagccaccacgcctggccgacttactgattttcatacatatttttcatttaaacttggcaattatcaccttcatttttgaaatgagcttgaaaatcagtaatacttagatctctctttcccttgtttctctagctccttttatttagaaatgaagtctcactctattgcccagaatagagtgcagtagcagaccacagctccctgcagcctcaaactcctgggttcaagcaatcctcctgccttagcctcccaagtagctagagctacaggtgtgccactacggccgcttggctaacctctagcttcttaagaaaaaagcgttggtgccaccaccagcgggaaacgcagcttcctgctgctcattgtagataagaatttgatgggacaggttcatttcataaatgtcagctgaatctgcattagtcttgggcattacccaaagagcatttcttctgggaggtccacacaaatcccatcatctcacagtcaacctctaagtgtccctgggcacaaacccaaggaccaggttacagggaggatgcagaagagtcccccctttgaaggcattccacagatctgacagaaaaacaagagggatgggtgtgtgtggtgcggcgggggggaagggagggtgggggaagacaggcactaccttccattctgtctgaaaaagttgtcttcaaaatcccgaagtttctttcgaatccttttcttttcttctctcatttcctggaggtgttccaggagttcaggtctaagagagaggaagcattgcaaggaaattaagttaaatttgagttgtcataaatgtgatgaatgtgtaactcaacaggagctgtgcagaaaggggaggcaagtaaatgcagaaactgctgagagcattgagggggcgcggaaatgcatgttttccatttcctgaaagccaaacatgctggcaacagatccagcttctgggggttcctgctacttgggaattcttagcccttgtgaaatcccatggcactttgtcatatttttctttgaaagaaagagatgacatctgtgctcagcgtgtgttaagtgatgggctgtgatgtacagaaccacacgatgccctttagagagagaacttctggttgtttaaacaagactcaaaagttccctcaaataacatgggctgaagcatataaaaaaagaaattttttaaaaaatcaccgttttatccagatacaccccaggtagtcacttgtattttatcagctaatttatttagatacaaaggctaagataatatttaagtgagctatttttaccaaaacatttcaccaccaccaccaaaatgacatacattgaggcagcatggagatttgaaagccctgtgtcctggctgcattttgatggtattttatcatccattggggaaataaatccatcagcgtcatcttcgaattggtccagaaagcatcgtgcactgaaatcggttttcagagtgaccatgaagtctggcttcacattgctatcgtcttctgacccctcctcttcttcctggagatacacagcaaccccaataaaaatctggtcactttttggggcagactttcattacaagtatcatttaataatcatttaattatcagactccatatagtttcttctgtatctacatttagcaacacatatgtacattacagatatattattgaacatctgtattcgatataaatatacacatttaataacacaatgtagccactcaatagagaaaacagactgcaaaactattttaaaatgagtgtacatcatgttaatagttgtcaggttgggggtaagaaggaacaaccatcataatttataacctaaatcagatgaactaaaaggatccaaaaatttccagctctgtgacagtacaaaacaaaattcatcaccagtaaccagtgcttgaaaggattctactacttgggtatctcagatggctttaaaaaaaaaaaaaatcagtctgaacattttctgaaataatacaacatttctatttaagaattgagattagaaaatattttatggctgcttaatgcacaaaattttagggaaattttaagaagactgaaagatattatattctcatgattgaaataagaaaactcaagcttttccaaagaacttccaagggccacatctgtattttttggcatacaagattctaagaaaagtatgatattctcggtctgtattgataatgcaaatagaaaaataataaagccaaatcagcatttcttagagccaatttaaggctatgtaagcctaaggaagagataatatcagagtgtgaaagatttcaaaacaagtgatgtactgccaaaaggtagtcagaccacagagaataacttactatcctaaaaaatttaaaaattggttcggaatacagccacataaaaaatggtatgcatagcaccaattattacaggtaaaccaaatggtttccatgccagtgcagcaaaaacatctcaggaggccgcagcagttcccgctggcgggcaaagtacaagtgtgcaaatggttcatggtaaattttgatatgtttaataagggtgtttctgaagagaaataatgtgaataaacaagcaaccaaacaaagcaaaacaaaaaaggactatcatataactgatatcaaagtattgctatgaaaataaaattggcaaaagctaggtggcttttccagattgtctcagctgtgacttcagaccttgagtctctttaaattgttaaaaacatttaaaagtttacaaagtaaaattgactttttaaatgaatacgtttctttttgttttagtaagagtaataacaattcccatcgacgtagttttgataaaaattgagataatgtgtgtcaggtacctcataaggcacacctgggacactggctgtgcacatcagttttccgctccctctcttccttcccctcccctggataaggaaaacagggtagaagtatctgaccaactcagtgaaggcaggaattggggcctgtttactgctgtccccagagcttggccaatgcttgcatatggccaataaatggctgttaagcagtctagtaattcagtttgaaaagagaactacaaaaaattactattagaagagcataaacacctaacagagttagggacagctaacagagttacaaataagaacttaacgacctttaatgaaatcaggtgtctaggccttatcaattatatcccaaagtcctgagagaacttaaaagtgtggaagtgtgccttgcacata

SEQ ID NO: 97273 - DNA, 13582 bp, Homo sapiens
tgtttttagaattgggaaatttatggcagatcataaagcagatttgttagcccagctgatttcccttccctcctggttttggggattgctttataacattgtagatgcgtgtgagtacgtatgtagatacatacgtaacctttagtctttcaaacaatgtcttagcttttgcattaagtttcagacaagataatgtgtgcatcatttgttagaagctaacaatgggataggcaagcatcctgaggaaggggaacattcagagtgtcctcatcctctgctgagtcatcatagtgctctgtgagtatgatacagtggctggggaaatgaatgacctagtgcaggaataggcaattggcaatgtagtctgcaattgaggcagtggccagaactgccttattactccttttcatatctttgtcaagttatttctcttagcatattttttgtctctgtcttttttgttctctttctgagtctgaatttttctccctttctgtttctccatttctctctccctgtcactctcactgtctttctccttattcaacagacatttctttgaatcaacaattgaattgactcaacagttgtgggagaaactgcaggaatagtaaaatataacacagtttgtttagggtgataagctgtatccagatgcaaccataaatggaatatgaagactaaattgggtggttgaatctgaaggcgttcagagaagtcagcttggacagatgcatctgggaggacagatatgggatagagctaagtttggaagcctactaagatttggatactagaaagtagagaagaggatataaacatgaaaggtgctctgtaaagggatggaaaaatctgagttgtcgtttcagacagaaattttgattgcattttactgtgttcaagatgtacagaacagcttctgtactaggtagaaatttagatttcggtttttcagagtactcattgaatacactgtgaactcatccatgctactttaggcactgatgtatatgtctgtgtcactcagtgacaggcaggagaccctgttgctgtcacagttacctgtttgtctttgggctgctgtaaaaaagtacgataaactggatggcttataaacaacacaaatgtatttgtcatgttctggaggccggaagtccaagattaggctgccagcatggttaggttctggcgagggccttcttccacgttgcagactgctgacttctcgttgtatcctagcatggtggagagcagcgttgggaagcaagctctcatgactcttataaggacaccagtcccattcatggttactgctgtactctttactatagctgttttggttagggaccaccagaaaaagacatgaatgaatttttttttcttttcattttatgctgcacaaaatagaaatcttaccaacaaagtacattgaggtcctggtaagaaaggctgtatgaagttgtaaaagattgatcattatagtcattatttccttggctatatgccataatgtagtcattagcagtcctaaattatatgactaagaaaatgaaatagctgtaagaagaatacctactggccttttaacttaggcagttgtatacacagatacttctggcattgaggctgtttttgttaacagtaagatatttgctggcattgctgccccaggggaaaatgccagaggaataccaattctgtattcataatttattccatttcatttggttttaaaatgctttctatccttggacagaacctacacagtcaaatgagttgtaggcatccaggtaaaagaacatctgtggctgattactggtggctgcatcatagacaaatcttgccaccagctggtagtcacatctggataatactatatcacatgactactcatggttaagcatttcttatggtctataatatggtgttaattaccattagtgaaaaacccatatgtcattctagattccctaaaatttaccttaatttgatgcaatcaaattaaatgcaattgctgtcttcccattttccccatattaaaaaagaaacagatgacacacacatggggctggggggtggggcagtggggggcagagagtagagtaaagagatcacatagtaagaaatgccaaacttaaggtaagtgcttcaaagggcatctagattccgtagtgagaacctgagaataaaactcatgcatgacaaacacttcttgctccttaagatctacttcaggaccgctggcagacttcagttgatctttcaggatagtttctgagggatgcagtctttaagatctgcattgtatttgcactggactattacaggaactgcagaattaaaatgccagtaacacttcttgagtgcttaccatgcatcagacactatttgaaatattttacatgtaagactccccatttactgaggaggaaactgaggcacagacaggcataagtctcttgttcaacgttacacagctagaagtccaggattctaaaccagagccaggattcaaagccaggtggtttgagttagactgcgctccatgggtaccagcatatggcctctcaggggctaaggctggggctcaagagttcccatcctcctttcgccctaggaagaaaaatgactttgaagactttgctgtttttcgtttcaggctgactaggtaatgttttcaaaaagcaaaattgtaatagttaaaaacataactaatatacatatggaatggaatgtctgaatttttaaacttaggtgaagacaatgcttatatttaaaatgctatttcagagtactcatgaatgcccttaatagtgactgccatggtttgctatgtgaatgtgtatttttctgtttcttcactgttgaatatttggcttgtttgtatgttcttttttattcctcttttttctcttcccccccaccaccatttttaataagactatatcaagtatcttttgtgtataaaggattttgtgcctttaaatttgctttttaatgataaggtctcaggggtgaaatggaattaaaatgtataacatttgaatttgttggtagatatttttgataaattgattttgctaatgaattatactcccttatatgtcattatcaccatttcatccagtccttagaaacatggtgtgtattctttaaaaaaaaagttgcatttctttcacacataggctactttacatagtctacacagtattgatctattttactgctgtttacctctaaaatatttgtttaaaaaatgaattaactagaaggtggtggttgcacagcattatgaatgtacaaaacgccactgaattgttccctttaaaatggttaattttatgttatgcaaatttcacctcaataaagtgtgtacatgtgtgtatatgtgtaaatgtgtctatgtgtatgcattgagtgtacattctcaggcagagagagctgccatgccatttttcacagtaagcatcggcatgccagttttctgcgtaatactcagagagttggttgagtgtgtattgcatgcttcctttctttctgccagttattttgtgctttgttgactaattttggcctataataggttaaaatggtttatgaatgatagtgtttgacctaccttgaagcaagggtatcctgttagatgttaacatgcaggttttagggttgccagagaaactatcaaataagcagtccaggaaacaatataaagattagcccagttaggaagtggcagaaatcgcttgacgtcacaaacatccctgtatccttagagaagtggccaacaattctctaagctagaaaaccccacagctaaaatcttatcataaacaaaagaaagattgctggccagagcacatagctaggaacacttgtctctagaccctgccagagccccggctcacctagtgctgcaggttcaggaacacgcagcattaggtgagttctttctgcctcaggcagggtttgcagtctttcctctttttagagactctgctgatgtcctttatgtatttctctagtaggacttaataattttcatatgattcataggaactcttcattatgtttatgactattaaccctttgccatccatatttattgtaggttttatcctctgtttttggttttgaaaatgtagagtgtgtctttaactctgtgatttcttaatttttgtgttgtcatgtgtgttatttcttttggtcttataccactctaatcctagccattccctgtccagtaattgatatttaatatattttcttcagttagtctgtagtctgaggtaaaaatctaaactgtttccaaattgctaaaggttttcttagctgttcttaaggtgaacattatggtaattatattaggttccagatccagtttgagttttgattagaattgtgataaaagttaatttgggaagaactgacgtttttgtgatattcagtcttactatccaaaggcttatgttatgtttgttttttatttttacataggtcatacacatttcttattagaggttttataaatgttttgatttcttatttttactctgagagcctttcacatatattttgatcattattagtgcctataaatggttattggtttttgtgtatttatctgataactggtcagttcatcaaacttattaaattgaattgttttccagttgattctcttgggttttctatatgtaaaaaacatttcccaatacttatgcctcttagttgtgtttcaatcgtttttgctttttactggaaccagaaaaatagtaaaatgatagtctctctcattcctggatataagaaatcaatattaaattttattagattttttctctattaagataatcatatgattaagataatcagaactttgtatgtaacgtattattctgattttctcttttggttggcctgagcataatgaagattaactttaccttaaggttgtttgtactcaacaatctgttgtgattagcaacaggtcagtgctgccttccattccctaggataaagcaatataattttgcttctttgtaattttaacccttcagggaaaaggaagcaaatggcatctgattttttaatttttctggagtccagtttttaaaaaaaactttctgcttcattcagaatgaagcaaacataaagttgaaatagccttttttatcctttctgggagatgataaaaacctgatattatattgaggaaaccaaaacaagatagtttatttaatttcctgcatttctgaattaaaggccacattcttctctcataataaggaatcaaaaacatagggagggatgtagtgatgtctctttctcccattttgtaacaggagaggaggattgaatttccaatcactgtctttatctttcatgtaataataatagctaagaattattcagcacttaccatggtttggatgctattctataggatttatatgtattaatccatttgctcttcatagtaacccatgaggaagggactattcctattcccttttgtagatgaggagaaactggccactgagagtattagctgagttgcctaaggtacattactaataggaggcagagctgggatttgaatgcaggcagtcacagtaccgagtcttttatatatattttttgaaaatactgttttattaacaccacagtgataaacaactttaagcttatgtttctttatagatcactggctcacacataattcaaaacccacacagaagctaagagtctttacattaaatatattcttcctaaaaatccttactgtatgcatctgtcctcaagcagtaaaatttgattatgcaccattttataattaatatgtcacatttacatagcaaaataatgaaggcacagctaatacaagcaaacttaaaccctttctacttctgagctgggggtaggggcacacacttggattggttcttcaagtatatattttttccaaacattagcttcagtgaagagttctgatgattttcacagctamaccctaaaagctacatgacagaaagacgtcacaaggcgcaaagtacataacgctggatacacatgctttacataatttgctacattctacatctcttcaagtaaattaatatttctaaaacgctaggtaaagtgatttaatacttaaacatatttggggtattttttacgtgtttgtaaatagacagtactaagaaaacacaaacatgagattgtaactaatgaatacatatgttgacagtattttacaggttttacaccctccttcttggaaccatgttgtttctctaaattcaaatactcaaaacatttttcagaacttgaaatggcagttttcctggccttattaacagtagtgtcatgatctccattgcaatcttcctcaatgccatcaatctcctgtgaagtgtaaagctgatgtctgcgttacaaaagcaaagtctcaaagatgacgtttttcttgggttctgccttctctgcactgcgaaatgtcatgagtaaagaaatttaagaattaagcactgagaacgtgttcagtcatggcttgggtgttccatgtgtagcgtatgctgtgtgatgaatgggtttcaaagtgacgttctttacttcgcatctgctaacaccctttgtaaacctcaatcctcagagaagagaccatgaaaacataattttgggtttaattcagttttctttaacaccttttgatatatttattatgttcaaaatgaaagtcaaatttgaatcgagctggccaggatctaattgctttaatttaatctattttaggaatgtcagaataaattcacattgtattttggtcaaaaacctgagcctttttaagtccatcgatattctgggaaaaacaaaaccaggcttttttcttcgtgggctttctcttcatccatctctgccccccttacttcttggcgtcatcaggcatctcggcgtgggcatcgtcatgtttggcccccgcggcagcctctgccgcagcctcctcctcctcctcgtcttccccctcctcctcgtcatcctcgtactcctcttcctcctcctcctccccctccaaggtccatgcacacccctccatctcgccggtgagctcttggatcttggcgagtaggggcttatagatgtcattatactttttttccagagcctgaaattccttatcaaatttggcttctatcttatcgcatcgcttctgcagctttttgagggccaggactcggcatttcaccgaattaggcaggctctcgataaagtcatttttcggctttggggcattctctgcaggggtctggggctcctcagccatctgaccagccgcgctgtcagggtcaccagccgcgctgtcacagtctccaccctgcgcaccgccttccgccattacctcctcygccgctgcctccgccgctgccgccgcctggctaggctccgcaggcccctggttttccgagtcggccatgttagaggagaagccgcagaggtctaggagggctcccgcagaggccctgcacccgagctggtccagagagatcttgcggatgcggcaagtggcggtgacgtgcggccgcgggaatgacgttggccgcggccccgcctcctgctttcgcggcacttgactggcttcccactatcagctgacggccgtgtgctcatactgcaccagattcctcctgttgctaccctgacatcttctgggccctcaacacccgcctgttggacagacaccctgttcccagcccacccatgtacccacccctgtagagctgggctgggagtgtcagtagctgcccgaggtgcttcttcaggaactgcatagatggcctcagaccattttccgtgtgctcctcacccccatccaggcccttctacaaatgccagtgcatatgtcttcgctttcctctgcatctctctccatagctggcgtttgatcacctcttagattcctccgcattcctctccatgcagtggaggaacgggcaagctggctccattccacccctttggggacctggggtgcatgtgtgtggatagggcagcttgcatatccaagctctgtacctatgtgtccacccaacacccccttggccatcccacacacctagcggcatatatcttggtggcaaggtcgtctctcagcaggactcccctggaagcagttttggagccatttgggtaggaaatctcagagctcccggtgtcctggtgtgtgttctagaagatcctacagaatctttggcctgtgggaaggactaaagcttgaggagggctgaaaaaaagcaagtctttctaaagcatggggcccagggccaaggccccctcttatcttggttaaagcatgtgccatctatcccaccccgctcacattcgtcttccctgccttcccccaacaccgtctgcttccctgccttccccactatctgttttcacacctttccacaccacatcttctccctccctcctgcccctcccccgcactgacttatgccccaccttctgcccatcttcttccccgccttcttccccactcactgcctccttcctcaccttccccccgccgcactgtccttttccccaccttcctcaccctcttcttccccaccctccttaccctcttcttccccaccttcctcaccctcctcacccccttcttcctcacccactgccttcttcctcaccttcccccccaccgaactttttcctcacgctcctcaccctcttcttcctcaccctcttcaccctcttcttcctcacgctcctcaccctcttcttcctcaccctcttcaccctcttcttcctcacgctcctcaccctcttcttcctcaccctctttaccctcttcttcctcacgctcctcaccctcttcttcctcaccctcttcaccctcttcttcctcacgctcctcaccctcttcttcctcaccctcttcaccctcttcttcctcacgctcctcaccctcttcttcctcaccctcttcaccctcttcttcctcacgctcctcaccctcttcttcctcaccctcttcaccctcttcttccccaccccctagccccaccctcttcccacccacccccagccccgccttcttcttccccacccacccacccagccccaccccactcatcgacccagctccaccctcttcttccccaccgacccacccctaccctcttccccacccacccacccctacccgcttcttctccacccacccacccagccccaccccactcatcgacccagctccaccctcttcttccccaccgacccacccctaccctcttccccacccacccacccctacccgcttcttccccacccacccacccagccccaccccactcatcgacccagctccaccctcttcttccccaccgacccacccctaccctcttccccacccacccacccctacccgcttcttctccacccacccacccagccccaccctcttcctccccacccacccacccagccccaccctcttcttccccaccctgcccaccatcttcttccccacgatctgtcttcttccccaccttcccccacggtcttcaccaccttcccccaaccgtcttctttaccctgctcaccatcttcttactggctcaccatcttctctgccttctttctcactcccatatatcatctcttttgatggctacagctgccttgagattaggaatgatgtttctcattttacagatagtaaacttagaagcaaatacagtgaaatcatcttactgcatgtatcacttaattggcagatgcaggggcagaaaacaggccttttgacccctatagtatggatgttgtgacagactttaaaaaaaaaatcccacattttggttaaattcatttgactaacttaacttgcttaaaatatttagggcatgttcatctttcaagatttttattttcctgtctcaacagatcttaaaacttagtgttaaaccagactgttttttaaaaagtctggcttattgaggtatcatttacataacagtaaaatttgtccttttgggcgtgctttcacaagcaaatacagtaatgtaagcactgtagtaatcaagatatagaacagtaaatagtcccctaaaagtccgttgtggcccttccccagcatccagccctggtgagcactgtgctgttctctgtctcagtacctctgttttttccagaatgtcaggtaaattgaatcatatgaatgtagccatttgagcctggcttttttttttactagcagagtacatttgagattgatttatgttgttgtatatattagtaaatttattttttattattttttattttactttttattattgggtagtattcccatttgtggtgtttgcagtttttcataattgtgaataatgctgtgatcattcatctacaggtttctctatgagcatggacttttatttctcttgggtagacacctagcagtgggattgctgggtcatacagtaaatgtacgcttaacttcataagaagctgccacactgtttcccaaagtggctttaatctgtttagtgttgctaaaaaggaagaccggaggctgctagctaaaaggttcaagattgggcatgtagatggtgagagtctcaggctgcttcctgagactgttgagctatttctaccaatagtcccttaagtgaaatctaggtttttctatcaagctcctcaaaactctttcaggctctacctatttcctcatttcaaaggcacatctgcgtttttaggtatttgctgttgtagtactgtacttcttagtaccgaaatctatatgtcagtgttctccagagaaacagaaccaacagggtgtgaagccgaggggggtgggggcaaggagggatttattttaaagaattggttcatgtgattgtgggggctgtcaaacccgaaatctgcagggtaggctgtaaggctagaaattctggcaatagttaatatttaaatcttgagtccaaagacagtctggagggagaattctttcctctttggaggacctcaagtctttttctcttaaggccttcagctgattggatatggcctacccacattatggagggtaacctgctttactcaaagtcaatgaatttaaatgttcatcccaactaaaaaaatatcttaacaacatccagactggtgtttgaccaaacaactggatgccatagcctagccaagttgacctataaaattaaccatcacagtctgtaataaaaattgttgtgatggtgtttctcttgggtaattgtatcagaaaaatgtcattagtttagtgtcatgggtttcagagaagtgaggtgttatatacggtgtgagaaactttcagcatcaatgattaacatgcacaataatctttttacattagtggctttattttaaagattgcacagttataccattttaaaaatgggaaaagggaggcttactagttagatacagaagatggcagagcctggatttgaacccctgtctgcctcacttatccactgtattacaccatttgttggctagttattggtgtggatggtgaacatgtaaaaactatctgcttggaggaaacccaataattcaaatgtagctttatgaagtattaaattacagtgatggataagtagtaaataactatcttcatgatgtgaagttttaaaattgtttttaatctaaaatacaaaaagttaatgtgacaaacatttgtatatatgatccacagtcaacaggtatttgcttcagattttttaataaaagaaaaaaattactgataccgctgtacatacccttaattccaaattactgatactgttgtacatacccttaattccattcccctcttcccgcccttctttcttacacagacaaaactcttatgaatttgatatgttttttttatgtttttatactttttataataaacatgtatgttaaaacagatttttttttttttttttgagatagggtcttgctttgtcacccgggctgaagtacagtggcgtgatcatggctcactgcagccttgacctcctgggctcaggtgattctcccacctcagccttctgagcagctgggactacaggcatgcaccaccaggcctggctaattttttgtggagactgggtcttgccatgttgcccaggctggttttgaattctgggctgaagccatctgcctgcctcagcctcccaaagtgctgggattataggcatgagccactgcacctggctagacaaagatctttttacattaatgtctttgtttttaaaaatgaacacttacacatcttatgtatgcatcatatttataatttcatactcataagcaaaatctcatatccataaacaatatgataatactagttaatacttacaaagtaattgttatacaccagccttggtttaagcactcttacatgtattcactcatttaatcctaaagcagtcccatgtgttatctactcttactctcccccattttacaaatgaggacacaggcatggagaagttaaataacttgcccaagggtcacaagctctgagtgacagagctactaccttttataagtagcattgttttaagtgttaaaacacaacttacataaatgccatcatattttactgaacatgcaaatacttgattttcactcagcattgttcttgagattctattcattttgctaagtttagatctagttaattccatcaaagtgctctgctttatggtttccatcatatgactctaccatcttttccttgtccatgttcatattaatggatgtttagtgttgtttctctaaattctctatattgcaagaaaatgctgcagtaaacttgcctgcactcatcttcttgtgcacacatgttagcgtctctgcattacctacccgctagcacagtggcatggtcaagggtatttacattttcaacttatctagatattgacagaatttccccccaaaatgtttatgtctaggttcacagtttatatttccacttgtgagagactgaatattcctatggacaatggccaggccatatataaataaacatggagctgagacccacaatctgcagcaacctgcccgggaaaccaacctcttatctgcaataagcagcccaggaagccagcctgctataagtcagacttgcaggcagcctgattgccatctgtctcgataacttctgtaacagtgggcccaaataggccaggatgtgattaataatcagcagcttccctaatttttgttcctacttccaacttagggccaaccagagaaagccaaatacacacccttaaccagtcacataggatgccccacttctagttagcccacctgcagcttccccagactagcagcctccaatcagagtgtacctgaagccttccctctttccactgtaaagcttttccactcctctgcttgattttgagtctctgccacaacacaagtgacagtggctgactctcttgctatagcagctctgaaaaaatagcctttgctcttctcatttggttgatctttatatatttccatggttgcgatatggttcccatcatttcagtttatcttc

SEQ ID NO: 97274 - DNA, 26152 bp, Homo sapiens
gtaacttatattttaaagccaccaaaagcacagaaaggcaaaatcttggagtatttctatttatgcgtctctgctcctggcttatatatccacttacaacgtaacaatctttgctacctgtctgcagttttgcagggaagatggctgtactcattgtgtccatacagctcaatgagcacaatgaatacccattgagctgtatgggcacttaatacatccaggacaaacatcttcagtggcaaaatcacagtcagcttaatttctgaatttgaagaaaaaaacactattatatgatttcaaattcctgtgtatgggttgcaaaggaccttaagatgttatttgggccaggtgtggtggctcacacctgtaatcccagcactttgggaggctgaggcgtgtggatcacttgaggtcagtagttggagatcagcctggccaacagggtgaaactccgtctctactaacaatacaaaaactagccaggcgtggtggcgcatatctgtaatcccagctactagggaggccgaagcaggagaattgcttgaacctgggaggcaggggttgcagcgagccgagatcgcaccactgcactccagcctgggcgacagagtgaaactctgtctccaaaaaaaaaaaaaaaaaaaaaaaaagataaaaagacgttatttggtcctggtctgctccacctggtatttgtgatctttgggagcatgagccagtatgtgtggtgtgttttgaaagtgagatggtaggggaagtatactccaagtcacagctcttttttgctgtgactctcttcctagaatgttaatgatcactactctaaagcactaattttatatcaaaacaagtagagagtagtagaatgctaaacacatgaagttttctacatgccaaggtttcaaagatctctccagctggctaccttgtacaatatgcctctctccaagggtaacatcatttctctgccaccagaggttgagaagcactagaataatgaattccctgaaccctacccttgtccgccagggtgggtgcattttaaagctctctaagcaagctgacttcatttgcttattactctattcaatcaggagcctcttctcaaatcttgtttaagtcgctgtagcaaaactgaagaccatttctgtcagaggcattttaaccagagcgactccaccttgaataggcgctgggtaaaataaggctgagacctacctactgggctgcattcccaggatgctaggcattcttagtcacagaatgaaataggaggttggcacaagacacatgtcacaaagaccctgctgataagacaggctggggtaaagaagccagcaaaaacccatcaaaaccaagatggcaatgaaagtgacctctggtcatcttcaaggctcattataggctaattatagtgcatttgtacaccaaaaggcagtctcaccagtgccacgagtttacaaatgccatggcaatgtcatgaagttaccctatatggtctaaaagggggaggaatccttagttctgggaattgcccacccctttcttggaaaactcacgaataacccatcctttgtttagcatataatcaagaaataactatatgtatactcggttgagcagcccatactgctgctctgtctatggaaaagccattcttttatttctttgcttctctaataaacttgcttccactttatcctatgaactcactccaaattctttcttgcgtgaggtacaagaaccctctctggggtcagaataaggacccctttctggtaacatttcttcttttgtttctaacgtgtcagcatatatttaaagttatctaatcagcagaaaaatgagtatcctacagagttaccttaaacctaaactgcagaagataaattgcaataatccagtgacccatggggatagctgctcagcccaagatcaaaactaaaagagatggagaagcatgctgcaaaggtgaaagataagagaaggatgttgtgattgtaaggctggatgactttcaacaccttttctttgacactgtcctttgggatttatcctctgcagatctcagatctactcatctatccagagacctcattgtgtctctttttttcccagtgccttaaatgtatcattaccttgattcgaacttcatgagcctttgggggtgccacctctatctcctctatggagagaggctttccagcctcccaagcaactgcagccttgcacttgataacctgaagtggggaaaaaagggaataagctgtttatcctcctaaacaagtaactacttaatagccaatttagatacagattaatgctaatcttaaaaagtatatcacagattcacaaagaaacatatgcttccaagtgatatgtttttagatttcacacaaatagtatacatcaaaaatgatttaattgagatgattacctggtcagatagaaaagtatcttttggttaaaaagttgtactcatcaaatatttaatggccttctacagtgcatatgcaagagcaggttaagaacacaagttccgagagaatctgattcagcaggtctggcatggggtccaagaaatctgcatgcttaacatatgcctgaagaaattcttttgctcaggctgttctgaataccaccggcttggtgcaaaactgcagggtgggaaggaggattaggagtgtaacagtgaggagctatatcccttgtaactgcaccggccaatacagcagccacttgccaaatatgactactgagctcttagaaaatgaccactggccgggcttggctgctcacgcctgtaatcccagcactttgggaggacaaggtgggcagatcatgaagtcaggagttcaagaccaacctggccagcatggtgaaacctcatctctacaaaaatacaaaaattagctgggcatggtggtgcgcatctgtgtggtcccagctactcaggaggctgaggcaggagaatggcttgaacccgggaggtggaggttgcagtgagccgagattgtgccactgcactccagcctgggcaacagagcgagacatcgtctcaaaacaaacaaacaaacaaacaaacaaacaaacaaaactgagatatgctataaatatagctggactttgaagacttagttcaaagaaaagtaaaaatatctcatcaacagtatttttaaaaatactgcttacatgttgaaatggtagtttatttataacaacattataaataatgtaatttaacataattaaaatattaaaacttcactttttcctttttaatgaggctactgaaaatttaaaattacacgtgactaatatatctatagcacacagacctgctttagagattatagtcatgtataccctccattacaagagaatcacacgtaatgagaaaggttctaattagtttacattacacttgagaaatgtgtggacagactaaaggttgtaagccactgggtttacaggagacagactttaaagttaataattacaaagagtgtgatttaaagagacaggcacaaagtaatacagaaagcaaaaaaagtaggttaagagtgtaactttgcttggtttgggagagcttcacttctaaccaggatactgaaggatgaggaaaaggtaattataaatggtggtaaaacacctacatatagggtgattgtgagaactgaataagaaagaatatgaagtccctggccgggcgcggtggctcaagcctgtaatcccagcactttgggaggccgaggcgggcggatcacgaggtcaggagatcgagaccatcctggctaggtgaaaccccgtctctactaaaaatacaaaaaattagccaggggaggtggcagtcgcctgtagtcacagctaccggggaggctgaggcaggagaacggcgtgaacccaggaggcggagcttgtagtgagccgagatcgcgccactgcactccagcctgggtgacagagcaagactgcgtctcaaaaaaaaaaaaaaaaaaaaaaagaatatgaagtccctaacacaatccttggcacagcatagctttgcaaaataagttagtagttattggtagcaacagaacaaacggttgagggaaaggagaggtgaactacatagagatataaaaaatggcctctgtaggccgggtgcaggggctcacgcctgtaatcccagcactttgggaggccgagatgggcggatcacctgaggtcaggagttcgagaccagcctggccactatggcgaaaccccgtctctactaaaaatacaaaaataccgagcatggtgacgggcgccggtaatcccagctactcgggaggctgagacaggagaatcgcttgaacccgggaggcaaaggttgcagtgacccaagatcgcgctaccgcactccagcctgggaaacaaagagcgaaactccgtctgaactggcgggggaggggggggggagggaaatggcctctgtaaattggtgaggttggaaatgtggaaatgatcgtttttaaaattaaattgcagatattaaatctcatagtacaaagaatcagacactgcattagaacctttttcatttcaatgtgccataaatttcaactccacaagtcagattcagaatactaacaattaagttatgcaacataagaatccaaagaaacaagaatactaaatttgatggcctgctcccctttaaaaaatgtcttaatggagcctaaccttttccttttactgacaattctaagcaaaacaaagccccactctaaatccgcgggaaatggccctacttcaacatttgaactatagtaacaattataatctttcaccttctctgaataaagacactcagtaataaggaaaagcaactaccagtttaagtctgaaagactgtttagagtttatttctttcaaactccaatatgtttaaggccatttgtcttactagaaaatgtccaaaattgcaaaacattaaaataatcagcaactttagactgagtatgttattcgtaatttctgcctttctttactgtctaatttgtattttatgaatttgtcatagaggagcagacctgggtcggaatcccagctcgccatcgttggtgtgaccaagcacaaccaacctcaaacctcagtttttggtaagatggggataacacctcgcagaggtgtttgttacgtgaggactagagggaatataaatctcttggtatttaagtgctcgaaaatgtttctgaaagggacgtaggggtctttccaaaatacactccttggaggcacaataattaaggcgtaggctcaattatgcaacacaagcaacctaggagttagaagcacgggatctggctgcagctctgccaagtatgcaagctgcaagaatgacccagagcgagttacttaatttcgtgtaagaagcaatgcgtggccgctcctaagccatttccactgggataccgacctgaccagcccctgccccccactctccggctctcccacccccccaccccgttccgactgtcccagaagcagcaaagaaagctgcttcccaactgaagagccgagacaaagcttccttctctttctgcccctctgagccgctcgctgggggcccagtttcagaaccaagagccagatcccctcttgggcgccgagcctcgcgcgcccccgaggatagcagcctagtcccatgccatgcactccctcccttggactcagggccctccgctcaacgggccctacctcgttcgccatgttcacggattctggtcggcgcggggggctgacatccggggtgggccgcgcagcgacggaggcatgggcgtggcgagcgcctagcgaggggggcggggcgtggggggggcttgcaatggctccaaccggaagggcggtgctcgagctgtggtgcgtgccgctaagttgtgcgttccagggtgcactcgccggcgaggctgcacggcgccggtttcattgctaaaatccgacggacttgttgcagaactcgttttttttgtcgggaaagggcttccyygtgtaactttacagcagttatcgtagataagacttgcaaattacagatgtggacggtgagggaacgggaatttcactgaaagcgcctgagaaccagtaagagacctgcaacagctttgtgctccactggcgaatgcttcctcccctaatacacattatgtgtgcttggagacacaaggagtaagatacagcccctcaagggactcgtcatagggagaggacacagctttgggaataaaggggccacaaaggaggagagaggagtttgctgaaacttcccaagctcccattccagcagttcctgaagggtaggtaggattttggggagacagtagaacgtgggcagagaactttggaaggaggagatgaggagaacaaaaagtctcctgatcctggacagttttttgtgttaagagtgggccagagtgtagagagagagaatgtagtatttgtcggtttactctttctttgtttgtttgagacggagtctcgcactgtcgcccaggctggagtgcagtggcgcgatctcgggtcactgcaacctccgcctcctaggttcaagtgattctcgtgcctcagcctcctgagtagttgggatcacaggcacacgccaccacgctggctcaattttgtatttttagtagagattgggagtgggggcagggggttggtctcaccatgtatgccagtctggtcttgaactcctaacctcaagtgrttcacccacctcagcctcccaaagtgctgggattacgggcatgagccaccgcacctggcctgccagtttactcttaaactctgttgtaaacgctgaattttgttaaaatagctctgtcagacacactgctcttttctgtctttcagtctttttcttggctcttttccgggtacatatggtaagattgtccaaagtctttccgtcctttcactccactctctcactcacactttggcttttaacgtctatttatggaaagatgactaccagattattatctccaatcaggatggctcccctaaactccagacttggacatgtaactrcctactggatttctgtctccattaggatatctcacaatcgaatgcaactcctaaaactcctattaatattttctccttatagggactctttcctctgtgtgttgacactctccacatacttaccctagccagaaacatgagagtcacaacttctccctctccctcggtccctgcattcagtttgtcaccaagccctaaatatctctctggtcttgtgcctctctctccccactgctgctgtattagttcaggctttcataatttcttacaggattactgaaagagcctcccatctgatttctttgatgccaggcccttgaatctaatacttaaaaaggaatgccctgttagtgatctttccaaaacgtaacatcaatcaatgccatttcctattttccttcaataatttttgaatgagttaggctwwtaaataaataaataaataaataccattcttctatttaaaaatattcaagggagaacaaatggataaaatccaaactctttaggccactcaggctctgaattacttccttctgtatatacctctatccttatttcctgctctcctgccaaatttcacaccaacatttaaggaacattcgtagttccttaaagggactatgctttttcttgattccaggcctttgtgtatgtcaatacttctgcttggaatgcagcaagcaatttctagtgggaaaaaaaaaagacttggcagagagttttcttttccctattgcagatatattgtctattttctggaaagagacacttgcatttttgtagtgccttgtttaacaataataggcaagactttaggtttctggtctgacatgtaaggaatttagaagtcatcactccatcctaacaacaactaaaaagctaaaaaaaatgagaaattaataactcttcttagagctgtaagtgaagtggggtcacagagaaaacagcttctccaaaattagagacacagatgggtggattcaaagaatcacaacttaccatagaaacacacttttgcaggaactgttactggagtaggaaagtctgagctgtaattgatgaattgccagaggctcattrtggattagtttgagagttaaagattcttgggggacccaatcktaggggggctttcacacttttgtgagttttacctccgtgaattctcagagaagrtcagagaaaaatccccaattgcttcctgcatgaggagtgtaaaaggaattattttgaaaaattctagkgcattttgttcttaacaagacttgccaacaaaagaaactattttactcgagcctagtgtactgggatttttacaagtggttaactgacctgggggaaaggaaatacccaactccagctccctctagacattctgtaccacctaagggggtgaaaaaacaaactgagaactgtgaagtttacagcctrgggacacaggctcactaaaagactgagataaaatggtagaactataggacacttccccttcccgtgtatcttaccactacattactaaagggctatttactgcaatttctttgactcagtatattatatccgcctttcaatacaaaattacaaggcatattaaaaggcaacatagtttgaatggacagagcaagcagtggaaccaaacccagaggatgacagggatgttgctattatcagaccatgaatttaaaacaactatgattaatattgtttgaaatgcttgttccccggtgctgtaaagaaatagtacttgaacataaatttaatttagtaaggccatttttacttttgcagaaagggtacactggccagcagttttgccaygagagtacaccaaacaaaggagacagggtcatttataacctaatgtatccaccctactgctgtgtccggtttccattgtctggaacgggacytcacattctgtatttgtcctgacttgctagcaacttagaactttttaaaagaggcagaggtagaggagaacaaaggaaggaggaggtaacttgtggaatgctgagaaaggtaaaaacacttttaaataaggaagaggaacaggctatgacctagtgcttgcttggactagtataagcatgccagggcaaatatttaggagcacaggtctttgaataaattttgcttataagagaagttaccatttattcctaattagatgggcaggaaagtctttgaagaagaacctctactttattttttacagtatgctaagggctttaatgggaaaagtagacaacatgcaagaaccgatggataatgtaagcagagagatggaaattctaagaaagaattgagaataaatgacagaaaaaatactgtaacaaatgaaaaatgcctttgatgggctcattagtagactggatgtgactaaggaaagaatctttgagcttgagtatatgttaatagaaacagtcaaaacaagaaagcaaagaggagaaacgaataaatggaacagggtatcatatacatgtatgggagtaccagaaagagaagaaagcaaaaggagcagaagcagtattcgaagcaactatgactgagaatttccccaaattaaagtcaggaaataaaccacagatccaggaaacttagagaacaccaaacaagtgttccttccaaagcagaaagcacaaagcccacatgggttcactgatgaatttttccaaacatttaaggaaggaaatataccaattttctacaatctttttcagaagatagaagcagagagaatatttcctaactcgttttatgaggccagcattactgtaataccaaagccacagacattgcaagaaaactacataccaatatcccttatgaacctagayacaaatatccccaacaaagtattagcaaattgaatccaacaatgtataagaataattacatgccacaaccacgtggtatttatcccaggtatataaggctggttcaacattagaaaatcagttaatgtaatccatcacatcaatgggctaaagaagaagaaaataacataattatagcaataggtggagtaaaaaacatttcacagaattcaacacctaatcatgatgaaaactttcagcaaacgagtattagaaggaaactgtctcaatgtgataaagaacatctacaaaaagcctgcagctaacatcatacttaatggtgagaagctagaagacttcctgctaagactaggaacaagaaaaaggtgtcccatctcaccattccttttcaacatcttgctgaaaatcctacctaatggaataacacaaggagaagcaataaaatgtatactgattagaaaggaagaagtaaaactctctttgcttacagaygacatttatctatttacaaaatctgaaaaaattgacaraagtctcctgaaactaataagtgattatagcagggttgcatgatacaggtttaatacacacatttcagtcattttcctatatgccagcaatgaacaagtggagtctgaaattaaaaacccaataccatttacattagcatccccagaaatgaaatgcttaggtagaaatctgacacaatatgtacaagatctgtgaggtaaattacaaaactctgatgaaaaaaaataaatggagaaatgtctcatgtacatggatrttctgaaacaacattgtcaaaatatcatttattcccatttgctctatagatttaactaaatcccagtaaaaaaataccagcaaattattttgtggatattgacgaactgatttcaaagtttttatttttatttttttttaaagtacagcataatttgttgaaaaaaattgraagttaagtgcagaatacagtacaacctgagagtgatattccaggccgggctgctcataagagtgagacagcgtggattgtcgccagagaaactgccttatgggagttttgcattattattattattttttattatacttctagggtacatgtgcacaacgtgcaggtttgttacatgtgcgtacatgtgccatgttggtatgctgcacacattaactcgtcatttacattaggtatatctcctaatgctatccttctccccgcctcccaccccacaacaggccctggtgtgtgatgtcccccttcctgtgtccaagtgttctcattgttcaattcccacctatgagtgagaacatgtgatgtttggttttttgtccttgcgatagtttgctgagaatgatggtttccagcttcatccatgtccctacaaaggacatgaactcatcttttttatggctgcatagtattccatggtgtatatgtgccacattttcttaatccagtctatcgttgttgggcatttgggttggttccaggtctttgctattgtgaatagtgccgcaataaacatacatgtgcatgtgtctttatagtagcatgatttataatcctttgggtatatacccagtaatgggatggctgggtcaaatggtatttctagttctagatccctgaggactcgccacactgtcttcaacgatagttaaaccagtttacagccccaccaacagtgtaaaagtgttcctatttctccacatcctctccagcaccttttgtttcctgactttttaatgatcaccattctaactggtatgagatggtatctcattgtggttttgatttgcatttctctgatggccagtgatgatgagcattttttcatgtgtctgttggctgcataaatgtcttcttttgagaagtgtctgttgatatcctttgcccactttttgatggggttgtttgtttttttcttgtgaatttgtttgagttctttgtagattctagatattagccctttgtcagatgagtagattgcaaaaattttctcccatcctgtacgttgcctgttcactctgatggtagtttcttttgctgtgcagaagctctttagtttaattagatcccatttgtcaaatttggcttttgttgccattgcttttggtgttttagacatgaagtccttgcccatgcctatgtcctgaatggtattgcctaggttttcttctagggtttttatggttttaggtctaacattgaagtctttattccatcttgaattaatttttgtataaggtgtaaggaaggcatccagtttcagctttctacatgtggctagccagttttcccagcaggatttggtaaacagggaatcctttccccatttcttgtttttgtcaggtttgtcaaagatcagatagttgtagatgtgtggtattatttgtgagggctctgttctgttccattggtctatatctctgttttggtaccagtaccatgctgttttggttactgtagccttgtagtatagtttgaagtcaggtagtgtgatgcctccagctttgttcttttggcttaggattgacttggcaatgcgggctcttttttggttccatgtgaactttaaagtagttttttccaaatctgtgaagaaagtcattggtagcttgatggggatggcattgaatctataaattaccttggccagtatggccattttcatgatattgattcttcctatccatgagcatgaaatattcttccacttgtttgtatcctcttttattacgttgagcagtggtttgtagttctccttgaagaggtccttcacatcccttgtaagttggattcctaggtattttattctctttgaagcaattgtgaatgggagttcactcatgatttggctctctgtttgtctgttattkgtgtataagaatgcttgtgatttttgcacattgattttgtatcctgagactttgctgaagttgcttatcagcataaggagattttgggctgagacaatggggttttctagatatacaaacatgtcatctgcaaacagggactatttgacttcctcttttcctaattgaataccctttatttctttctcctgcctaattgccctggccagaacttccaacactatgttgctaggagtggtgagaaagggcatccctgccttgtgccagttttcaaagggaatgcttccagtttttgcccattcagtatgatattggctatgggtttgtcataaataactgtgattattttgagatacgtcccatcgatacctaatttattgagagtttttatcatgaagggctgttgaattttgtcaaaggctttttctgcatctattgagataatcatgtggtttttgtcattggttgtgattatatgctggattacatttattgatttgcatatgttgaaccagccttgcatcccaaggaagaagcccacttgatcatggtggataagctttttgatgtgctgctggattcggtttgccagtattttattgaggatttttgcatcgatgttcatcaaggatattggtctaaaattctcttttttggttgtgtctctgccaggctttggtatcaggatgatgctggcctcataaaatgaattagggaggattccctctttttctattgattggaatagtttcagaaggaatggtaccagctcctccttgtacctgtggtagaatttggctgtgaatccatctggtcctgggctttttttggttggtaagctattaattattgcctcaatttcagagccttttattggtctattcagagatccaatttcttcctggtttagtcttgggagactgtatgtgacgaggaatttatccatttcttctagattttcaagtttatttgcgtagaggtgtttatagtattctgtgatggtagtttgtatttctgtgggatcggtgatgatatccccttgatgattttttattgtgtctatttgattcttctgtcttttcttctttagtagtcttgctagcggtctatcaattttgttgatcttttcaaaaaaccagctcctggattcattgatttttttgaagggtttttttgtttctctatctccttgagttctggtctgatcttagttatttcttgctttctgctagcttgaatgtatttgctcttgcttttctagttcttttaaatgtgatgttagggtgtcaattttagatctttcctgctttctcttctgggcatttactggtataaatttccctctacacactgctttgaatatgtcccagagattctggtatgttgtgtctttgttctcattggtttcaaagaacatctttatttctgccttcatttcattatgtacccagtagtcattcaggagcaggttgttcagtttccatgtagttgagcagttttgagtgagtttcttaatcctcagttctagtttgattgccctgtggtctgagagacagtttgttataatttctgttctttcacatttgctgaggactgctttacttccaactatgtggtcgattttggaataagtgggatgtggtgctgagaagaatgtatattctgttgatttggggtggagagttgtgtagatgtctattaggtctgcttggtgcagagctgagttcaattcctggatatctttgctaactttctgtctcattgatctgtctaatgttgacagtggggtgttaaagtctcccattattattacgtgggagtgtaagtctctttgtaggtctctaaggacttgctttgtgaatctgggtgctcctgtattgggtgcatatatatttaggatagttagctgttcttgttgaattgatccctttaccattatgtaatggccatctttgtctcttttgatctttgttggtttaaagtctgttttatccgagactaggattgcaacccctgcctttttttgttttccatttgcttggtagatcttcctccatccttttatttgagcctatgtgtgtctctgcacgtgagrtgggtttcctgaatacagcacggtgatgggtcttgactctttatccaattttccagtctgtgtcttttaattggagcatttagcccatttacatttaaggttaatattgttatgtgtgaatttgatcctgtcattatgatgttagctggttwttttgctcgttaattgatgcagtttcttcctagcatcgatgatctttacactttggcctgtttttgcagtggctggtactggttgttcctttccatgtttagtgcttccttcaggagctcttttagggcaggcctggtggtgacaaaatctctcagcatttgcttgtctgtaaaggattttatttctccctcacttatgaagctcagtttggctggatatgaaattctgggttgaaaattcttttaagaatgttgaatattggcccccgctctcttctggcttgtagagtttctgcygagagatcagctgttagtctgatgggcttccctttgtgggtaacctgacctttctctctggctgcccttaacattttttccwtcatttcaactttggtgaatctgacaattatgtgtcttggagttgctcttctcgaggagtatctttgtagcattctctgtatttcctgcatttgaatgttggcctgtcttgctaggttggggaagttctcctggataatatcctgcagcgtgttttccaacttggttccattctccctgtcactttcaggtacaccaatcagatgtagatttggtcttttcacatagtcccatatttcttggaggctttgttcatttctttttattgttttttctctaaacttctcttctcgcctcatttcattcatttgatcttccatcactgatacccttccttccacttgatcgaatcggctaaggacttctctgcattggttattctagttagccatttgtctaatcttttttctatgtttttaacttctttgccataggttcaaacttcctcctttagcttggagaagtttgatcatctgaagccttcttctctcaggtcgtcaaagtcattctccrtccagctttgttccattgctgatgaggagctgcattcctttggaggaggagaggtgctctgatttttagaatttcagtttttcagccctgttttttccccatctttgtggttttatctacctttggtctctgatgatggtgaggtacagatggggttttggtgtggatgtcctttctgtttgttagttttccttctaacagtcaggaccctcagctgcaggtctgttggagtttgctagaggtccactccgaccctgtttgcctgggtatcagcagcagaggctgcagaacagcagatattggtgagcagcaratgttgctgtttgattgttcctctggaagttttatctcagaggggtacccggccgtgtgaggtgtcagtctgcccctactkgggggtacctcacagttaggctactcagaggtcagggacccactttaggaggcagtcygtccrttctcagatctcaagctgcatgctgggggagccactactctcttccaagctgtcagacagggacatttaagtctgtagaggtttctgctgcctttcgtttgtctatgccctgcccccagagatggagtctacagaggcaggcagacctccttgagctgcggtaggctccacccagttcgagcttcccggaggctttgtttacctattcaagcctcggcaatggcggtcaaccctccccccacttcgctgctgccttgcagtttgattgcagactgctgtgctagcaatgagcgagtctccgtgggcataggaccctccgagccaggcacaggatacaatctcctgttgtgccgtttgctaagaccattggaaaagggcagtattagggtaggagtgacctgattttccagatgccatctgtcacccctttccttgggtaggaaagggaattccctgacccctcgcgcttcccgggtgaagcaatgcctcgccctgcttcagctcatgctcagtgtgctgcacccactgtcctgcacccactgtccgacagtccccagtgagatgaacctggtacctcatttggaaatgcagaaatcattcgtcttctgtgtcactcacgctgggagctgtagactggagctgytcctattcagccatcttggctccaccccctaatttttactcttaagtaaggattattttggactgagggactcactaagtgaaagtgattcatcatttcagactttgttacagggaggtgattatgcastaaacatagtcaaacatttcaaaaatttgaagcatattttataaaacttacaagaaagaaagatacatactggatgaattgaaggaagaattcrtaaaaccatatgtgtctgcttcatattgagggaaactttttttttctttttttaacctctcagcactagttgacattgcttggctacgtactccgttagagtagagacagctattgccatagctcctgtgaattgaaacagaaattgtccatagtggaggcagtcacagatgggttaaacatgaaggagtcagaagtggtagaactaattctaaatactgagattccatactgagaggtaccaaagctacccaacaaactcttttcctcttgggaaacacatatacacctgacataaaaataaggtagacatttagtttgtagctgtagatctcaatagcattgtgtaatttttcctgttacttttcaagaccaacacatatcacagtatagggaggtcagagactcctgagggcagctctacaattctgaagcagtacrtttcttttatatttttgtaggtaatgatttgttgtaagttatccatagttgtaagtaaccggatcatatgttttccttgatattatggagaatttgacaggttggagaaatacaaggtatgatttcatgattaaacataacaggaaatttaaatgggactttacatatgatctcaatttagctaagaactcaagaccaagctatacagacaccaaattacctccacattctaaagcaaggggctagaccaccttatgtaggacatgctaagagatagagaaatcgcttctgccagcattagcctatctcctgtctctcatctatataaggtgaggcaaagaattcatggggaagggtggaagtatttggaagtgaagatttctttggagatagttgtcagtatgctgtgtttgcccttcccatctccacagtgagggtggtgaaagtacttccccttcatctgaagccaagagaagaaaactgctcagaaagcttgaaatgttttctctggaatctagaaaattcaagttctggtatgtgaaagaaaaaaaaattaaggcaagaagctgctgtcttactctactttctgctggtataacagaatacctgagataacagcattaattcattcatgagagcagagccctcatcctctaatcaccttttatttttatttttttgagacagcatctcrctctgtcacacagtctggagtgctgtggtgattgtagctcactgcagcctagaactcctgggctcaagtgatcctcctgccttagactyctgagtagctgggactacaggcgtgtgccaccctgccctgcttctaataacctcttaaagattcctcctcttaacactatcacaatggcaattaaatttccccatagttttggagggaacattcaaatagtaacatctagctagaacagcctrtctgttggcagaatgaagtagaacagtttagtgggaacaaggatacaagtgtatttttcatggaccaaatacagactctggaaaggatacggttgtggatcatcgggaaaagaacttcacgaaagagatagatgcacagatggatagtgaaggtcaccctggtgaaagccaaggactgaatgcaggtcttaaatggccagttgtggaaagaatcatccttataaaagaattgagataggagatctctaatagaggaggagttctctaatagaggaggagttctttgtgaaacccacagaaatcccccaactcaaaaaaaaaaaaccggccgggcgcggtggctcacgcctgtaatcccagcactttgggaggccgaggcgggtggatcatgaggtcaggagatcgagaccatcctggctaacaaggtgaaaccccgtctctactaaaaatacaaaaaattagccgggcgcggtggcgggcgcctgtagtcccagctactcgggaggctgaggcaggagaatggcgtgaacccgggaagcggagcttgcagtgagccgagatcgtgccactgcagtccgcagtccggcctgggcgacagagcgagactccgtctcaaaaaaaaaaaaaaaaaaaaaaaaaaaaaaaaaaaaaagaaaaaaccaaaaaacgtagtatctaaaaggtagggcaccaatatcaaattgcaactgtactggccatatgcaatgtagagcaccaatatcagatcgcaactgtactggccatatgcaatgtagtctttttctccaggtttcccctctcttctaggctggacaatggaggaggcttgaaacagtagctggcaagtggtagaagagatggagcagagaagcaagaagaagcagactcctcactccttcaccagggtggatttgctggtttgaagcagacctgagttgggagaggagagaggcgaraagttttaattggatgaaatatttctttagactggtctatacttttttctttatatctaaaattcactggaagagctatgaaatctgtccaagatttcgttcagttcaggaaaaaccaaaaccaaaaccawaaccagtgagtttataaaggaagtttatggtggattttttaaaattattttgataactgacattggggtattctccatcttatgagtctgaaaatatttcttcgcagccagstaatacacatgtgactcagaygccaccaaagaagtatgtgtccaagacctcaagttgaaagctgtggactgcggagggactctctggtgaagttgttgcaagcatgattaattcattggggcagcaatggcagccaagccagtggtggtatcctgtgtccaggagtggtattggtgattcagtttgcagcctctgaggtacaaggataaggaaaatggtgaccagatcagttttgctgcctcagattagacataatttcaagctgtatatctctaatcctcctaataattctatgacctacatgatatcctttaaataaatgacttatcatttaaaataattccgaattgatttctgtgacttgcaatgaaatcaataaaaaaaaaatacctggagtattactagaaaacagaccaccagggaaatgggtcaatctgggattaattttctgacctggtttaggctgaaggcagtgataattcagatgactctaagggtggagcagctctagacatgcaggagtggaacagttaataataaaaaaaaacctctgacttcctgaaaggaaataagaattaaaggcaaggccttagagacaatagggttattgccatggaagaatattaaagtgcatgagctatttaaagtctgtaaggtaggtggttacttcattaaagtgttgggcagtttagttaaggagaatggtaagcttaaaatttcaggttcttggctcatggtataaactgaaacctaaggatgttttatgacataatttcttgaagccataaggttaaactagccagaagccaaattaaaaatttgatcctgtaggtttccagctgtaacactgattaaattcataggaacacaaaagatctcttaggtgaaaaccagggcattgactgggaaataataggatctcaaatactataatgggtatatattgaaagattcaaatgtccctcagattatcctgaactcccagtctccactgatctttctttgcctactgaaacattttcttttgcctgtctgatgaggatgtcactgcttgatttgaggacatataaggaccttggctgagcagcgtccctgtaaggggaagccaatttcctcatgtcctattcacttccatctctcattgtcttcaggcctataattatagtcagactaagcagtaagggggcaagttggaaggagaagtgttaaataccaaaataataagtattatattttgctgatgaatgctgaccaaactctgaccaactcttgcgaaaatgaattctgtgggtgctagggcaagtggggaagggcataattttagatcaggctaaatgggtcatgatgggtgcctttattagaaattctgtattgatcacactagctcaaaaaacattagaagttaaaattgtttgttctatttatagatagaaatccaagctcaaaaatgatccatgttcaatgaagttgagatgccagatatttctttagataatataaaggaaggaatacaaggacacagagagaggaatgtagggaggaatttttcatgtgctacgtgcttacctaacccccatactatgttccttgagagaagcccagaaaataaactttccaacaagggattgagaaataaattgtcaagggggagggctatggttcatttttccctgtaggttggcaggggatgctttggttgagatgggcttcctgatttcaaccaggataccagatactggggtggtagaggctaagtagtgaggcaggagaagccaggtaggcatgatcactatgacaggtagctggagtagtttggaaaatagtattgtctgatctactgcaatttttggaggtggcagtggaggtaccatatgtatcaattagattgttttgcctgaaaataatagaaatttgagtaaaagaggcttaaaaaatgaacatttattattattattattattttgcagttgcaagatttaatagagtgaaaacagagctcccatacaatgggaggggacccaaagggggttgcccccgaaaggaggttgcccactcccggctcgaatgcctggagtttatatcccaatcattgtccctccccctgtgccctcaggcgatatatgatttgactgtgtctttaccttctgctctagcctaatttgtattttagtgagccctcttcactacctgattggttgggtgtgagctgagttacaagccctgtgtttaaaggtaggtgcggtcacctttcccagctaggcttaggaattcttaatcggcctaggaaatccagctagtcctgtctctcagtccccccgtcaacaggaaagcccaagtgctgttggcaaggttggccgacaaccactcttaactgcttcctgctgaattggggcatagtaggggtcgtgcagttgagatttccttggaaagggtggcttcgatgtcattaacatcagagcatgggctagcaagccggtccaggggtccgtggtaggtcttagtcatggactgcatctgggggtccatttgaagaactgtttgcagttttacagctttgattctggaagagacaaacttaacaaggaggttaaagatacagggattgaaatgtatggcctgaagtgcaggggattatttctttggcacacttcacaggccctgactatctgctttatagttttgaaaaggcctggttcagtaaataatgatgtggcaatctgatgggtgctatcaatgcctaagtgaaaggtttggtgaagggttttaagtaatttccattggttagctgcaggcagaagtatttttcctttttcggtggctagccatcctgaggggaggaaacgatgtccttgtgagtttccccattcgatttcttctgctgagtactggggcttggtttcctggaggggattaccccatactaggggtccttctataagcttttctaatggagggtcctgtcttgcggctctttttgcttcagtatctgcttggcagttcccttctatttccctttcctttcctttctgatgaccccggcagtgtaagactgcccctctttaggtttctgtactgccaataataatctcctaatggcttcctgatgtttgataggtgttcccttggaagttaggaattccctttctctccttattgctgcgtgggcatggaggactaggtaagcatacttagagtctgtatatatatttaccctttttccttctcctaattctagggtataatggcccctgcttttgctaggatgtctctccctaacaaagaagtggagctttcaggcataattagaaaggcatgtgaaaagagtaaagttccccagtcacaacttagtggctgggagaagtatctagtgactggctgtcctaggacccctcagatagtgacagatctggaggacaattgtccaggacaggagagtaagactgagaagttcacgccagtgtccaggagacagttaacgccctggccctcaatggtcaagcatacccgggcctctgtgagggtgatggcatgggctggcacttgccctggaaaccctcagtcctgctgttggatcatctggttagtggcttctgactcagaggcccttcatcccctggggcagtgggccttccagtgattcccttgacatgaggggcatggacgagggggtggcttatttctattcggacaatctttttgaaagtgtccttgtagaccgcactggaagcaagccctattaggcattcagtttgcccaggctttccctttttcagagcctccaaagtctacttgcctgagggccacgactaaagcagtgggtggccttttttgttttatcccagttttcccatttcacctgcttttcctgatctctattataaaaaaatcgaggttgccaatagggtttctaagttttgctccaggcctaaggcagacttttgaaattttttctaatgtgtgcaactgactgagtgataacttatcctttaagattagttggccttcagtagagtcaggtgacggagagatatgcttcctcaatgcctcccttagtctctccagaaaagcagtaagattttcttcctttccctgtgttatagtggacatcattgaatgatttataggctccttcctagttttccttagtccttctagcatgcaagttagcaaatgtctgtggcaccaatttccatgttctaattcagcgtcccagtgagagtctacactgggaactgcctcctggcctgtggggaatcattccctttcctctgttgtcatcctatcattgacctgactgagataccagagattgccaaactcttgggctgcagttatggtggcacttctctcatttggggttagtgtctgatctagcagtaacattatatctctccatgacagatcaaaggattgtcctaacccttgtaaaacatcaatgtagccatcagggttatctgagaatttacctaggtctattttaatttgtttcaagtctgagagggaaagagttacgtgcactctgactgggccaaattctccagaatatatcttaggagcttttttgccttggggggaacatttcccgtctgaaaaaagaacatagggatgccagcacccctagtcattttctgatgagccttagtcctacagcgtcctctatggtcctaatgcttattcctttccagggtgcataaccaccaatggacatctgcttattggattagttaacattcactgatgtagcagtcctgcaccccttttcccacctttcttgaccacaaagaaaggggtccaggctgctggattctagtggtcctttaccagtgtgcccaacattgcctttgtgctcaggggtgagtcctagagctaggctgggttcctgagtatttcataacaacccagttgccccatcaagatgcattcccataaacaacagttcttatgcaaattcgtttcagagagggtgtaggtaacctttgagtcaggattgagatggagttttttgattctgtaagtactttaaggcttggctgagtgcaaagggctcatacgtttgagcagaccaattattaggcaatttttctaactctgcttctacaagagtttccctatcaattactgaatacccattgtggttttttttctccatcacctgggaggaaccatctattgtcctgttctgaagggagttcctcctaggtctggtgggaacttcgtatggtaattaagatttaaatccctttttaggaaatctgctgggttaagggaaatttcagtggttaatgttaaatcatctttttctaacagaatagtcctacactttaagatttttgagttagtaagctaccttttggctttgtttttttttttttttttttgacttaggatagttctgaactggtgaggtgtgttcacaatgaggttttctctaaaagttatttttctactttcttctgttagcaaaacagttgccactacagattgaatgcatttgggccatccgcaggttactgggttaaagatttttgataggaaggctacgagttgttagtggtctcagtgttttcaggctacgcccttgtttacactgacaacaaggtagtatcgagtgttatagggtcacagagaagaccttcaattatcaattataggttttaaatttactctggcttttaaaggaatagggcacactgttttttctttactacttctgtctttctctttctttctctctctgcctctcttacccgccacccccacctctctgtctctctctgtctttctcctctctgtctctgtaggtggattttggaaacacagtggagggtcgttcacttgttgcccccatttgccgctataggaatatgtgcctccctttaatttactcaattcattttcatcttgatatattatgttgtagacccagttccagttgttaaagtactgggttatcagttctaaggccctggcaagggtggtggggaacgggtcccacataactgcccatgtcgagagctgcatgcctaaattgggaggaacaccagggataaaactccctggattcatagcctaggtgcccaaggacacagcgtagagcttccttagatccctttagagatacaacttgctctaatacttgggagaggaagtgaaagtctgaagcattagtatctaggaggcagggatcagaggaagtagattcagaagtaagaagaattttggggctacactttcaagaaagttgtggttgggacccaggaggtatgggtcagaaggagaggtaggggcacacgcatgggcgactgttgagtagagacttctggctgcaccataa

SEQ ID NO: 97275 - DNA, 12309 bp, Homo sapiens
aaacacatcagcctgaagcagttcattcagataaggacttgtggacctgtacatgtatataaataattcttgtagaacacaagtgataagagacatggaaaaaagtgctctctgctttcagagaatgggaggattggttcattcaatgaacatttgagtatttatatgccaagttctctgctaggtggagactacaaatatgcattgacaggatgccttttttttttttttaaatccatagggataattatttacaggctgtgtgtcaggaaaggtgaaatactggggttgaggaaacaaaggttgttgcattgcagagtgaaaggaagacctcaattaaggaaatagtaataatggagaggagagggcctatgtggaactattgctaagattgaattggctaacttagctactgattatgtctaaaaatcaagaggaatgagaaagagtcaaaactaatactgtggttttgagcttgtgtgcttgaggatgttgactgcattactagaagtatgaaacaggtagaggagggaggtttgggagagaagaaggtaagttgtggtaccaacactgtagccaaccaagatctggactagattgtggggactgtgggcctggaatttaagagtaacttcatagctagaggcagagagttggaaagcatatttgaggaattagtagttggaaccaagaacgttggcttcattcaccaccttgcttcatgacatgcaggaagaaaatggaaggaaaatctttgttggtcctgctgttcctgttcactttatggaataatggttctaaaatttccatttgtctgtaaacaaaatgaatatcatagaatttggcccacaggttttaaatatgcaatttatcagtattttaggcaaagacaatcctatactttcaaatagaaatatattgtttgtatgtatccaatacctgtaaaataatattactgaaactttttataaagatttatttccatgtgttgaatacaatgttgctgagcaaaatctgttttgttttctttaggatgataggtttaagctggttagcattgagcagtttggttgttttcctcctgaatttaaatttggtttcctttcacatgtttgtaatcatttccattataggaacataagtggaatttacatttagttggcaagatactatggatttttgtttgaatattgtttttgtttgaataaataataaaatgagccgagttttaaaaggcacgtactataattagttgtgtagagttaagtctgcatatctggactaaatccaagcctccattatgtactatatatgtactgtatgatgatgtgactggatgaggatgttctttgactgttagaggttatctattttgaatcttagacatttgccacagtatgtaagaatgtacagaggtttgggaactggcattcttttgataccagaataattaattcttgaggataccatgtgatcattaaaacctctgagctcctgggttggtgctcatcttctagcagtcaaaccagattgccgcttaggattctcaacttggatataaactaaatctcaagggtgttggttccaaacattggatttggattgaaatgagtgtctcatgcatttatagaaaagtcttgaaagattttccttgaaaaggaatatgctctccagttaggaatgggggcctgtttgttggaggtgtatctgcctcagggttactctctattcccaaagcaacagtgactgtttcttctcttactaacagcagctcctgactgcgtgctcatgtacatttatcttcaaaagtacacacaagtgcacaaaatcatttaaaacaatttctgactttccatcttctctgtgttattcatcttaataacatcattttgtacttttttttgtttgaaacaatttgagaattatagaaaagttgcaaaaatactagagaacttttgtctttcatccagtttcctcaaattgttaaaatttgtatctcatcttctttactatttttttccatcatatgtgtttttttcttctgaggcatttaagagtaacttgcagacatgatgtccctttatgcctaagagactatgctactagcattttctaagaacaaagacattctcttatctattcacacaacaaagatcaatatcaggagattaacattgatgcagtatgttagctaatctgcagatcttgttaatatttcaattgtcccaataatgtcctttatagcaaaacaataataattattattcattactaaaatgaagaaagaaaaagaattgatcagggtcccatctgggattatacattacatttggttcttaggtctctagtctgctttaatctggatgagttcctcagtctttgcttttcccaattttgagatatttgaaggctggagaccaattattttatagcttgtttcttggtttgtttttagttgatgcttttttcatgtttagttttagtttatgaacttttggcaggaataacacaaaagtaatatgctcttggtgtgatttttaaaaacttaatttttaacctgggtttttttctttgtgtttgttattactaatatatattttatatatatatatatatttttgggggtagacatccttctttcatgtgcttttccatttatcaaataattcctaagtattttctcttcaaggaagtataggggatacaaagacaaaacatgtttgtgccagcaaagacctaatattaagggaaggtagcataaacaaaaacagttccttctttctcctgtagtgaccctttgtgatttgtaaagtatatatcttaataagatcctcaggggtctccaagttttcaaatgccatattctcatctgttacctcacccctccctcattaaatgctgtgaagtatgactgaaattgttatggactctttcagaagcttagttattaataaatacagagctaaaaatcaacagtaagatgcctgtaatgaattctgccactaagagaaaatgaatacaatctctttcttcacttctgaaataagattagctgtgatcttataggtgtctataaactcaaggtgatggtggtggttgcagaccatgacctgagccactacagaactggaagttccacttctttacctcaaatttctgtattcttgtatttctatattttgctttttttctaaatgacagataatgtataattgatagatagaatatgtgtagaataagtgccacattaacatggaaactatagaaatgtctgcattttacttggtttattttaccctcattttgttggagagaaaaagatacacattggtttcttcctatttttcccagctattgacctgaaaagtggttctggaaaagtgtaccaaggccctgcaaaaggtgctgctgatacaacaatcatactttcagatgaagatttcatggaggtggtcctgggcaagcttgaccctcagaaggtaatgttctcaaatgttcatttattcattgttttattgtttcctcttttgacaattgcagtttttaagctgatgcccaaattctgatttataagccaggtttcttacaactctgaagatgacacagttgctactgatactctggttgacaggtcatatatttcttttttaatggagtttcacctgacactttttaagactgaacccacatctagattttttaatatattctgttatgtgttcaaaggtgaaaaaccatatgacattagtaggtactacataaaattagacattcccaataaataagattaagaaatcattgaatattggaactagaaggatattttaacctaatagcccatgtcttacttagggtgaatcttagaggcatttcagtggaaaatcatgattaacagaagagtgccttctgtgacgattatttagttaatattattatgaaacttttgaccaatccacaaatatacaaaattaaagtaattgatgtggcaattagaatggaggagaaaaatttgttattttcaatttgtgattatgtagctagaaattccaagggaactaacttattgattcttagaatgaaggagttcaaacaaatggctgagtgcagttatttaaaaatagctttcacataggagtaatttgaataaatgaggaaatatatgattttcctgtatagaaagactaaaaggaattgtaaagtagtatagtaggtaaaaagtagtctttggcatcagataaaatctaaatttgaatcttgcccctgtcacttcatccaaaaaccttaattttctcatttgtaaaatgagtttaataattttaatgtttacaaggcttattataagaactaaacccaataatatgtatgaagagcttagtacagtgcttggcaatgcagtgaaccctctgttaatttctttccaggaatttatttagtacctattcaggttgtaggtattggctgaattaagacaaaaccctactgtatggagcttcttttagtgtactaatgcaaaagaaataaaatctcaagttagagaagagtaagcctgagtatagtgttagagcaatgactggcaaactttttctgtaaagggttacacagtaaatattttaggctttgtgggcaagatggtctctgttgcagctcttcagctttgccattgtagccttaaagtagccatagagaatatgtaaacaatggagtgtgactgtgttccaataaaactttatttacagaaacacacagccactagatctggttctccagctgttgtttgccaacccttgagttagaatgtgacaggacaggggaactattttaaataggttgtttaaaataccttctggggttttctaaggtacctgaaatgcctgacagagatttgaacagagtatcagaatgagtcatcagactaaggaaacaactaatacaaaggcctgccgtgcgaggaacttggctccacttagtcttctctgagctccacagtgagagaaccatccctctacttgaccactctgatgggaaactttctggcatgtcaaacttactgtgaccaaaatagaacttgtgatttatttttctcccccagtctcttccttcttaattagtggcaccatcatctatttacccaaattaataagcccagaaatgtaaaaattatcttagattccttctgcccttctgtatcctttccttccttacttctgtctgatctttctccaaaatatatcttgaattcatcttctcttcctctctagggatatcactgtgatcctagcctctgtcatctctcacctgtcttacttcttccagtcttgtctctcccattcagtctgttgttctccacccaggagccagagtaatcctttaaaaatgtaaatcagattagattatttatgtatgttagtcatttctactactttcattaattactggttcatatttatcatcccatttgataaaaaatctccagcatttccttttgcacgtgtataaaatccaagttagctgttaccatgtcgtgtatgatgtttctttcccttgctcctttttcaggcttcatcccatgccacttgccccatcacctgtaatgctaattctagttattttgttgttattttgtccttcctttcagttccttcccatcagcttttactccttcaatgtctatgcatttgccttttctggaatttctcctcctagctgtttgcatggctggcttcatttcatccaaagtagtttcttcctgttatattctgataacatcctgttttctccttcattgtatttataacaggctttaattatttgtttacattttactttttgactcccctagtttaatgttagctctgtgagaacagggacagatattcagcctagcctagaatattgcctagtatactgtagacattcatactcaggtagattaaagcaaatatagaaggaatgaaagttcaatgtcagaagtttaggctgtatagaaattagaaacttctgcatgtcagactctatagtatatttccataaatcgagggaaaaaaataaaatgatgatacagagtatcattctaaaaattctggaaagcactacaacctcaatagaaaaagtggacaaaagtccatcaatgatagactgcattaagaaaatgtggcacatacacaccatagaatactatgcagccatagaaatggatgagttcatgtcctttgtagggacatggatgaagctggaaaccatcattctcagcaaactattgcaaggacaaaaaaccaaacaccgcatgttctcacatgtgggaattgaacaatgagaacacctggacagagggtggggaacatcacacacggggacctgtcatggggttgggggagggggggagggatagcattaggagatatacctaatgctaaatgacgagttaacgggtgcagcacaccaacatggcacatgtatacatatgtaacaaacctgcgcattgtgcacatgtaccctagaacttaaagtataataataataataaaaaagaagaagtggacaaaaggtatggaacaataattaatgaaataaatagaaatgactaacatacaaaagaaaaaaatttttcccagtatccaaaaatacaaattaaagcatgttatttttgcctcatattttcaaagtgtaagaaaatagtatttttaaggttgggataagataatttacacacaactggagggaatataaaattggtataggccagggacaatgtctcgtgcctgtagttccagcactttgggaggccaaggcaggaggattgcttgagtccaggagtttgagcctgggtgagacagtgagaccctgtctctaccaaaaaaaaaaaaaaaaaaaaaaattagcctggtgtggtggcacacacctgtagtcccagctacttgagaggctgagttgggaggatcacttgagcccaggaggcttaggctgcagtgagtgtgatcatgcagctgtagcctgggtgacagagcaagaccctgtgtcaatcaatcagtagttggtatagcctttctggaaagcacagtgcttccagaccttcttcctttatggcagtttatagtcttactactttttgcatggcactcctaggccaaaccatatacctaacagtttcatttatgaagtagttcaaaacaattagttttttgtgttcaaccagtatgactgtatttccctcccaaattaacagtattgggaaagtgtccctgagagagtttgctgtgatgtccggtgcatggcagtgcagagtttggaaactggcaatatggacgtatggttaagggctttaagaaataagaaaatagataggaggaaagatttatgtacaaaattcttctgctcaaaaatgtccaaaattgatatttttacttctagtaattaggtgttcttgttttaggttgtaaatctctttcagagtttagtacatagcaggctggcctaagtactgactccttccctgcatgagttgcagaccatcgttttgtttgtttgttttttgtaactgcatagtgaaagaaatcttagttttgaaattctggtctcctgtttgaatgcatttgattgtgactgaatgagctctctctgactatttctggaataaaaagttgttgccttttctccagttcacgagggtttgcttctgagactaagtgctgctcgttaacaagtattgttaacaagcattgctgagcaaagaacacctgagtttaagccctggccctacttcttgctggctctgtagacttgagcaggttatttaataagctctctgaaattcagtttctcatctgtcaactggggtaagaactgctgatgtgcccacttcaaattgacagctgtaattcttaaatgagattatatttgtggagctgctttgtaatgctcagtgtatgtaggtatcactattttttccatttagctagaaatctagaggctttttcacttcatattttatgtaagctataaaaactatgattgattatttttattttactgatagggaatttacactgaaggagaacttaaggaacttgcaccagtttctgtatcaggttagatacaaaactgctacaggaacccttcgtttttaacacaccagcttttgcttggtaatgatgaattaatactctcttatcacatgtcaaactactaagctaagcactctacacattactttatttaacacgcacaacagagttgtgttatttagggactgttgttatgccttttatagatgaggagattgaaactcacagaggccacgtatctaagcattttctcaagctcaccttgctattaaggggcacagcctggattttaactcaggcattctgatgctacagctgtgatctattcaacattgtgttatattctctaatttgtcatttcgtggctttctagttcatgaaactgtagtaaatattttaaatctgcttttagaagttctgaattgaatatttttattaggaatacagtgtagccttttattaatatggtctcaaattgtaagaacataaagtaaagccagaaacgtaggttgaaacagaactcccagatccatgagttcagataaattattgtatagttttctaaaatacacaggaatgatttttcttttttttagatgtctaaaaaaatgtgctatctgtagttattaaattgtcattgctaaataaaggttgcctttgttgtccagaattattagctcaattgtattcagtctgaataatcttaaaaaaaaaaaaaagaaataaactataacatggtaacagttggcactctttttccctcctctccttgcaggcattctttagtggcaggctgaaggccagagggaacatcatgctgagccagaaacttcagrtgattcttaaagmctaygccaagctctgaagggcacactacactattaataaaaatggaatcattaaatactctcttcacccaaatatgcttgattattctgcaaaagtgattagaactaagatgcaggggaaattgcttaacattttcagatatcagataactgcagattttcattttctactaatttttcatgtatcattatttttacaaggaactatatataagctagcacataattatccttctgttcttagatctgtatcttcataataaaaaattttgcccaagtcctgtttccttagaatttgtgatagcattgataagttgaaaggaaaattaaatcaataaaggcctttgatacctttgtttttttgtgattttctgtttttttatttattgataccccagtttttatgtgaatttccatgtatgcactcatttttcatactttgttctgatagtattctcttttaaagcaagagaaaagtctttgtgctcccaaatagttttctttcttctcccctcccctttgctggaaattctttactacatataatgtttataaatctaccaagtgtagctttcttgaagaatcagcagtctcaaaacagaaagatagtcactagcaagtactgccacatcactgttttcctcagcatttagctctgatgaagtgcactgggagatgctctttggatgagttggctgcagaggtgaccagcagcaggtggtatgctaagctcagagatggagtaaatttcaatcaggtaacacagctgaggagaatatgtgtgggtggctagtatgggctgagtttcccaggaagctgactttcagatggagattcatgtgcaggaagttgatttgggaggtgcttttatgagcagcacctgccaggagaagcaaaggaagcagagctgggcagatggagacattaggctgtggttgcagttaccataaggcctggactgatcttttggggagctctgaagctgggatggccattcagaattgtcctgaggcaagtagtcattggttatgacctgccctgcaagggggccatgaccttggtcaaagcggcagagcaattcctggagttggcttgcccagcagttgggggaatatgtctttttttttttccttaaaacttttaagttcaggggtacatgtgcaggatgtactggtttgttacataggtaaacatgtgccgtggtggtttgctgcacagctcataccatcacctagatattaagcccagcatccattagctattcatgctgatgctctccctcctcccaccttcacccctgcaacaggccccagtgtgagttgttccccaccatgtgtccatgtgttttcatcattcagttccctcttataagtgaaaacatgcggtgtttggttttctgttcctgcgttagtttgctaaggataatggcctccagctccatccatgtccctgcaaaggatatgatctcactcctttttatggctgcagagtattccattgtatatagctaccacattttctttatccagtctatcattgatgggcatttgggttgattccatgtctttgctgttgtgaatagtgctgcagtgaacatttatatgcgtgtacctttataatagaataatttatattcctctgggtaaatacccagtaatgggattgctaggtcaaatggtatttctgcctctaagtctttgaggaattgccacactgtcttccactatggttgaattaatttatactccccccagcagtgtaaaagtgttcttatttattcacagcctcaccagcatctattgtttcttgattttttagtaatcgccattctgactggcatgagatggtatctcattgtgatttgatttctctaatgatcagtgatgttgaactttttttcatgtttgttggccacatgtgtgtcttcttttgagaagtatctgttcatgtcctttgcccactttttagttgggttgtttttttcctgtacatttgtttaggttccttgtagactatgggtattagacctttgtcagatggatagattgcaaaaattttctcccattctgtaggttgtctgttcactctgatgatagtttcttttgctgtgcagatgctctttagtttaattagatctcattagccagtttttgcttttattgcaattgcttttggcgtttttgtcatgaaatctttgcccatgcctatgccctgaatgttattgcctagatttttttctagggtttatagttttgggtttttaaatttaagtctgtaacccatcttgagttggtttttgtataaggtgtaagaaaggggtccagtttcaattttctgcatgtggctaaccagcactcacagcatcatttattaaacctattagagaatcttttttccattgcttgtttttgtcaagtttcataaagatcagatggctgtaggtgggcagtcttatttctgagttccctgtttagttacgttgctcagtatgtctgttttgtaccagtatcatgctgaggaatatgtctttcaatcctgatggggctttgtagaactcagcacactttatttgaggaaacaagaatgcaaattcagggatcaggggagaaggtttcagaaatttggaactgtgatacttagaacagtgatggaacagtagaagacctcaatatgttacttattttaatgagtgaacagaataagtagaaggcataggaagaaattatatttttggcaattatgcctttgtctcatgaactgtatagtatttttaaatttatttcagagtgatctgttgttataccaattgaattaattgagttaattgttggacatttgggttggttccaagtctttgctattgtgaatagtcaatggcagtatttttaatgttggtctattattgtactaaatagttgtttatattgagcttgggaaagctttcgtgtccaatagaaatagcatattaaaataaatgccactgtatattaatgaaagtgttgattatataccctagatacttaaaacttaaggaagttatgttttaattttcttacacatctctgtcaatatttatggtcagagaactactcatatccaaatttggcaacttatcagtcatgctccttaacccttctgtaatatttaatattatcaaatgccccatcttccttaattcttcttacctttcaatgagaaatatattaacttcttaatgaacctgttaatctgacttctacttgtctattttgtgatttcctttgactaccagtgaagttcatttagagagtcagttccctaggtttttactggggtcttattcacatgggctcctctacctgaacacatccccaaattccagactcaggaggaaagcaggtgtttagcataaaccacgttgt

SEQ ID NO: 97276 - DNA, 13649 bp, Homo sapiens
gatgggtttcactatgttggccagaatggtctcaaactcctgacctcaagtgatccactggccttggcctcctaaagtgctgggattagagatgtgagccaccctgcctggccctaattttaaatacatttaaaaataatctactcaattcctaaagctttagagaaaagaaaatggtaccacatttcttggtaatatttctcatagatacagtctggtgatttgatttgaggtaacttaataacacctgccacaatttaaaatcattttttgtagttgtgatttttcaaagaagatgagtaactgcccagaatcaccaatagcagtggttttcaaaattttcaagtttggctttcatgttttttttttttttttttttgaggtggagtttcgctcttttgcccaggctggagtgcagtggcgagatctcagctcactgcaacctctgccttccggtttcaagctattctcctgcctcagcctcccgagtagctgggattaaaggtgccggccaccatgcccagctactttttctatttttagtagagatggggtttcaccatgttggccaggctggtctcaaactcctgacctcatgatctgcccgccttggcctcccaaagtgctgggattacaggcgtgagccaccgcacccagccctggtcttcatatctttatgtcaaatatctttcatcaaatgaaacctaatccttaaatcctacaaatggaacgactaaggtggcgctgcaggagccctgtctactcacccctgttccttctggcaagtggagcatactttggaaaccatttctgtaaatatgttttcacatagagagatatttgttaaatgttctctttttcatattatcttactaatgtaaatgtttacaagtactttctgtaatattccagaagaaataaaggaactatcaacttacaaatgtccgtaggctctcggtcaagtaaaatagacttactgctatcatttcagttactgctaaaagatatggataaagactttttattcttgctatttgctgcctgtgatttggataggctgacatttaaaggagtaatcttatggagaatttacatatattgcttgctatggcttgaatgtttgtgtccctccaaaattcagattttggaatgtaactgccaaggtgatggtattaagagggaggtactttggggaagtgattaagtcaccagcactcaaccctcatgaatgggactagtgctcttataaaagaggtcaaagggagcagcctagtccctttggctctttcccttccaccatctgagaacacagcattagtctcttcctccatgtgaagaagacatggcaagaaggcaccatcttgcaagcagagatcaagtgtgtaacagacatcaaatctaattagcaccttgacctaggacttcccagcctccagaactgtgagaaataaatttgattatttataaattaattagtttgtggtattttgttacagtaacaaaaatggactaagacattgctagagtactctgggttgtattcatgcctttgaaagagcatcactatgattgttcaatactctataatgataataataacaacaatctcctgcctttgtgttcatccattcatgtgttgaacgtataggttctcagtctcatacagtatttctacatagaacatacagaaacattccagtttctgtatttgcttatcaacactgatctaatggtcatttcccaaaaggagccctacccagcaatgaggaattcagatcaggctcagagtagggcttaacactttcttagacaattaattactaaaatgactaacagtgtttccctgaatgagaactaccttatctgaaagacttaggtgtgtcaaatacatgtggccaagttaccaaaggaaaacaaccgctattttatttggttaattgatttagtaatttcattgactcatgaaggaaaacactatataatgagataagaataaaaggaaattacccctacataagggacccaatacttgctttcatcctttctattctctctcctcaccaaagtgaaatatacttactaaaagtttaaaatattatttctaggcccactaaaatcagaatctacagagaccgaatctaccccaagtgggacagacatgacttatggcctgtctaaatgccaagtgttcaggtatgccagtaggacccttctcccgccctagggataagtcattattggtgtaaatcaatctctgtaacaccattcctctttgccacttattggctaaggagtgagcatgattcatttcttgccattggaatttgtaggcaagactattggggcatattacataagattttccttcttaataaagacagagagagaggaggaaaatcctctcctctttttgtctttaaatgaccaggtaaagaggcaagggaagttgggattgtggatgggtttcttgggacaattctagcagccatcattcacccatgaagaaaagtcaagattagctgaacacagaaagcaacatagagccctgatattactgagctactgaacaaaccctggacccacctaccttcaaacatcttcatgtatgagcaaagtacatctgtatttttgaagggagttttggctgaatatcctgttacttgcagccaaaagcatcctaaccaatataacaggtgattttgttgcagaaccatccctgagaagccctgatgaacagcagtgatgaggaacctctgtcttacaaactttagtttctatctttctagcttcttgttacagtgcaaaatcatcatagacaatgaatgatcagaacactgcctttgtattgaaatttctcaaaaatgtccagaaaataacattttataaagttaaaaattagtgccaaggttttcactgccattcttttagtcaacagaaattatttggattgtaagattatgtatttcccctcctctaccctgaagttaaattgtaatatttgaatactgaatgaagaaaagttggacttataaacgtttggttgttttccaaatttccactcatgaaacaaaacaacaacaataaaatatcactactattgctgcctggagtttcatttctgctttttctacttgaagaaattcaaaatctaactcaaatgtcaccttctcagtatttcctaactccaacattgacaaactgtctccctcgttttcctctctgatgattcattcattcattcaacaaacaagagctattaagctcttgttacgtcccagtccttgagctgaggattcagaagtgaacggtcttaaatagttcctatattcagatcttgtaatctagttacaggatgataaaggatgataaatgattcctaagcaatcacaatgaaatatggttaagtttcaactttagacacataacaaccccatcccttaacaagtttcatttccttttttttcttttctgagatggagtcttgctctgtcacctaggctggagtgcagtggcacaatcttggctcactgcaacctgtgcctcctgggttcaagcgattcttcagcctcagcctccggaatagctggaattacgggcgtgcaccaccatgcccagctaatttttatatttttagtagagatggggttttaccatgttggctaggctggtctcgaactcctgacctcaggtgatatgcccacctcggcctcacaaagccttaacaagtttctctggtgtgataggcacaagagtaacaaagatgactaagatgcagtctgccctttaagggatggtcagagactgatatgtgtttaccaaaatcgtttactcttctgcctgggtccatagtacatttccagtctcccttgcaggtcagtgtggcatgtgactgaagtctggtcaatggcatgtggacataaatagtatgtgatttccagtcctcacccataagaaacaatcctcatgcaatcctctagtagcttttctttttctgtccgttgcctggaaactaaggactccaaggtcttaggggatagcaaagccataatataaaaggagtttgggttcctgaataattgagtagaaggccaacagctgaacacgtgaatggacttgacatgaacgagaaataagcctgaactatgtttagttactgagatgttttactttatctcttacagcagctactgctgtcttaaggttatattcttcagtcaatagcatacgatgattcttagcacctcgaggatgctaacccagtccacaaaggcaacaccccctctggttaatctgagaactaaaataaaagcaagcaagaaaacccacgccaacaccttacaacagtaaacagacacgcgcccgtcaccgggtgtacaaacagaaaaggctgggcccctcgctcgcgtctccggtccagcaggcctacagggtacccgccgctggcgctgggtttatttttacccttagtgtctctggggcctctcacctggcagtctccggcgaagtcgaccaggctccgtctgaacgattaggaaaggggctgtgggggaggcggcggagcccggtctagccaccgcgctctggggttcccgattcgcgcatcttcccaggctgagccgggaggctgcgttgactgcagataaacggtctcagggcgcggcaccgcgtgtagtcggccccgcctttcgcacgaacccgctgggcgacaccgcgcagggaggtccgacccgtcggcgccggtacaggctccggagtaagcatgggttggtccggggcccgcagcggcagccccgtgtgccctccgccgggtttcaggtccggcggcgcgggtgcagagccgcgtgcgatgcctggtgcgcgtggcttcccccggaaaggtggcgccaggccgaccatgggcccacgtcccggggcctcggagcggcaccgcgcggtctttcagctgcttatcctccctgggcgggtccgcaggcttctggggccaggaccagcgagctcccgggaaagcttcccggaaagcttacccagagagcgcggacccaggcgccgagtcttcccggagatgacgagacaccgcgagaggagcacagcgcaggctcctcgggactccgcggcgcaggccgggcagcccgttacttgttttatcgttcccgaaaccaacctctaagttgtctatcagtcctccaccttttagctgtacctcttagaagtgtcttctcagctgcggtgggaagataggattctttcttaaggtgaccaattaaatggccggataaaagacttgttctgcccccctttatcgcttaacacctgcccttcttgttgtattttagatttttaacccttctatcagcagtgtgattctatttcatttaattctcatttcatgtttgtgtcttccttttctctgtatttcctcttgtgtgtgttaagacgcgcgcaccccttacctgtttttcactcctgtaagcaagtgccaatcttaatcaccgcttttcaagcaagggagattatcctcaaatttctccaccagtcagaaaccattcattcttgtctctcaggtcctcttttgtgatgaacctattggataggttccatccaatacccttcttcagatcatctgaaatgattattttcctaaacggaactcttcctctcctaaagcttgtaaaaatttctagtgacattcagcttcctcttaccacaggaatgacatatatttttccttttagtcatatgtacttcattaatatatcacctgatttgattaacatgactttggagaacattgaattttttggctagattttacttcgtttttattgctgatagtgtttataaaaatgttttatagtttatggtcggctgtgagaaagactaactcagatcatttgttaatgttggagcccattttgtagaattcgttgtgcatttatttaaaatttatttgttcatagctatacatatattatacatgtatacctgctcacagcataaagtatttcatgacatacttgtaagagtcagtgttctatgaattcactagagaagttacagcattttgattatgatacacgaaaagaaacccaagtcatttagcttaactccttaatttcataaaccagaaaactaaaatccaagatagattgggtgacttggtctagatcacaaaccaaagttagccataattcggtagtgtagtgcccggtccaaaacctcatagataatcttataatcaatggactctttctgaatgctagtcaaaatgtccttttgtgtgaattttaatgtaccgtcatcaactgcatgatattcttccccatacacaaagtgttatctttttgttgtccatttcagaattttccatgttaatattaaagttctaggaaaaaaggctaagaatcactgcacatttattgagtatctcagtgtgcatcataccatttggtcatttgaggttgcaacaagtaaaaaacaaacataaaacccttaaattaaaataaaaacaaaaaactttgccctgacaatgttacagaattaacatccataaatttacttttcttgaaaaatttattttctttaatttcgtttgtttcctgttacataatttatatttaaatttacatttatttatccagaaactatgtccaaattttatgtcctcttttctgttatcctggagtttggtgaagaaatctgtacttaatttagaaaagaaatccctctaactgacaatattgttagctaactatatatttcttaggcccatgtcaaatatcattgcttattttaataaagattgtttagttagactaagaaaatagtaaataataagggatggcatccgttaagtataaacactggattatttttcataacataacaggtcaacaatatcgttttgaggctgaactcctttactccttttactgtaagctattgaagccaaactccttcctacctttgttcatttatgatggtgtaaaattttaaaattaggatctacatacagaacaatgcagaattatataaaaatatttgaatattgaaaaatraagtggaaattattattattatttaggtacagggtcttgctctgtcaccctggagtgcagtggcatgattacagctcactgcagcctcaaactcttgggctcaagtaatcctcctgccttagcctctgttaaccatgctggtcctgaactcctggccgcaagtgatcctcctgccttggcctcccaaagtgcaggaattataggcatgagctaccatgcctagtcctgaaattactatcttcttccttaacccccatctcccccacaaaaaaacaaaaacttccttttttcttcatatttacattttaattgtatatgctgcaatggcctatttgtatcaccccagagtcatgtgttgacatcctaacctgcaatatgatacattaggaggtggggcctttgggaggtaatcaggtcataagggtagtgccctcatgaacaggattagtgtccttataaaaagacacatgagcgctcgctttttttctctgctcttgctatgtgaggatacagcaagaagaggaccatctgcaaaccaggaagtgggccctaaccagaaactatatctgctggcacctttatcttgcacttcctagcctccagactgaaaaataaatgtttgttgtctatgacactccatctatggtaatttgttatagcagcccaaagtgactaagacagatgctaacaaatcgagatttattttaaaaactattctcctgctatgagttcaatatttttatttctttacaatgatttcagaagagattacaaagagattaatatacttaaagaatcagactcttgcaaacagtgacatcattaaaaagagcttattttcattaacatgtgattaacaggaaggagatgattggtgagttttcttcgtaaccaggttcactgtggataggaagggcctgccttccttcccaccatggagatcctaaaatcacaagctccagcctccatcaatgatgacagggttaccagttacataagcagactgcagtgataaacacaaggagacagaacaattaaccaggtttgatacaggctgtattttgaaattttcctgtgactaggataactaaacaatttacccttgtcctaacaggaaacctcacttaaacacttaattcagggaaatccaaattaacatttggttgatttagaactgctgagtgtcctgtgatctggaactaaatggcctctggctggtgtctaagcacctgtcactgttaggtatttggtctcagaatccccaaattaaggaacagtgatgtatagccattccccaaattaggatataggctaaaagcacattttcattttgaaactcagaactattcaaaactagctaagttttatgccactaataaacttttgaacataagtgtatcagtcataaaatggtcatattaatgaccagttttttaaaaaagacagcatatatttagttgatcaattataagtggataattgtaggagctgaagcacactaaatgtgttttaaaaatttacatgaatgataataactataatccattaagctataaaaatattctatattagtttcagatatccaaatctttataaaactaaggaatttaaaaaataattactggtttattcccataaatttttcattttctaaataaggctgaagtgatctttttggtagaagtttaaaaatcttttaacttaaaatggataataaagactcaaacagtctaaattcatctgaagcctgaaacaatggaagaggaagtaaggatatcataatgaatagagaaattttaagagttcaatagataaaagctgataatatacagtaggtgaactagggagttattagtcacttcaccaaagaaatacctccaactcccccaagttcttttaaaagacaagctctgttacacatatgaactcctctggaaacctctaaaaagccaaaggtacttttgtagcacatttcaagccacaacacttccaaatatcttgtaacctaagctctggctaactaagggtaatttagcttatcagcagtacccaaatcaaatgagctattctgaagatacggattcagagaaatcacaaaggctcatgtgcttcttcattaaacatttgtctattaatttccccagctattaacaattgttgttaatagttgggagaagttctgagaagaaactgcgctgtcacggaaacatttcaatccctgtatttgtcacattcaccaactatctggtgtgcaccaagttactgggaagaggagctatcagttgttccctcctcgctcccgcctagtcccctttccttccctcttctcacacattacagttccttgttcctgtagtattcagagacataaaacagaggaggaccttcttgtgctctataccttataagcatcatttttgctttcatcttaagccatttaaaagtaaacaatagttattaaggaaaaaactgttaaacagatgcaaagtggaagagattaaattaggaatttccatacacgatgatgaacaagtaagaatttttaaaaatatttatttattttgagacggagtctcactctgtcacccaggctggagtgcagtggcgcaatcccggctcactgcaacctccgcctccctggttcaagcgattctcctgcctcagcctcccgagtagctgggactacaggcgcccgccaccacgctcagctattttctgtttttagtagagacgaggtttcaccatgttggtcaggctggtctcaaactcctgaactcaggtgatccgcctgcctcgacctcccaaagtgctgggattacaggcatgagccaccatgcccggccacaagtaagaattaatagagaaaaaagagccagtggaattctcccaaacaagtcacaagtaaaactaaaacaccacatgcgaattctgtgtccactgaacacaaatctgcttaatcctctccccatttcacttagagctcttataatcctggaggttcaattttttgacttgcatttaatcagggtttccccaattataatttttgaaaggaactgtctctcagaaaattgagcactttaacttttttagtcctccattttgtttgctacaagattttatgtaaagctgaataaggaagaattagtggctcagatcgaagtggtctttctttgagcaaattaaatgagaacttatccctatcttataaatgtagcatcttagcacatatatgccacaaactctctaaaatgatattattttgatgagcaaattgtggccaaatgtgattgagggtaatgaactccttgggaagaatagtgcttacttcatcagaagccaaatacacgcagagcatggctatttcttctgcagttgcgaatcttcccgtcttttgtctcttcaggaaatcattccgtgcctgtgaccagagaccataccagacattagtgatggaagcagctgtatgtgctcacctgcatcttgttcaaggagttaaaggcaagagaatccactggcttgctgccttgatgaataatcaactagggttatggtgattcttttgccaaagttactcaaattgtttgtgttatactaaaacccacagatattgtgacacatcagaaagctaatgttaaaggatgagggcattattttttcatcttcaaaagttgtggtaaagtatacagaatataaaatttactatcttaaccattttaagtgtacagttcaatagtgttaggtacattcacactgttgtgccaccatcaccactgtccatctccagaactcttatttttattattattattttttcttagagacagagtcttgctctgttgcccaggctggagtgcagtgttgtgatcatagctcactgttgtacctcaaactcctgggctcaagcgatcccccagcctcagcttcccaagcagaactcttttcatcttacaaaatggaacctctctactcattaagcattaactactcttttccctccttccaagcccctggcaactaccatttcactttctgtctctatgaatttgtctgctataggtatggaagagggcatttattaacaaaaggtttaaatacattttaaatgctagatgtacctcttcaggatttcctctggcttgtattctttcttgtagagatggcgtatcaactgttcctaaatcaaagggggatattcagcttggttactcactttcactgaaaaagaaatcgataactaaacttcctttccatatgacaatcagtgagattcttctccttgacttaaaatgacaactttacagctgcctgcctgaggcctcttatttaataggcttataatttcttcaataacatttctatgattttaaaaacacagactatgattcttcgtgacactatgtagggactctggatgaatcacccagcattctcaaggacatatattttagtcacattgcatttatatgatgctttatggattttaaatacatttatgcatatgatctcagctaatcctcacaataaccctgagatgtagataaaatcgtacaagcactttgccagcttaaggagccagtttgcctcaatgatctcaaaaccattctttgctgtcaagttcactgtggcatctttggggacaatcccatggctaccatagtccttggtaattcaggtggcgctaaatttttcttatcaccttgcctattttcattgtttcaaatgcctacttttaaccacagtttcaagtttttaatcaaaaatataatttaatctaatttaaagttattttactttaaaaaagaaaaataagaacaacgctaacattttaaaattccacttagtttatggtctcctagagcacgttacccagacttttttgttaacggacataaactgttcattctctttagagggccctttttcagactaaagagtactctggcaaataatgtgatctttctgaggttgtaacaaatggttttacagtcatacttcacccttagatcatgttcctgagagtgccatagatttgatctttattcagaaaacatttcttaattttagcatcatttgctatttttttctgatgaagctggaaatcttcaaaatcagaaagcctgactccattttggaaccccctctttaggttggttatctgtctcttgtcacattttactataagcagccagcactttcaagactctgggtagaaatcaccttaattagatcacccagttcattaggaacatcttctaccttcacactacaggcaacagtgttgatgtactttctgaaactgtatgacaaagacactcttttttctaattttcaataatattttcctcactttcctcaatagcctccttaaagtccacagttttaccaacagtgtgcacctcaagctttcactaacactccttcagaatcttacagctttaatagctttctccctctgaggtaaatgaacatcatatcttacatatgactggtactaatggctattaaataagaactgtagagcaagcccatgcctttagagtattccaatgtcactgggttcagctgtgtccatggcacagacatactatgccagggtctacacaagtctggctggagatttgtgactatacaaccatcagcagcatctcagacatactcagtcctcctcaagttttcttctgtgattggttcactgagtcacagctagttccttgttccaaagagtttgataacatattttccaatctcctgataagtccagtcgctgaaacaaccacattttccaaatcattttaccacttattccactgggtaaatggcaccaagaatagctagactcaagtatcgccaggatgtacattaaaacccaatgaaatgacctctcatgcattcttctttttcttagcgttacctacgtttacatttctgttccaagaaaaataaaacagaacatctcaatcgctgaaattctgtagcttgggggatgtttagtttcccctctttaagtcagtgggtttcaactgaagattcaatcagaatctcttgtgggtctttctaaaccacacaattctctccatgaactccttccctaaattctggcatgcccttcaggtttgaaaggtccccaggtcatattgaaatgtttccctttcacacaccaccccccattatcaattgtgcactaccaagggaaaccttgatcctggatatgcaatcatttctttttaaagaatattataatccttattagataccttaagttccttttagattggtagaaccaggtaaaagtacatatcaatttaataaacacatctacggttattgtgaaaatgagacacacccctatagttattaagaaaaggaaagttctgcttttcttctttgctttgtatgagggatcggcacacctttcttggtaaagaggcagacaaaaaatatttatggctttgagagtcattttatctgttgcaactattatactaaactctgcctttgtagcatgaaaacagccataggcaataacataagcaaattgggtgtggaagtgtttcagtaaaactttgcttacaaaacaggtgtgccttactc

SEQ ID NO: 97277 - DNA, 48465 bp, Homo sapiens
ccaggctgtagtgccattgcactatctcagctcattgcaacctccgcctcccggatttaagcggttctcctgcctcagccttctaagtagctgcgattactggcatgcgccaccacacccagctaatttttgtatttttagtagagacggggtttctccatgttggtcaggctggtctcaaactcccgacctcaggtgatccacacgcctcagccgcccaaagtgctgggattacaggcgtgagcctccgcgcccggcccaaatcttttcaccatgggtttacaggcataacgccaccacacccagggaattttaaaattgttttttagagaggggggtcttactattttgctcaggctggcaaactccttttaaaagatattgaaagccatctggtttattatttttatttcaaaatataataatggaagaaattttacagtattatatacaatttactgagtcagctatcagttcctttttctgatttttttctagttgccattcttgatattttctaggtaatctaaactgagttgtattttcaagtactcttcaaatactttaaaaaattttaaattgagccgtttaattctttgcttaaaggtgatgggtattttattttctgtatggcaccacgtgattttaaattgaactcttcatttattagtcatttggttataaactcagcatagattgcgcagaattttgagaggggagaaactatagctttcctttcggatgccactggtgggtagcctgttttgcctgtttgttcttatgttaaagaagggctctacgtcctgtctggaaagggcggagctggctcggaccgccccactgcctttcccaggaccttcactcgtcctgtcccaccgcagccccgcctcctccacgccgggtgagctgtggcctagcagcatccgaggctccgccccccccaccccccagcgtctgcgctctagcgaaggggcggagcagggcggtggcgcgctgacacctggcggcggcggagggcgggcagaaggcgagcgtgggctgggattggctgaggcgacgcgggtggagggggcgggaaggaggcggggagacggttgtcgggctggttcctgtgctggatcctgggcggcctgaggggtacggagactctgggggagggagacggcagcggcatggcggccgggtgtaagacgcccgaccctcctcttccctgtcttcgccgccgccgctgctggagtcactgggaccctctagtctgcgtgtgttagttgtaatcccgccgccctcctgtcagccctccgctccgccggccctccttccttccgccgccgcagccagcccgagggtcggccggctgtgtaacactctcccaccccacccaccagcccgcgggccagcaccatggaggacgtgaagctggagttcccttcccttccacagtgcaaggaagacgccgaggtgagtcgctcccgtggctgccacgcacaggcctctccctgtggctccggccgaggggcgaccccagtccccaaccgtcttagccgccacctgtacgggcgccctgcctcctaagggcgtcccgggacctctgaagccgagcggtcggctccaatccccactgagttgctcgtcctctccagaccccgcggaggggcagcgtctggtgtacttacatttgagaagaggaaaagcaatcccttagtccctaggcttggcatccaggactgacctggagtaaggttcctcttttattgtcaaagtaacaagagagcgaagttggtttagtctccttttgaggaatatctgtggtgtaaacgattcacttgtgggacacatggccccacatgtgaaatagactcggcgcctgaagtttggaagcgcgccttcgaaaagtttcccaaagttttttgtttgtttttggacaaagctatgacccgcacaacaaagtgtctcaaagctagctcatcttaatctgagaactcttaatcagaaatcttgacctttggaggaaaattaatattgaaagtaaaatactatataccttttctcctggtttctaatttgtggctatttttactccaccttagatccctgcctgctgtttctactcggattttttttcatctgttgctagtttaacattttacggcattgcagactactaaattagaattttctggaggctaaattaacaagacgaagatactcagctatactttagtaggattaagaaagaaaatctaacatcgctagttaaaaatacctttaaagtagttgggaaaaataaagccctatttttaggagaccattcaatttattccgaatatttattctattgaatatcttcattggaggttcactttttttttttttttttttttgagacggagtcttgctctgtcgccaggctggagtgcaatgtggcgcgatctcggctcactgcaacctccgccttccgggttcaagcgattctcctgcctcagcctcctgagtagctggaactacaggcgcgcaccaccacgcccagctaatttttgtgtttttaggggagacgggtttcaccattttggccagggtggtctcgatctcctgaccttgtgatccgcccgactcggcctcccaaagtgctgaaattgcaggtatgagccaccgcgcccggcctaggttcacatttttgtttggagggctctcttgtggtattgatgcttgacaattacatttgttttaagagtagagactttgtttgtgactatcactgttgcaaaatgtagtgcagtggtgtgatctcggttcactgcagtctcgaactcccatgctcaagccatcctttcacctcagcctctggagtagctgggaccatgccgggctaatttttctttttttttttttttgtagcgatgggttttttctccaggctggtctcgaactcttggcctcaagatcctcccgccttgtcctccgaaagtgttgggattacaggtgtgagccactgcacctggcccaagaatatactcatggtttttttgtttttttttttttttgacacagagtttcactcttgttgccccaggctggagtgcagtggcgctgtctcagcccaccgcagcctctgcctcgggtcccggttcaaacagttctcctgcctaagcctcctgagtagctggggattacaggcgcgcaccgccaggcccagcttttttttttttttttttgagacagagtctcactctgtcgcccaggctggaatgatcttgcagtggtgcgatctgggctcactgcaagctctgcctcccgtgttcacgccattctcccgcctcagcctcccgagtagctgggactgcaggcacccgctaccacaccgggctaatttttttgtatttttagtagagacggggtttcaccatattggccaggatggtctcaaactcctgaccttgtgatccgcctggcttggcctcccaaagtgcagggattacaggcgtgagctaccgcgcccggccaatatactcttagaaaacaggaggtcatatttaggctagttataaaaatgaatttatacttaacatacaataatgtgaatgaagagtatgcttttatttatttatttatttttttgagacggagtttcactcttgttgcccaggctggaatgcagtggcgtgatctccgctcactgcaacctccgcctcccacgttcaaaagattctcctgcctcagccgcctgagtagctgggattacaggcgcccgccaccactcccgtctaatttttgtacttttagtagagacggggtttcaccatgttggccctgctggtctggaacgccagacctcaagtgatccgcctgcctcggcctcccaaagtgctgggattacaggcttgagccaccgcgaaggagtatgctttcatatcctcaaaatgattcagtaatttcagcacttaactgcaagcaaccttacaaataatgtagaggagtcccacattccaggtgaagaaattgtaccttactgaaaataagtgatgtgccaaattaacaacacagtagcacaagacacagaaggacctcggcctcctaattcattgttctttttaatacacttcaattcttccctgccctaatcttaaaaattctagtttaaaattttcccggactttgcatttaatctgttactgtgtatatcattatgtatgccttattcctgcaaaactgataaattcttgctgggaatatatacctgtcttttctgtgtgggacttgaaaacacactcttttttttatgctaccagatgtgtgggggtttttccataccaagcagttttccagcaggcatgaactgaatgtcccataattcaattctgacacatatgtacctgaagttagtcagatcccacaggttaatggctcagtcccgcaaggctgcccccaacctcagatggtaatcacaagtagtaggttgtcacctatacactcctgactgactgtaaatcagggttcccgttactccctccttggttcagttaacttgctagagtgacttacaggactcagggaagtacatttacgggtttattataaaggatactacaaaagatcagtgaacagccagtaggaagagatgaatagggcaaggtatgggggaaggggcacaccaccatcccagtgtcaccagtagagtcatgattgcaagctgtccaggttcttggcgttttgaacaaagaattggacaaaactccaagcaaagaaagaatgaagcaacaaaagaacaaaagcagggatttattgaaaacaaaagtacactccacagtgtgggagctgccctagcagcactcccccccgacccccgctgctttaccgaatcttcttgggtccaaataccccctagaastttcccattggccattccatgctcacctcatgtaaatgaagaggtggcttgcaattggtctgattggttgccagacccacccccacatcagtccgcttggttgtggacagcgaccattcagtggctagagtgaagttacaaagttgcaaacgaagattccacccgcagtcagtctgatttgttgaggacagccaatttcccgtctactgtgcagaaaaggtaggtggtttgcaacgggagtagcctctggtccttttgttacttaggcgtggaaagttagggttttcccttcaagttagttctgggaagtcggggtgaaacagccttagattccctgcctccagaccctattcacctgcctcactagcacctccagtgttttcatccagaagctcaacaaatcttattcaacggtttttatagaacttcatctccatcccctcccatagaggtgtgtgtgtgtgtgaggctgagagttcaaccctcttgtcacatggtctttctggtgactggccccaccctaaatcacttcattagcataatcaggtttgatcaaaaatagtggctcataaataaccaaagacactcctattagaaaattccaagagttttaggaggactgtgacaggaactggagagaaagaccatgtatttcatattatatcacagggacagaggtaatggttaaagctagtggataatgatgcaagtattgtctgctgaaagccaattcgttccgtatttcttaatattgcatgtttggtatcttttggttgcaagcaacaaaaacgaatttaagaaaaagaagaagtaattaaatccggccgggcgcggtggctcacgcctgtaatcccagcactgtgggaggccgaggcggacggatcacgaggtcaggagatcaagaccatcctggctaacacggtaaaaccccgtctctacttaaaaaaaaattagctaggtatggtggcgggcgcctgtagtcccagctacttgggaggctgaggcaggagaatggcatgaacccgggaggcggagcttgcagtgagccgagatctagccactgcactccagcctgggagacagagcgagactccatctcaaaaaaaaaaaaagtaattaaatccagaagggtagtggtgcagctagtttcaaggatttgaccaaacccaggtattataaagcatcagaactgcctttgtctctcatgagttcttatctctactttctctcagagtctctgctttctctctggcttctccaagatgtgaagcttggccatctggggtcacacctttatgagcttggttattgaggaataaaactgaacacttccagcttctgtgtttgaaatctagaggaattgcccaatttaattcatgttcccacactttggatcagtcactgtagccaggaaagggcagatacaatgaggggccccatctaggtcatatccctaattccttggctagaggagtgaagtttattgttggtagccctcccaccaaaaccataggaacatttccacaggtagagggtactttctgggctgataaaactatacataggggccacataaataaactattaaataggagcatatagttattcataataaactgactaataagcactgttaattttctaatctccagtgagataatgtaaagtgtcaaatggtcttaagtagttagagtgatcagccagcattgtttctttgacacagggagcactacctggaaatccaaattacagaccaaatttaataaaaacggaattcaagcagagagttcagggaatgcttttaatgttaatgtgatcaagctatgataggttgatgattctgtcacctctacaagaatattactttcacgtttcttgaaatattggtattctttgtataggacagtgctaacaaaaatttagatcagtcagtttgtgaaaagattgttactttttttgtttaaaactttttcatgaatttccattgttttgaagatgaaatttaaacccttgacattatttccagggtcctgtatggtctgacatctgcatacctctctaacctcattatgagctactcttcttgctcctttctctgtaagccctagccatatttatcttctctcagttcctggaatgctttaatttccaccccccgccttcagagcctttatgtttgctattttcccctgccttggctgccagcaccttccttaccctcacctaattaactgcttacccttgggttagatcccactttaggcaacatttcttcagagaagcttttcctgtttgccagtttctctaactcctttcctcatcctctagactggttcaattccccagctactatggcacttggtactttaatacttacctttgtaacatttaacawtttttggtcattgtctattttccatttagactgaacctttcataagagagcttagatattaggaagaaggagtagctgatagtaccaatttttaagcaaattggttgtagctggggctattggttttataatttaaaagttaatgttttatcttctcttctgacagaaagtgaaatatttatttccattgcagtttagcaactttccatgtttccctttccatttttcttgtgaatcccgtagtacaggatcaaagataggaattatttaacatacatggctgaggattccttttctagctcctttatttagaatggtgctttttaacccttactctagagtaaggaattttttaaaaatactgatgcctggaccctaccagcacctattgtagtttaatttatctgaatgaagctagatgattctaatgttcagtcaggtttaaaaattgctggtttagaaaatatcttgagtactcttctgcccctccagtccctgcccaccttctctttttatttgagtgaaacattttcttttctcctttgatttaagcaaagctcaagcttggtgtgggaatgaaaggaaaaggactttggagggatttacctattttttctaggagagaaagtgcaatactaacttttctgttttgtggaatgtcccagtgcaagtctagtattctgatgttttttttcttccccaaactgttgccccccacctccagcctatgtacaatttgtgttttattttagtattgtgtatataggattcagcactatcctcaaatgtatgaacatatcccctgtggataaggggggactactgtatttgtaaaagttcatatttcatatttcaatgcatataagaattattttatctaatggttacagtctatatccttcattgatgtgtttatttgagggtctttgaacatttttgtaacttttctctatccaaatgcagttttatagatcatttttatggaaaggaaggagataattcggaaggatgttttaacatgtggtactttctacctcatgttgatcgaaagattttcacttgtgaattaatttgtctcagaatcatggtgtttcacaatagagggttattttggtttatctggcttgccttggtttggttaatgtggttgaactgcttggctactcataaagtttgggaaattgatttctactaattaattacaatagtaacttaaaatagatcattgctggtgatatggagatgcctccattaataccacggtttctaaaatgatagatttcaggagtagtgtgagcaggctgagattaagaattaagtgtgatagtggcaagacttggttattagacgtgtgtkcagacggatgtgtggtagaagaagactatgagcattcagacttaaaatcttggttagtaagatccatagacaggcagggtttttttgtttgtttgtttgttttaacaggttggagtgcagtggcaggatctcaactcactgcaagctccgcctcccgggttcacgccattctcctgcctcagcctcccgagtagctgggactacaggcgcccgccaccatgcccggctaattttttgtatttttggtagagacggggtgtcaaccatgttagccaggatggtctcgatctcctgaccctgtgatccaccctccttggcctcccaaagtgctgggattacaggcgtgagccactgtgcccggccaacaggcaggtttaaggtttgttctgtaggtggtaatctgggttagggcagcaaagaaggtggattctgagatcagcatctgatgataacaccaggaatagttccaaatgaacttttctgtgagagaaagctttctaggtttcaaaggatccatacctattgcagtaattactaatgttctctgaagaaggcttcttatctgtcctgtgactaggaataatttttcattccctcctactatacaacttgcttttccctcttataatatcttccatatatatatatatctcaagagagtctttcatgttgtattacatataaccttatggaaagctcaaaagttctttgaagcctcttgttttgctaaaaggttcaggtaaattttgcattctatcccatatgtgcctgtttgttttaatataaaaattgtttaaattagtaaccagtgaaaatactgtttctccctaaagaatttttttgataaaattgatacttcagtggctttgagtgtcttttggcatattgccaaatgaaggtgttgaggaaatgccactccaaaatatgacaccttgatatattgattactttaagttggaaacacttgcaaagtagcaaatgcaaagaaacactttctctgaactcctgttacctacctaaggacagatcctccaaaagaagctcaatttgctcctagggagtttgatcaaccagggaagattgtctcttatcactggagaggagagtaaaagtcagcaccacacccagacaaactgacacaaagtatcatctattattattctaagggcccatttatctttctccagaattgttcttctaaattgcctgtatacctctacccccatgctatataaagggtatataaactcctaaatatcactttttttttttttgtatacacgtttctttcctgtgatacccccatgcacataatgaatctgtataccttttctccgtttagtttatttcatagactggtttgaaatatcacggattttgtttgtttttggtatacactttttaaaaatatcacttttttttttttggtatacacttttctttcctgtgatactcccatacacataataaatttgtatacattttctccatttagtttatttcatagactgttatcgaatcctgatggtagagggaaagtcttccttgccttacacaagtatttcccagaatatatttacaccattccttgatatgtgttgccctgtttttttttctttaattacacaaaatttagtgatttcactttagataaattcaaaagtacgcatttctttaattgattttcttctttatcacagctctgacaagttgcttcaggaagataaggctggctgttagactacttgagaatcttttaaaaagaaaaaagtcaataacatttagtgcagtagatctctgaaatgcatctattttgtgcttattctgtgtcaggcactgtgcttatcattaggggtaccatgactaaaaagagtatttggcctaaagtctttaaaaactgttttctttttcctttctttcttttttttttttttttttttttcgttgagatagggtctgtctctgttgcccaggctggagtgcaatggcaccatgatgactcactgcagcctcgacctcccaagcccgagtgatcttcctgcctcagcctcccaagtagctaggacctcagtcatgcaccaccaccgcacctggctaattttttaatttttgtagagatgaggtctccctatattgcccaggctggtcttgaactcgggctcaagctatcctcctgccccagccttccaaagggctgggattgcaggtgtgagctaccatacctggctaaaaaactcatatataaaaagattaccataacacattggtaagttaaagaatctaggctgggcgcggtggctcatgcctgtaatcccagcactttgagaggccgaggcaggtggatcatgaggtcaggagttcaagaccaacctggccaagatggtgaaaccccatctctactaaaaatacaaaaattagccaggtttggtggtgggcgcttgtaatcccagctactcaggaggctgaggcagataattgcttgaacctgggaagcggaggttgcagtgagctgagatcgtgccactgcattgcactccagcctaggcgacagagcgagactccgtctcaaaaagaaaaaaaaagtatctagtaaacaattacatttccctcattgctggcttagaaattacatgctttatttctattctgttaatatccataaattagtcattattttatgcagccaatatttgtttaattgtaactgtatgtttgccgtaaagttcattcttacattgaaagactgtatagtatattgattcagagaatgaactctgggttcagactatctggatccaaaatcaagttacttaggttctctatgactaaaatagacagtgatagtatcccttcttcaaagaacattttaactttttttctttaaagatatttttccgagcatatattcttaattaacagttgtttttgtcctgccactatgaatgaattatttgtgtcctctggcttctgttcatgcaattgagaagtcagtgtccatctgattgtccttcctttgtgtgtaatctgtcttttgtctagttgatcttttttaataaaggtaaaatttatatagtgtaatgtacaaatagtaagtgtgcagttcattgagttttgatgaacatacactaatccaccccatcaagatacaagaacattctattagcatagaaggttacatctatttccaggcatttcctctcccattccacaataggaaaccagatttctatcaacatagattagttttccttgctcttgaacttgatacaaatggaatcatgcaaatggactcttttgtgtgtggctttcttcactgagcataatgtcaatgaaattcatccatgttgttgtgtttatgagtacttcgtagacttttatccctgagtactactattcctttgtatgaagagaccatagacatttgagttctttgagactacaataaataaagctgctataaatattcatgtataagtctttgtgtggatatatgtttttatatatatatatatatattttttttttttggtaaagcctaggagtggaatggctagatattataatagggtaggtgtatgtttaccatttcattttacattcccaccagcaatgtgtgagagtcccagttgctccacatcatcaccagcatttggtgttgtcaatttttttaactttaaccattctaatggtaggtaatgatatcttttgattttacttttgagtttcgtgtgtgtgtgtatgagagatggagtctcactctgtcacccaggctggagtgcagtggtgcaatctcggctcactgcagcttccacctcccagattcaagcaactctcctgcctcagcctcccgggtagctgggactacaggcgtgccacctccatgcctggctaatttttatatttttagtagagacagggtttcaccatgttgcccaagctggtaaacttctgagctcaagtgatccgcctacctcagtctcccaaagtacttggtaatttacaggtgtaagccaccgcacctggcctattcactgatttttaatttcaattatacttcttatttctacatattctgtgtttttaaaaatcaatttcttagtctggtcatattttgatactctaatttctttaaattttttatatttttcgttattgcttataatatctgcagttttgtaagtgtaactcagttgtttctgcttcctgtggtggctcatttcctgtttttaaattagtttttgattgtgagcttgttgggactttatctgtgtgaattatttctgatctaggtttaaggtgtgtttttctagagaatatgcatttgcttcttccaggaatccagggatgcaatctacccaggaccacttacattaaattctcacttggcctcacaaaagtaactgaattctaaccccaaacttgagtggatgccagattgtggttaggaagaccccactccaccactaccaatacctacccagagccaaagctaggaaggacaagagtactcacttctgtgggatgagttgagtttttgtttttctttctttccctagtttatctttcactgaggatgttgcctttgggagttctagctttttggtcttgatctgagttcgactttgagcagatcatagactttgtcttatgtttacaagtacgtttccacttaaaataaggccgtagtgaagatgtagaacaactagaagtcccatacattgctggtgggagtgtacagtggttttacaaaacttttggcagtatctagtaaagccaaacataggcctaccctgtgtcaaaagacaaaattacaacaaatttagcttaaaaatctaactcacttttattagtggttcatgaatcaggcagtgtgtcatcaaaagatttagaaaaggcatttcagtgtgctgagcagaggaagttgaatttataggcaaaatctagctaaataaagcagaaatgaaacaaaaagtggattggtcatttcaaagttagtttctttatagtattaaaacacaggggacttccttatgctggctcaggataactggcctccttctgattgattgctatgaatcttttgattttttttttttttttgagatggagtttcactgatgttgcctaggctggagtgcaatgccacgatctcagctcactgcaacctccgcttccaggttcaagtgattctcctgcctcagcctcccaagtagctgggattacaggctcccgccaccatgcctggctaatttttgtatttttagtagagatggagtttcaccatgttggccaggctggtctcaaattcctaacctcaggtgatccacccgcctcagcctcccaaagtgctgggattacaggtgtgagccaccgcgcccggctttttgatttttttaaactgtcattactcggggtttatagtctactactatattgctgagaacagttttcaagattaaaaataaaaatgttttctgtttctcttagttaaaaaaaaaaacctgtctctcattgtaggattattattctctcttttcattatagatgtatactatttctaccttctgtgttaaaaatacttttctgggccgggggcagtagctcactcccgaaatcccagcactttgggaggccgaggcgggcagatcacgaggtcaggagatcaagaccatcttggctaacacggtgaaaccccgtctctactaaaagcacacaaaaaaattatggcgtggtggtgggtgcctgtagtcccagctactcgggaggctgaggcaggagaatggtgtgaacccgggagacggagcttgcattgagccgagatcgcgccactgcactccaacctggatgacagtgtaagactcggtctcaaaaaataaaaaaataaaaaaaatacttttctgacttagagaatctgggtgaagggtaaatggaattccttgtactatttttgcaacttttctataatcctaaaattgtttcaaaataaaaggttaaaaaaatattttccagactacttcagaaacctaattactaataataattctgagttttaagcaaccaacttagaaacttttggaatgcagtcaacccactgacaaatgaggactatctgtactatagtatttttttagacggggtctcagtctgtcaccctagctggagtggtggggtgatctcagctcattgcaacctctgcctcccaggctcaagcgatcttcccacctcagcctcctgtgtagatgggattacaggcaggctccaccatgcccaacgaatttttttgtatttttagtagagaaggggtttcaccctgtttcccaggctggtctcaaactcctgagctcaagcaatctgcctgcctcggcatcccaaagtgctgggattacagacatgagccacagagcctggccttttagtctatttcgattcttcatttcaattcactatactttttttctaagttttaaaatattttttatcttttaccattgacattttgtgttgttttacagcttctttatattggtctgcattccaaagacaaaatgaagtctcttatgttttgtgatatgtgttaaaataattgaactagacaagaatgttaggcccaagtgagatgaaggaaaggctctttgataagcatttggcattttagatcagagatggcaagtacgtatgacatagcattcttcttttatmcatttcagatattatttgttgatcagacactcttcttcctgtcttggaccacacagtgttttaggtatctgctgtcagttgatyagagttggcawgagaaacaaaaaaaatctattggcatctctgacttagaagatcagttttgggagaatcttctggaatatctattctattcttaagtttaatgagtaatttcatccattttatgaagtaacataacaattctggaagcctagttatttaaagaatgctttaagctttgtttcttgtcacttcaattttcagatgtttgtgaaaccaagtctgctattttaataaaatgttcttaaagtataatgtaactttaaaaaatctacatacttgtgtgtcacatctttagcctttaattgggtgactttttaaatgttatctacttttattcttatgttttccttcccaggagtggacctaccctatgagacgagagatgcaggtatggcaaccttttctttgttcaaaccaacccatgttattatcataataagaaccttagtttataggatttgagacctgctgatttcatgatctgtaggttcatcattatgtattttaaataattattttaaatatttaaggttaatcttggatcttaaaacgatgggaaattagaaagaggaacgtagtaataggtgtatgtgcttaatgagtcactttctcttggttttttttttgtttttttttttttgaaacagagtttcgctcttgttgcccaggctagagtgcaatggcacgatctcggctcaccgcaacgtccacctcccgggttcaagtgattctcctgcctcagcctcccgagtagctgggattacaggcatgcgccaccacacccagctaattttgtatttttagtagagacagggtttctccttgttcaggctggtctcacactcctgacctcaggtgatccagtgacctcaggtgatccacccaccttggcctcccaaagtgctgggattacaggcatgagccaccgtgcctggccaatgagtcactttctttttcctcacgtgaaaaattggatactttctttgtattccttttgaaagcagtttgctttctctgtttgtctagataagttagggagagttgtctgtacaacaaataagcattgttcattttgtgtccgatttttaatcaacttccacaattaagtcttctagaagatcaaattgaatactttcagtttggaatgaattaaacgatagctaaccctcatagcagttcattttcttttgcatttcataccatttaccgtcaagtctgtttgccccaggattaagcagtatcttgttcctgggaatcccatgacttctaaaaatctgttacttttctctcttaatgaaagttcactttgaaaaaataggtgagtacctatgaggcattttacttggtgttaggaggaatgcaaagatgactaaatgtaatttctgcccacaaaagcctggtggaagaaatcagttttatatacaaataattatgacttatagaactgaactataaagttactgttagtatctagggtatgatatatccagactgaaagctttctgtattgaatttacataaaataaatttgaattcaacatctggaaggtacatacttgttgaaattttgtcaactggcaaatatttgaatttggaatttttatgttacagtaataatttgcttctattaactatagataatagttttaggtcaggcacaggagttcatgtctgtaattccagccgtttgggaggctgaggcagaaggatcactagagcccaggagttccttatcagcctgggcaacatagtgagacttcgtctctattttttaaagaaaaaaaaaaagattaaaaaaatagataatagttccaatcttgttgtatcttgtgctgcttttgatttggccaaataaggtttgtcttatttatatagccttatagatttaaattgctgatggtaaatacctcaaatttttttttttctaggaaattttacctggattgttcttaggcccatattcatctgctatgaaaagcaaggtatgaactttgttagattcatcaagagagacttttattaaccaacttttcttgggtaagttttttagtaataaagagttttattttagggagcatccacaaatactgtctgttaacagtaattgtcactctggagtaccttcctctttccctattttactagaccagtagttctcaagtgtttcaccacaaatcagagtttttgttttttcctcatgaaatttgtatgtttgaaagatttaccaaataactgacctttaataacttatttactctctaaaacactagacatctgtaattgctaatcatagcttcagaacaatatgagatgtagttaaagcccaaaataaggaatttcaatgtttagttaaaccttccttatcaagggtaagactgtgtgtgttaattgaaagtcattcaccttagttctgttttgccagccagactttagagagctagttggtatccccgctctgaaatttgaaactttttgagcaccagtatgtcactcgaaggaaatcctcactggagtatttcggatttcggatttttggattagggatgctcaattataagtataatgcaaataggcaaaacaaacaaatccaaactctgaaatatttctggtccctggcattttaaataagggatattcaatccgtatagatattctacatagtcaaactttaatggacttactcagttgcagttaaaataggtagatctcattttaataaatatagcaatgttcttgccacttctaaaagattcaatgctactaattctctttgagttacaacgtggaacatatcacagatgtctttccccaatactttgcctattcagaagtcagtatacttaaattgtgtttgatatatccataatttaatttgatgttcttaggaatttaaccggttttaaaaggtcattgattttgaaactggaagatttttttgacagttgagacatggctaagagtaaacctggtcatcttgatgatttttgcttagttggaaagatagggagttagtaaaaataagtactagggaaaggatagggcaggtaactatagacatagccgtaatttattttgtaaaagacagatgtaaacaaggttattgtccatataatttgctattcaccaagtactagtcttccagatggttttagataatttacatttttgaaattcccactgtactttataaatatacatacagtatttatcacattaaattaaagtatttgtttaaaggtctatctcctcaatgggaggctgaggcaggcggattacatgaggccaggagttcgagaccagcctggccaacatggcaaaaccccgtctctactaaaaatacaaaaattagctggttatggtggtacacacctgtaatcccagctactcgcgaggctgaggcgcgagaattgcttgaatctgggaggtagaagttgcagtgagccaacatggcaccactgtactccagcctggttgacggagtgagactttgtctcaaaatgaaacaaaaacacgcacaaaaaaaggtctagttcttcaaaacttcttttcttgaaatgtcaccatggtcttattagacaggaaaagcctctgtggcagtttatttcccaccctaggtaaccataatatagcccatatttcttttcataccattatctaaaaacaacaacaaaaaataataatggagataaacctaaatggataaactcctttttaaacactcatttactgttattattttgtgggagaggagtggggtcttgctctgttacccaggctggagtacagtggcgcgctctcatagctcactgtaacctcaaactcctgggctcaagctgtcttcccaccttagtctcccaagtagccaggactacgggcacacaccaccatgcctggcttaattctcaaagtttttgtagagatggagtctggctatgctggccacatttrcttaagtatatctttttattaaattcaaatacagtttaaataaaagggacaaatttagggcctttgtaattagtaaacggtttgtttttgtaaagtttttctactgtttttaaatgtgaggtaaggtcataatttgcttcatattaggttggtgcaaaagtaattgcagatctgcctctgaaaagtacaaaatctattcgctgttacgttagggctctattttgatagtttatttttatttagtagtagtctattgggccttcaaaacttgtttaagcatatttatacataattatgtgcatcgtcttgtgctttctcacattcataaagtagataggaaaactccataggcatcaagtgtaaacgaaggacttaatgttgaatttgttgtggaaattggcacaaatctcaatatagaacattggttaattattaatcttaccaaatgcttatctcactttccctaactcaagttatactcaagaaatacaaagataattgaattctaatctatgctgacataaaacttgctgcagaaattaacacttaaaacttgcaaattatattgtcttagcccaggctgctcaaacaaaataccatagacagggtggcttaaacaacagacgattatttgagttctggaggctggcaagtccacagtcatggtccggctctggtgaggaccctcttgctggctcgcagatccctcccttcttgctgtatcctcacacggccaagagaacgagttcttgcctcttcttacaagggtacaatcctgtcatggaggtttctaccctcatgacctcaatctaaaactgattatcttccagagactccaccatcacatcttgggggtaaggatttcaacataagaatttgaggtgatgcaaacatttagttcataacacatataaattatttttttttactttgctcatgaattattagtgctactgttttgtactatttaaaatgcagaaaatgggaattaaatatataggatttaaaacaatgtgtcaagaaattcaaggttatctgattctcatgccatcgtgacttgttagttcatttattgaacaggtaattattgaacaacttaactagttatacatacttgatacttaagtgaattgtattatacattttacacatactatgtatcagtgaacaaataaaaatcttttctgtcatggaacttaatgctctaggtaataaaataacatctataaactcacttaaacttatcactagcaaatgaaaacttattatctggtaatttctagaattgtcatgttaaattgctttaagtatggagccaaaagcactacaggttgagtatccctaatctgaaaaatctgaaatgctccaaagtgaaactttttgagtgtcagcatgacagcacaagtgaattccacacctgaccccatgtaatgggtcactgtcaaaattttgtttcatgcaccaaatgactgtatgaaattacgttcagagtatatatggtgtgtgtgaaacataaatgaattttgtgtttaaacttggataccatccccaagacatctsagtatgtatatgcaaatatttcaaaatctgaaatctgaaacacttctggtcctaccttgggaccagcattttagataagggatactcaacctgtattgaatataataagatgtcattgaagttgccatttttaacttcaggaaaatttttaaatggtaaaaggttaattagattctgtgaagtatgtaaattaattctgactcttaaagtatactgggagaggcaaggagttgtctagagatttgggttccagtactgctgttaactaggtcggtgatgtccaagtatttggtaatgtaactgttttatgtcttagtggttctctctaaacaataaagattgcagtcaatatatattaactaccatttattaaacacttgctgtgtgtcccaggtgctatgccaaacatcttacataaaggttccatcaagctctaaaattgtaggtatgaaatatccctgttaaccttttgaggacattaatgtattaatcttgaatcattgaaatatcttgctgcccacttcaggtatattataaaattagctttaattccctggacttaagcagagatgtgggttctgtgtattttcaaacatctgtgttatatagtaagatgatgtttgatattttaaaatatttatcttccctgtcctccccctgcttttttttttatacagctacctgtactacagaaacatggaataacccatataatatgcatacgacaaaatattgaagcaaactttattaaaccaaactttcagcagttatttaggtaagaattattgctatgatttgtaaaacacttaatgaagtttcatttcaggttttgtaccatcagttgtttctgtacatatctagtttgtaaaaatgggtcatatagtacatagttttttaaaataaattttacttaaaatacttaaataaattatgcccataatgcagaattctaaaggttcaaaagagtgtatattgtcaagaagtttctgggaaagtaaaaataaaaaagaatttaaaaataatgtatactgaaaaataggttttagtgtacattattttatctcttgagggataaaggaattgagtatctaggggataggtttagggaaacagcatctactgttacctctttattgggtagtttttgagtgttaggttaaatttatgagcatagtcttatagataaatttttttttacattggctttcttttttactttatattttttggagattggtttatatcggtatgtatatcaaactgcttattctttttaagttgcattgtaatccattgtatggctatactaaaatttattcaattagtctgttagatatttagattgtttctggccttgtactaatatgtatagcatatagtgactatcattgtacatattactcaatttatatgtgagcatattgatagggcttatttgcagaattgctggatataagagtatgaacattttaaattttgatagatgttgcagattgttttccagtgcgttgtatcagtgtacattcccattatcaagtatgtgagagtgactcttcccttagtatctctccaagacggaattgtgaaacatttttaatttctcaaagtctaatggagtaaaaatggtatctcatttgatgttcttatttatcttgtaagttcagttgagcatgtaatggtttttaatgttctttattttaacttcatttttaaaatagagtatattacgcatggtacaaaagtgaaaggatatgtaaacatatataatgaaagtaactctactttttctcttaacccaagccaccttgctcctatcctgggaggcagcttcttccttcaatatctatgtaaaagtatatatgttaaaaatattttaggccagcacggtggctcacgcctgtaatcccagcattttgggaggccgaggtgggcagatcacctgaggtcaggagttcgagaccagcctggccaacatggcaaaaccccatctctactaaaacaaaaattacctgagcgtggtggcacatgcctgtaatcccagcagctcaggagactgaggcaggagaattgcttgaacccagaaggcagaggttacagtgagccgagatcacaccactgcactccagcctgggcaacagagcaagacaccgtctcaaaaacaaaacaaaacaaaacaaaaaaaaaacagcgctgtggcttacacctataatcccagtactttgggaggctgaggagggtggatcacgaggtcgagattgagactgtcctggccaacacagtgagaccccgtctctactaaaaatacaaaaattatctgggcgtggtggcacatgcctgtagtcccagctactcaggaggctgaggcaggagaatcacttgaacctgggaggcagaggtttcagtgagccaagattgccccactgcactccagcctggcgacagagcaagactctgtctcaaaaataaaaaaaaaaatttaatgctctgctttatttttacaatgaaaccaatctataaatatctgtaaatacaagatacatactctaaaatacattgtgtgaacatataatagaatactatgtaaccatgaaaaagaatgaaatatatgtatgtgtttggatttgggatgatctccaagataatgcattacatgaataaagcagggtgtggaacaatgtatatatttgcaatgtgttgagtaaatatatatatactacattccatatatttattcttaatatatgcatagaaaatttctggaccaagaggctagaaacttcatagtgattgcttctaagaaggaaaattcagggcctgtgatggtagagggacgtatttttctttcgtttttaattttgtttttttttgttgttgttgttttttttttttttttgagatggagtctcactctgtcacccaggctggagtgcagtggtgtgatcttggctcactgcaacctctgcctcctgggttcaagcgattctcctgcctcagcctcctgagtagctgggattacaggcatgtgccaccacacccagctaattttttttttttttttttttttggacagagtttcgctctgttgcccaggctggagtgcagtggcatgatctcggctcactgcatcctccgcctcccaggtttaagcaattctctgcgtcagccttctaagtagctgagattacaggtgcccaccaccactcccagataattttttttgtatttttagtagagacggggtttcagcatcttggccaggctgatcttgaactcctgacctcttgatccacctgcctcagcctcccaaagcactgggattacaggtgtgagccaccgcacctggcctaatttttgtatttttagtacagacggggtttcaccatgttggccaggctggtctcgaactcctgacctcgtgatctgcccacctcggcctcccaaagcactgggatttacaggcgtaagccactacgctcagccgagggacatatttttcatggtacccttgatatccatgggggattgcctccaggaacccccatgaataacaaaatcctcagatgctcaagtcccttatataaactggtgtaatatttgcatataacctgtgcacattctctcatatacattaaatcatctctagattacttctaatacttagtacagtgtaagtgctgtgtgaatagtattggattttatttttattatttttagtgttgtattttaccttattttttgttaatgttttttattgttgtcggttgaatccacaggtatgaaattcttggatatggagggctgactctttacttttgtagtgttttttttttacaccatatttagtttattaaaactagttattaaaaaggaatatcccaaaacactgatttttttttttttttttttttttttttgagacagagtctcgctctgtcatccaggctagaatgcagggctcactgcaacctctgcctcccaagttcaggcaattcttctgcctcagcctcctgagtagcagagattacaggcatgtgccaccacgcctggctaatttttgtatttttagtagagacggggtttcaccatgttggtcaggctggtctcaaactcctgacctcgtgatccgcctgccttggcctcccacagtgctgggattacaggcgtgagccactgcgcccggcctgaattttttataattatgaaagaaatacttttttttttttcaaagataggatctttctctgctgcccagcctggattgcattggcatgatttctgttcattgtagccttgacctcccaggctcaagcaatcttcctgcctcagccttccaagtagctgggactacaggtgcaccaccggatcgggctaattttttttttttttttctagagatggggttttgctgtgttgcccaggctgttcttgaactcctgagcttaagcgatctacccacctcagcctcccaaagtgctggggttacaggcatgagccaccacacctggccatgaaacacttattctttataagtacttcggaaggtatagaatgacaccaagaaaaatatttaaatcatctacagttccacaattcagagaaaacacttttgttaacatttggaatatttccttttaaatcgttctctgttgtgtatgtgtatttacgtatatatgcatagaattattaaagaaaatgagaatgttgtattttaaaatatcaaactatataaggtgaaactaatcttaagaaaaaacaaaaaagccaaaaaatcatactattcatttctaatgtgtacagactttttgttttaaattataatgttgtttgtgcaggttctttatcctaatggaagaaccatttctccttaaacttttacaatactagcttcttagagattgatagttctactagcagtgcttgacactgaaaatgttatgcgttaaaatatttaatttcattctgagttaacatttttcccctgaagcattattttatgtaactggaatacccagtcacttcaggatacagtcattgtcgaaatccttgtaggttaaatattggattttcctcagatcctgaggttcagcttctgtgtttttttttgtttgtttttttgtttttttttttttgtttttgaaacagagtcttgctgtttcacccaggctggagtgcagtggcacaattttggcccactgcaacctctgcctcccgggtttaagtgattctcctgcctcagcctcctgagtagctgggattacaggtgtgcaccaccatgcctggctaatttttatatttttagtagagatggggtttcaccatgttggccaggatggtcttgaactcctgacctcaggcaatccacctgcctcggcttccccaagtgctgggattacaagcatgagccaccatgctcagcctcagcttctctgtattaaagtcctgaattctttgaagttgttaccacctaaatgatcattgaaaaactgtattttttagtgcaaaattgttcttaaaactaatttaataacttagctaattgcctatagttgtgttaataaacagtggtcttagaaacgcttagaaatggaagttttttacaaaaataagctaacatatttaaaatgccttttaagtattttgtaaagtgtaaaattcagtacaggtgctctctcagctagtttttttttttttttttttttcccctttactaaagatgagttcaaacagtgaatgtttgactcctggttccatagaccataccttccgtttttatttgttcgttctcttagactttggacttcctctgaaatgtcctctgtaggttcatgagcaggagtcacaggaccacttagagaacaatcttctggtcttagagaaattggtagaaataaaagaataacataacgattacaggtacttttgtctttatttctaggtccactctaatctagaggaatgtatcttcctgcttgtgatttttctattttaaccagatggttcattatatgcaaataaaatatgtatttatttttgagataagaatcttgctctgttacccaggctggagtgcagtggcccaatcacagcttactatatccttgacttccaggctcacacagttctacctcagcccccttagtagctgggactataagtgcacaccacgacacccagctaattttttaatattctgtagagatggagtctccctctgttgctcaggctggtctcgaatccctgggctcaagtgatcctcccaccttggcctcccaaaagagtttctttttgctgggattataggcatgagccattgtgcccagcctgatggattttttaaatacttaaatatcagagatgttaacatggtgtttcaggttttaatgccttcaagcaatgtaaaatctaccacacagttcttgggaatatgatactttgaaagttgttttgcattcttgccatggttaacaagaaataatgagttatttttttaaagtaccttaagtgttttacttaaagtgtgcttatcacaaaatactctattttcagatatttagtcctggatattgcagataatccagttgaaaatataatacgttttttccctatggtaggtaccagtattttttaaatatcatttaaaatttatttatgatttgacttcttagttgtgcttttttttttttttttttttttttttttgagacaagagttttactcttgttgcccaggctggagtgcaatggcgcaatcttggctcaccacaacctctgcttcccgggttcaagtgatttttctgcctcagcctcccaagtggctgggattacaggcatgagccgccatgcccagctaattttgtatttttagtagagacggggtttctccatgttgatcaggctggtctcaaattctcgacctcaggtgatctgcctgcctcagcctcccaaagtgctggcattacaggcgtgagccaccgtgcccagcccctttaattgtgcttgtaaagcttgctacttttactttgctatgactgaaaattatgtgattgtgtttttaaaagaattatttgtagaaaattttttatgatctccagaaatttgaggaatcatattgtgaatgtattggacttaaattaaattttggcttctttaatttttttggacttgtaatagttctatttatagcattttggaaattggtgaatcaaaataatttttatacatataaattaggaaattgttttcaataggtttcattttgtttcattatatgcatttattttatgcttacattaatccacatgtcttttgcctccagactaaggaatttattgatgggagcttacaaatgggaggtaaataacatttcctttccttaactaatgtttatattttgattatttgttaattttttagttggtatttgtcttaaatgcaggatatggaagttacaattatatgtagtagcttactcccaaatttgtattttcccaattacttgtttcatttggataggctttctggagtatccctgtagactgttttcaaattctctgtgagctttcagtttctttaataagagtctgctatattctctacacagttgataataacaaattgtaaagatttgaagatatccaagtgattatagtatataaggagttactttactgtggtttcaatgtagttcagctactgactcaggtgtttttctattagaataatgaattcatgtttttcaggaaaagttcttgtgcatggaaatgcagggatctccagaaggtatgaagttagaaataatctttctttctataacatttaattaatgggctgtattttctggttgtttttaaaattattttcccctcttcagtgcagcctttgttattgcatacattatggaaacatttggaatgaagtacaggtaagaaaataccctaaaacctagccacagtttaaattctcattaaaatgaaacttaatgggaatagtttggaagtttgaagttcttattcccctgattatttttcatgtagtcatgtttgattaggcaggcccttattccatgattagtcttaacctaatttatctacttgtatagatatgcataggctaatatggaaatcctatggaaaactacttacctaccacaagggaattggttggtatgagtataaaaactcgtgaccacaaatgttagtgcttgccttatttaaagggctaatttatcatgttctcctttaacaatagttggatgaaaaattacctaggaattgtttgcagcatctatttacaattcagagtagtctttcttatcaaaaatcatcttttccaagcattctgtatagattttttaaaagatagggggtggtaatgagcttcttgccccaagacaaagcaaaagcctggccagtgtacagtatttcctttctcagcttttcttgttctacaaattagaaatcttatagtaatcattgacacatctttctatttcagtccccttttatatctaaattagaatggataactttgcttaaaaatatctattcttaaaggaatattatttgaatacaaatatttatttatttatttttgagacggcgtcttgctctattggcaggctggagtgcagtggtgcgatctcagctcactgcaacccccgcctcccagattcaagcaattctcctgcctcagcctccctagtagctgagactacaggtgcacaccaccacgcctggctaatttttgtatttttattagagatggggtttcaccatgttggccaggatggtctcgatttcttgaccttgtgatccacmtgcctcggcctcccaaggtgctggtattacaggggtgagccactgcacccagccagaatacaaatatttaattgaaaaaagattaaacatgtattgatggactttatgttttatatattgtttttattatttcgaattttgtcagaccattaatgttggaaataacttgtatttattgggtctctgctatgagctcagtactattataggcactttaagcctcataacaaaagtaaataaacctctttaaccagtgatagtattttgagcttgaacttgtactatatgcacaaaatgcttacattttatatatttattttagagacagggtcttcctttgtttctcaggctggagtgtagtggcacaatcatagctcactgtagtctcagacttgaggactcaagtaatcctcccacctcagcctctcaagaagctgggactataccacatcactgtgcctggctaatttttaagttttttgtagagatggggtcttactacattgcccaggctggtctcaaagtcctggcttcaagcagtcctcctgtgttggcctctcaaaggattggggttacaggcaagagccactgcacctggccactttacacttacctcctattcatagtagttccccaaggtaggtgttattagactcttcattttaccaatggacaaaatagagcttagagaagttgagcaagctgccgtaagcatatagctggtgagaaaaggaattgtgatatttaatctcatcatgctttttccattacaactcattacccctctctattgctaagttgtatgattatgattaattcattaaataatgctatcacattaacactctttttctgttttcagagatgcttttgcttatgttcaagaaagaagattttgtattaatcctaatgctggatttgtccatcaacttcaggtaacttttcttcctctttaaggcaatcagaagtaagatataaaatcttttatacatgtaatttaggtgtacaatttactttgtgaatacttaaaattgccataatctgactactttgatgctttattcaagtttatatctctatttagaagtattttcttggctgggtgtggtggcttatacctataatcacagcactttgggagaacaaggcatttggattgcttgaggccagaagtatgagatcagcctgagcaacaaagtgagacccaatctctaaaaaataaaaaattaaaaaaaaattagccagtcatggtggtgcatggctgtggtcccagctactcaggaggctgagatgggaggattgcttgagcccaggagtttgaggctacagtgaacagtgtgtctttgcactccagcctggcccacagagtgagaccccatccctaaaaaattaaaaaaacttttttttcttaaaggctggcattaccaagaaaaaagggttaaagacacattatcaaatctaaagtaaaataattgctgttagaaatgtctgatttttttttgttgttcattttgatcacacagagcataagacagttttgattctaagtatactaactataacagctttttctattctatgtttatcttttccatgttgtttcatattttgttgatgcctggcagatgcactgacaaagatgataagtctatgaattaacctaattagaccacgttgctcagtttattccaagaggcaaaatcataggctgcagaatgtgctctggctaattacatccaattatgtaggaataaagctcatgtttcaacatcaagaatatttattacaaaatatattgttatagttaccaaggtttaaattttattttaatatttaatttacttttaatttttactacattcaaaagagaaacagtgtcatctgtgttcagcctgttcatgtaaaatgtttgtcttctaactttgtaagtttctttgccttttaccatgttgtagaaaacattgttttttttcattttttttaaactattttttaagcttttcttttttttgtggatacatagtaggttaggtatttcgatacaggcatgcaatgtgtaataatcacatcatggaaaaatagagtatccatcccctcaatcatttatcctttgtgttacaaacaatccaataatgctcttacttgttttcaaatgtgtaaaaacattcttttttaaaattaatttttgtatttgaaagaatagtatatacatatgtttaagaagattggcctggctcagtggctcacacctgtaatcccagcacttagggaggccgaggtgagtggaacacctgaggtcaggagttcgagaccagcctggccaacatggggaaaccccatctctactaaaactacaaaattagctggatgtggtgatgcatgcctgtaatcccagctactcaggaggctgaggcaggagaatcgcttgaacctgggaggcggaggttgtggtgagctgagatcatgccattgcactccagcctgggcaacaagaacaaaactccgtgtcaaaaaaaaaaaaaaaagaatattggaaatatcctgataggtacatctgtgtgaatatacctgtaaggtaactgaagtggaattggtggattccagtgcctttgaaatttgatagatgtttccagattgcctccaaaaaagatgaagtaataataaacttatatcaccaggaaacaaaaagtgcctattcctccgagtgcctatttcctcctaccctaattaacaccagtagccaaaagttttttttttttttttttttgagatggagtcttgctctgtcacccaggctggagtgcaatggcgccatctcggttcactgcaacctccacctcccaggttcaaacaattctcctgcctcagcctcccaagtagctgggattacaggcacgtgccaccacgcccaggtaatttttgtatttttaatagagatgggatggccgggtgtggtggctcacgcctgtaatcccaacactttgggaggctgaggtgggtggatcacctgagatcaggagtttgagaccagcctggccaacatcgtgaaaccctgtctctactaaaattacaaaaattagccaggcgtggtggcaggtgcctgtaatcccagctacttgggaggctgaggcaggagaattgcttgaactcgggaggcggaggttgcagtgagccgagatggcatcattgcactccagcctgcggaacaagagcaagacttcgtcacaaaagaaaaaaaaaaatagagatagggttttgccatgttgcccaggatggtcttgaactcctgacctcaggtgatccacccaccttggcctctcaaagtgctggaattacaggcgtgagccaccactcctggcccaaaaatgttttatcagatttttgtgatcatttgttggtgttcctctcaccggtttgtaagagctctttttatattatggaaatctatttatagcctaccgatttgaaatatcatttttattttataccaaattctgatatgtcctttagaagtttgaagttttcttttttaaggtgcttatggaatggctagttctagtttttgaaccgttaatatggtgacttgagttactggatcacattagattggatttcctaatattgaatcatccttttggtccagcaatggatcccacttggttatgatagactgttctgttaatgtattgctggattgtatttgctaatctttttgttcaggattttggaatcagttaaatagtaaattggtttgtctttcttttttttttctgtactatccttttctggttttactatctctgtcacagtgttctcattttttagtggaagctttccatttctctttgtgccatggatcaatttaaattagattggagttacttgtctcttaatgcattagtatatggcacctgtgaaatatctgaccataatgttttatctaattcagttattcattatttcattcattcatatattttgacaatagaccagttctcagacaacattcttcatttggtgtatcggtttgattttttcttttctttctttctttctttctttttttttttttttttttttttttttttgaggcagagtcttctgctctgttgcccaggctggactgcagtggtgcaatctcaactcactgcaacctctgccacctgggttcaagtgattctgctgcctcagcctccagaatagctgggatttacaggtgcctgccaccacaactggctaattttgtattttcagtagagacgaggtttcaccacattggccaggctggtctcaaactcctaacctctggtgatccgcccgcctcggcccccagagtgctggggttacagatgtgagccactgctcctggcctggtttgattttctgatacccctcaggtcactttggatgtatttatgatcttctgtgtaatcattgatttcataagagttctacatagaattaaggaaaataatatcttgtactttaatatcttttggttctattattttttttcttcatctggttagtccatgttgtttttctgtattctaatttctgcttccttggtactttgctttagtgttgtttgctgctgctgttgtgaatttcctgagttgaaaacttggtttctttttattctttcaaaaattcaaggctattaattatcctctttgcattgtgttagtcgcatgctgcagattctcatctgcattatttttatgttatagcttgatattctgtgatttcagttttggtttcattttttatctaatatgtgttgagattttttttattgtataggtgactgggttttaaattttttatttttgttcatatttagttttattacattgtaatcacagaatgttttgtagtacttgtattttttgatgttttctttgtggtttaatatgtagttgttttcatgaattttatgggcatttgaaaagaagatgcattctgttttcaggggataaagttaaatgtatttgtccacttgatctgtcttgggctgaaatcagtgaattgaaatcttttactatattgtgtttattttttctttatttccccttttttggttctgcaagtttttttctgtacttaactatttggtacataaaaattcaagttaggtttttattttagttgtaccctgtttaaatttcagggttttttgttgttgttgttgagacagagtcttgctctgtggcccaggctggagtgcagtggtgcgatctcggctcactgcaacctctgcctcctgggttcaagtgattctcctgcctcagcctcccaagtagctgggattacaggcatgcatcaccacgcccggctaatttttgtatttttagtagagacggggtttcaccatgttggccaggctggtctcgaactcctgacctcatgatcctcccacctcggcctcccaaagtgctgggattacaggtgtgagccactgtgcctggacaaatttcggttattttaccttgcagttaacctcgtttaatattgtgaatcctactctttctgttcgcttgctaccttttgagttttcccattccttttccttcaagctttctaaatcacttgattttagatgcttttcctcagtgtagtctaggattgagttttgctattagatttggtatcattgtttcctaataggtgaatttaacccactttcatttactgaaaatgacagatacaatcttatctattattatttcatattatgctttctgttttaaatgaatcctttttttaaccttctgctatagtttaaaattttttggtgtgtttatgtttgttacataatttttaaggttttatttatttacttttccttttttttttttttttttttgagttagagtctcacactcttgcccaggctggagtacagtggtgtgatctcggctcactgcaacctttgcctcctgggttcaagcgattcacacacctcagcctcccgagtagctgggattacagacatatgtcaccacatccagctaatttttgtatttttggtagagacggggttttgccatgttggccaggatggtctcgaattcctgagatcatgtgatccacccgcctcagcatcccgaagtgctgggattacgggcgtgagccacggcgcccagcccttaatcctacatttaaataggattcagccaatcctattacctgttccagtgtctttattaaactcttggactttattaagaatagttcatggaaactatattcccatggaaactatccctttgcatattggaaaatatttttcttttgcccttatatttgaatgacagtggctagatataaaataggtatttaatactttttccctagtgattttgtacacagacctgatattaaatattttttgtttgttttttattttttggagatggagtctcactctgtcgcccaggctggaatgagtgcagtggtacaatctaggctcactgcaatctccacctcccgagttcaagtgattctccgcttcagcctcctgattagctgggattacaggcacatgccaccacacccagctaattttatatttttagaagagatggaatttcaccatgttagctaggctggtctcaaacttccgacctcaggtgatctgccctcctcggcctcccaaagtgttgggattacaggtgtgagccaccgtgcctggcctaaatattgttttagagaagtttgaaggcagaccaattttaagattccccccttaggtgaattgatttgtatcaggagaaggttgtctagatcagcagtctccaacctttttcacaccaaggaccagtttcatgaaagacaatttttccacggatggggtggcgggggagatggtttcaggacaaaactgttctatatcagatcatcaggcattagttaaggagtgtgcaacctagatccctcgcataccatagggagggataggtttaccatagggtttgcgctcctgtgagactctaatgctgctgttgatctgagaggaggtggtgctcagatggtaatgctccctggagtgccactcacctcctgctgtgtggcctggttcctgacaggcgatggaccgattctggggtctgcagtccaggggtggggaccctcatctagatgaccataagatgctttatcaaggtgtatcctggttttttatgtttttgttttttgagggggtctcgcactgtcacccaggctacagtgcagtggcgcgatcatggttcactgtagccttgacctcctgggctcaagtgatcttcccaccctagcttcctaagtagctgggaccatgggtgcacactatcacacctggctaagttttttgtttgttgttgtttgagacaaagtctcactctgttgcccaagttagagtgcaatggggcaatcttggctcactgcaacctctgcctcctgggttaaagcgattcttctgcctcagtctcccaagttgccaggattacaggcatgtgccaccaaactcagctaatttttgtattttttgtagagagacagggtttcaccatgtaagccaggctggtctggaactgctgacctcaggtgatctgcctgcctcggcctcccaaagtgctgggattacgacgtgagaccacacacctggcttagttttttaaattatttttggtagagatggggttttgccatattttccaggttggtctcaaactcctgggctcaagcgatcctcccaccttggcctcacaaggtgctgggattacaggcatgagccactatatccggccaagatgtatcttgttgattgctctacatcagtttttttctgagtcacagtgtgcccttaccacttgcaaattcaagccttccctgatttcaggaaagttgtcttctattgtgtatttacccttttggttgttctgtttctttttctttttagtataccccttaccccggtatagtttatgttcccttttttctttgttatttgctattttctctgtaattatttgcagctttgttcttttttttttttccacttgatttttctcacgtttgttttccatgtcccatgctgcattgtttcattaaatatttatttggcattgttttagttaggcactgacagtaaagcagagaacaaaacagacaataatccttgacctcacgaaacttatttagtgggagaatcagacaacaaacaaaatgtagtaggccagaagtaatgaatccaagaaaaataaggccatgtaaggaaggtgggacgagaattgtatttttagaagggtggtcagaaatgggcttactgaaaagtgatatttgagcaaagacctaaagagatgcacgtatttggggaaaagcatttgaggtagaggaataagtgtaagtggtttgaggtgggagcatagttcttagaaggatactcatttcatcatagggccagtcctctcatgacctcatcccaacttaatcacctgccaaagtccccacattaagtgtttggacttcaacatatgaattatgaggggaatgcaaacattcaatcccataactgccatattttctttgattaatttgttcatagttttcatctgcttcatggtataagttttatggcattttctttatgacatttggttatactcttgcttttctgtttttgttttgttttgttttgttttttcttgcaaaatctttgagtaagacctaactggttccttcttgattattggtcatctttgaactggaggtattcgtcttagatcagctatttacccaagaataaaattgtgggaaaggggccagaggagtggttggggaaggctgacagcttgaattttcccaggttcctttggtggcatgaatcagtgagtaagaagcagagctccttatatcacaggtttattttgtttaaattgataaacactgattcatattagaatcacctggggaatccttacccatgccaatgaaatcaaaatctgtgagagtggggcctaggtatataggttttaaagtgcctcaggtgattctcatgtatatccaggctagaattgctgatttagcctttacttttagctatccaagatcaactgatgcttggctacatgcaaccaaatttcacttccgccttaccatacttaaacagcctgctgcttgcaaaaaatggcaggtgtaggtgttcacattttccttaatatgtcccaccttctcccataggccactcatatttcctgactttgtcataccatgcaagggcttgttggttttattttaggtcaccttttttagcgagctatgaactgtacctactctggcccacagaggagttatctgctatgcctagcttaggatggttctattttttttgaaaattttattgtgaaattataatatagaaaatgcataaaatgtaaataaacatccatgtaactattgccgaagtatggaaacagaatgtttaccaggacaccaaaagcctttttcatgccgcttctcaggcacaaatctgtttctccctctgtaaagtaaccactatcctgacgtagctggtaatcaattccttttcccctcattcttctcattttcagggtaatggatgtttcctagtttcatcaaatgttttccttgttttcagaaaagagagaaacaaaaatgcctttattcttctatctataactggaagcagaggactattgagattgccaatttaagtttttggtgttttttggggtttttttaaacagatgaagtcagagatcattatagctaatgccatactgactggcagttcagcatgcagtaccctagcacaaactattagccgggcttgatttatagttatcagtagttctgaatttatgagacaggaattttaaacttccatttctcttcaaacaatatggcactagatttttcaatacagatgaagaataccaacagtgtatacattaatcactattttgggtatccaagaatgtaaatatataattaagttaattaacttattttttttttaggaatatgaagccatctacctagcaaaattaacaatacagatgatgtcaccactccagatagaaaggtcattatctgttcattctggtaccacaggtaaggatttttttctttttggagaaatttgggaagaaagataatgaaaggtggagaacttgctacaagttacactkaacaatttaaattgtttagaaaacttgttaaactattgagctaattccagaaggattcattttataatgaataaatgtgtactataataagcttaagtctttcaagtagtagtacatccgtgttgtaaagattaaaataatacgaatctggagaaggggccctaaacacgcttaggtgatcttattaaaagtagagggcggttaatacagcgtgtagcatggctaatgtgagcttctttctcttgccatcaatatttccatcctttcctccctctgttgctatttcagaagtaccctaagccccttattttcaaagttaatccaagcatgctcttaaaatcttcctttcccaagaccttgctacctgtgtttatcacctttgtttctctcccaacaaagcacacaaggcatttttactttatttccagtttttcctaccctgcagttcacttcaatctttgaaccaacagttatataaggtagtaagaacagcttatatacttagcactgacctggaaattgaggacaggtgatctgatccacaagtatagaactctttgcactctactgcactgcccatagtgagtaatatgactgtatattcatccccaaggctcaacttcctaattgtcattgactttttcatttcctttgccacatctgtctaataattgctctccacatcctatagggtccgttttgtcagtattgttaacattccttcctttttttaatagtgaccttaatctagttcaggtccggatttgcctcctttccaaactcttgttatttggtctgttctgtacattgtggccagacttattcccatgaaagatatttctaatattgatatttttcctttgccaaagcctcctttggcttcattcctacaaaagtttatagaatgccatatgcccttctgattttttggtttctttctctcattgttcttctttatgtctgcatttcagaaaacaactgctgatggtttcctgtgtgtgtcttcttttccccacctaaaatgcatcacatttagtctccctattcttggttcatatgtcatctcctcaggaagacatgatgattaatgcactcttcctctaacccctagtcatttggagttcccatagaagcacagcacttcatctgaaacttaatcacagtatctgggtttagcctgagggctaggatattttatctcattcaattgtattgatactatatttttatctttatgaattttatagtgaaacattcttcaattagaatatgccctctgaattaacattattattaccatgatataacagtcctgtagggcataagtttaaggtcatgccattgttaggcaaaaaacacagcagaccctctgctggtttaactgttccctaaagttttcctccattgagagtctaatttcttgattataacttttggggatacagagatagctttgattctatgtgggagatttctgtactagcagatgctggtatgaagaatagataaaagaaaatctctttatatgctacatgccttcctttctcccaacctagacttcgatagcttgagtggaaaaatattttcagctgctcttcataacagcctctgtgaaagcaaaaagattatctacaaaaaattatacaaatacaagattaatttcctaaattttatgccctaagtcacatgtttatggtgcctaaaaaacaattaacttgataactaaacatttatgtattatctcttgaaaaggtctattttcacactatttcaaaaattatttattttatatgcaatacctaagacataatacttgagaaggaaaatatatcctgtcatgaagattaaaaagttataatatttaggtaatttatcacaaaggaatttactaaattttgctatatcagttgtggaattttcatagtgtatacatgatcacttaataacaaaattttacttgctgtaaccttttaacatgaatttattttagtgcccttttaatcttcatgcaataacttttaggcagtttgaagagaacacatgaagaagaggatgattttggaaccatgcaagtggcgactgcacagaatggctgacttgaagagcaacatcatagagtgtgaatttctatttgggaaggagaaaatacaagagaaaattataatgtaaaatggtaaaaacataagtagtttttttttcaattacatgttgcttccagacatacttctctgcaacttgttgagcaacattttaagatgttggacttctgcaatagatgacactgatggttttactcctttttttaaaaacacatgcgcgcgcacacacacatgctttacaagttttattataaaccaagaattttggacttgcaaagaggtattattgcaataatgcacttttcatacttgaaatttatttgtatgatataaagttattactttaaacaaaatgcaagtatggggggattgtttataaagtttgggtaatttataacaaaatttgctaaggtttgctaaaaattcatttttctgttctatatattacatttttaacataattttacagttcaattttatgatggagcctcttacagaaacattaacaaaatgcaggaatctgccacatttcttttttagtataacttaatagcttaattaccattttattttttatacttcttccattattaatctttaaatcatgatcctaattagctgtccttactttaacttgatctaattattgcttcctttcttattactttcctaatttttctatattttaaaaactacagtttccatgataaaaggaaaacgttttgatttatagtaccaagtgcttaaacacaaggatagtgttagattttcgagtgactttcctttttgcattttttggcagtaaaagccaaacgttgtatttgttcttttcagagttgtccagcccttttttcctttgtccaaaatgattctaaatagaatctaataaaccaatgtagcattatttttttctaaatgaagccccaaaaaagaaaagtgccttgcatcatttaaaaaaaataattaaatcctcatggcctctaaattagtatgtagaacactgaaaagttcttaacatttttgtgtaatttcctttctttttaaaccataaattagtttaaactgaaagtacgaggctggaagaaatattagtaaattatttggaatatagaatgtttactctttctttttatgttgtcttaatgattctgtgagattgttccggctcaaacagaagcttttctttggggaaggtgatttgtgggagactctagtgtattttaaattagcattttaatccattcttgacattcagttagtccagatctgccccataatttgctttagtaaagtcactttatggatttttggctatgttttagtttgtgtgtataaaagttctaagaaaacatttttgctattttaagtatgtaagggaagagaggagtgtttttaactttttatagttgatgactttagggtagcacaaacaaaactcctttgtatctaacttttctcaatcctctcttgaggtgctttactaatgggaatgatttctgtatgttcccttggtaccaagaggtactatgcaaagtaacctattacaccaagttacttgctttgctttcctctctatgatgtgataatacagtaaaagctttcttacccagcatagtgggagagtggagattaattaaaattgttaattaagagttaattcctattgacccaggtgatatttctcttctgatttccctccccttcccttctcttatcttaccactgtgaaaacagcatattgttaatctcgttgtcgtccagtattctgctttgtgattaggtcttttgatgtacagtggtctagtggagtcaagattcgcattgggttttctaaaattccagttgataaaagttccagataacacagctttcctgtatatagatcactattgggcaggtcagcaaagatctcttacagtgtaataataatctatgatgcttcatttagcagaaactctgcttaaaagaatcttcataatagtaagtttaggttttaaaaacttgtttcataaatatacatatatcctctctagtagtctggccaaaagaacagattttgttattgataatttgtagctggtaattttccacattttctatccactgtaatttttatgttgtcactgaagtgcctgcccagtactgtatattacagtctctcacaaacactgggaaaagggactgtcatcatcttgagtactctgtgtgtatatatatatatatagatagatagattttttttttttttttgagacagagtctctaatgtcacccaggctggagtacagtggcacaatcttggctcactgcaacctccacctcctgggttcaagtgattttcctgcctcagcctcccaagtagctggggttagaggcacatgccaccatgcctggctaatttttgtagttttagtagagatggggtttcaccatgttggccaggctggtctcaaactcctgacctcaagtgatccacccacctcggcctcccaaagtgctgggattacaggcgtgagccactgcgcctggctgagtacaatattaatgtagacaaaccatgaagtttattatttcatataagaacattacaggtttgttttttcttgcatgtctgtccacctaatgtttaagtagttctggtagctcttcctattctttattctatttgattccatttctgtgattcttttattaccactgatgttttgtgatagttaactatgataaatttaactgatcatgatttatcttctagagtatttaaataatgtatgagtgaccacccaattccaacattaaaagtgtaatctgggcccataatttatagtgaaattgtatcaaaacatagggaaactgtattactgtccattttgaaaatatgaaacttgagtattgaaaatattcaaacatggaatggcagtattctaatttcagttagttggttcatgttaatttcttacctgttagatgtttaaactgcagtgacctttacttgtatctactctgtggtggaaatgttaaaccatgatagcttttgctaccaactcaaccacttaacttttagagcagttttggggagagtttatgcttcatctgagtttagaagtaatgtcagaaaatgttaagcatgtctgtattaagaaaatataaggtttctaattgtcttattaatatggtaattcaagtgaattagaaatatttaactgcaatcttgaattataaagttgagatatatatatatatgtatcaagatctcaacttgatgtaaagtaaatgagcagttacctggcggatttttttttttttaaataactgatttaatccataatcccataacaaacatagcttcacctcagtattttctttctttctttgttcaacagtgctccgataagggaatgctagaaaatagatgagaagtactgaaagacctttttttttaattgattagaaaagtaagtctctagggtctttgaatgctggaatttttttttttttttttgtctttcccatctgtggcagctaaaacaaaaatcactcaaaatattcaggtttacatgttagctctctctcatagggagctgccatacctcacagttcaaagtgtattctatagatcagtaacattatactgacatgtaattgcaatttactatgcagcaaaaatgattcaagaagaaaaataacctacagtgtctgtatacctttgtatacacaattgcttaagttactctgcttttaacatttgtacttggataaaatgcttatgtctgtataggaatgtcacagtgcaagatgctgctagcccaggcacaaagtattaaaattattttgtgaagattggtggttgtattaaaactgctgtgccattatacctccaaaatattgaaaagctcattcatactgctgcttatacctcaaaacttctttacttagattgttatctgctgggtaaaagtaacccaaatttactctgagttaagaagagtggatgaacattgaatgttgagaagcacttaagagtatactctaaaacactgtggttacacacacacacaaaattatggtctgtagtccaggcaagcctcaaattccagctcaagtttatttttaaggattagttgagcaagtttggagttggaagtgagagaatcgtgtttaaaggaaagggtaggtcatccacagaacagctttcagtcattacaaaaaaaaaatacttcttgcttttatattaccatcttcccccattaggcctacctgcatactgtgcttcatcaaatctaagatcacctcacaactataccattattttaggcaccactaaaagacagtgtattgctaacaaaactatgataaaccattgataatatatccagatttcagagatgttacagtgcatcttagttgatgaaacaaaaatatacaaaacatgagacacagtaaaaatgataagtaccacctcattataccttttcacaagcaaatagtggccaaagatgtgaacggccagacacggtagccgacatatgtaatcccagatactctggaggctgaggcagaggatcacttgagctcaggagtttgagaccggcttgggcaatatagtaagaccccacagaaaaatgtaaagccaggtgtgatggcacacacctgtagttccagctactggggaggctgaggcaggagggatggcttgaacccaggaactggaggatgcagtgagctatgatcacaccactggactccagcctgggtgatggagtgggacagtgtctctttaaaaaatgtgggccaggtgcagtggctcgcacctgtcatccaagcactttgggaggctgaggtgggaggatcacttgagcctaggagttaagagaccagcctgggcaacatagactccacacaaaaaatttttttaattagctgggtgtggtggcatgcacctatagtcccagccacatgggaggctgaggtggaaggatcatttgagcccaggagattgaagcggcagtgtgtggtgattgtgcccctgcgctctagcctgggcaacagcgagaccttgtctcaacaacaacaacaacaaaaggctatctattgtgggtacactgcctatggggtagtcctgctccacaaggagcagtttttaaaaaaaaaaagtttaagaagtgttttatgtagcacttttttcatatttacatttactcaccatatggcttcaaaaatcataaacatactcaactaaaattacagatcaccattgtcctcaatgacacaatttttgtatggtgtaccttacctgtaattctatttcctatgggaggatttaagagatatcttaggaacactatttaaagggatttactgaagtgccaaccttgtgaatgattttacctcaaattgttcagtggtaagaaaggtaataaagcatttagttgtgcctttaagtaggctaattttttttgttttgttttgagatggagtctctctctgtcgccaggctggagtgcagtggtgtgatctcagctcactgcaacctttgcctcccgggttcaagcgattctctcgcctcagcttcctgagtagctgggattacaggcgcatgccaccacgtctggctaatttttcttttttttagtagagacagggtttcaccattttggtcaggctggtctcaaactcctgaccttgtgatctgcccacctcagcctcccaaagtgctgggattacaggcgtgagccactgcacccggccttaccaggctaatttttaaaaacatgcgtttttaattaccaggatttacctgataaaactactctttgtcaaggttgtaggacttctgaaaagacagaactagctttgttgcgtttcacgaaggacagatcagttcgtctgtataggctataagcaggtaagtagtgcactctattggtgaaggatttctgttgttttggaaagccaactatagctggctgcatggagggaaatccaaaatccagatgacgtggtgtgagtcaatgggatgagaaacactggtattttctttacaatttcattttacaaagagcacattaaactaaaattttatgaattatgacttaatctaatagttcaacagcagactcaagaaaagcacagatgtgattctaacagaagactactcatataaacaggtttaatgcaacatggaatgcaaaagattagaaccattaaaatatttaattcttcaactttaaaaaattaaataaaatcaaaataggataatgaccagaatagtgccattataatcacatcaaaaagcttccattaacattttatgaatttggcaatctagtacaatacattaagtattgtgtttcactcaattttgtgatactccatttttgaaaaaacttagaggcttcagatacccatgaaaagaaaaaaatcagggtagaaac

SEQ ID NO: 97278 - DNA, 13111 bp, Homo sapiens
ggaggccaaggtggctggattacctgaggtcatgagttcaagaccagcctggccaacatagtgaaaccccatctttactaaaaatacaaaaattagcatggtggcacaggcctgtgatcccagctactcgggaggctgaggcacgagaatcgcttgaacctgggaggtggaggttgcagtgggccgagattgtgccactgcactccagcctgggagacagagtgagactctgtccaaaaaaagatgataattttttattgataagaatgtaggcaataggctatttcccaacatcgttagtgggaatgtaactggtacaggttgagcatccctagtccaaatatctgaaatctgaaatgctccaacatctgaaacttctgggggctgaaatgacgtcatgtgatgtagccaatttccttgaaaactgatttatcaccctgagtcaagatccatcttcagaattctgtatactgacaaatatagaaatgtaaagattttattttcaatttattggatggattaagcacctcagcattccttactatgtgataaaatacatatataataaaaagtatattcaatattttgtccttaaacattatgctgcatagttgttgaaacagttctcattttgtaatatttaatcatatcagagcccatcaataaaaaaaaaagagaaaaatgcagccattgttctggcagggcatagtggctcatgcctataatcccaacactttgggagactgacacagaaggattgcttgaggccaggagtttgagaccagcctgggcaacatagcaagactccatctctacaaaaaaattttttttaattagctacaaaaatttttttttaaattatggcacatgcctatagtctcagctacttgggaggctgaggtgggaggatcatttgacctcaagagttttaggttacaataagctatgattatgcatgggtgacagagcaaaactctgtgtcaaaaaaagaaaaaaaaaaaactttgtggccgggcacagtggctcacgcctgtaatcccggcactttgggaggccgaggcgggcggatcacgaggtcaggagatggagaccatcctggctaacacagtgaaaccccatctgtacgaaaaatacaaaaagaaattagccaggcgtagtggcagcctcctgcagtaccacctactcaggaggctgaagcaggagaatggcatgaacccaggaggcagagtttgcagtgagccgagatcgcagcactgcactccagcctgggccacagagcaagactctgtctccaaaacaaaaacaaaaaaaaacaaatccaactttgtttcatgcacaaaaatgttaaaaatattgtataaaattacctttaggctatgtgtatgaggggtaaatgaaacataagtgaatttcatgtttgcacttgagtcctgtcctcaagatatctcctttgtatatgcaaatattccataatccaaaaaaatcttaaatccaaaaacgcttctggtcccaagcatttcaggtaacggatacttaaactgtagagactttctggagaacatatgacaacatgaaccaacatttataaaaattcgtgttaaggaactaagtgcagaagtatgtagggatacacagggatgttgagtacacactgtttataagtttgagaaactgcaaataatcatgatgtttataaataggtcactggctaaataaataacaaagctatacttgttgacaatgatgtctacaatatagtaaatgaaaatgaagaggctgggcacagtggctcatgcctgtaacccagcactttgggaggctgaggtgggtggatcacttgagcccaggagttagagaccagcctgggcaacatggcaagaccccatttctacaaaaaaaaaaaaaaagtacaaaaattagctgggcatggtggcacgtgcctatagtcccagctactcagaaggctgcggtgggaggtggacactgcagtgaggcgatgattacaccacagcatagatattctctatggggaatactttagataggcaacagagcaagactctgtatcaaaaaaaaaaaaaaaagaaaaagaaaaaagcaagttaaagaaaatataaataattctatatcttgtaaaaagtatgtaaaaatgaaatcctagaaagatgtatatctcaacataaacagtgagctatcttagggtcatggaattgagggtaaacatctttgttttcttttttcttttcttttcttttctttttttttttttgacaaaggcagggtttcactttgtcacctaggctggagtgcagtggcatgatcacaactcactgcaacctccatctcccaggtatcatatgattctcctgcctcagcctcccaagcagctaaaactataggcatgcaccaccatgcctggctaattttttttttctgtagagatggggcctcctaactttgttgcccatgctggtcttgaattcctaggctcaagccatcctcctacctctgtcccccaaagtgctgggattacaggcaggagccaccacacccggccaacatcattttcttgcctgaaatttttttaataagtatatacttaatcaggagatattaaaattaaaattaatacagctgactgtattaaccgtatgggagctgacctcccagaatatctaagctcactttctggttgtacatgtcttttcttttttttctttttttaattctctttttgaaatggagttttgctcttgtcgcccacgctggagtgcagtggcacaatcttggctcactgcaacctccgcctcctgggttcaagcaattctcccacctcagcctcctgagtagttgggactataggcgctggccaccacggctggctaatttttgtatttttagtagagacagggtttcaccatgttggccaggctggtctcaaactcctgacctcacatgatccacccgcctcagcctcccaaagtgctgggattataggcgtgagccaccgtgcccagcctctggttgtgcacttctaatgataagtaaacttcaggaaaggcatctcaaaaagagttttcggtcttaagaaactttcactactcacagaagagtttactcaaattgaattcaaacttttattatttttctcacttaaattattcttaatattaaaattccaggaatttgccaggcacagtggttcatgcctgtaatcccagcactttgggaggctgaggcaggaggattgcttagaccagaagttcaagaccagcctgggcaacataatgagaccacgtctctacaaaaaatttaaaaattagttgggcatagtggcgcatgcctatagtcccagctacacaggaggctggggcagaaggattgcttgggcctgagaggttgaggctgcagtgagccacaatcacaacactgcattccaaactggtgacagagtgagactctgccaataataataataataataataataataataataataagaataataatattaaaattccaggaattcaattttgaaagagctgcttctttttgagagggtaagtagagtgggtaacataatctgccatacagctatgtatttccattattttaagcaggaaaaaaaaaagcttaaaaatagttttaagaatctctaaacagtattattaacacaaaaacaacaacaatgaattagacttaagtttaatgttttaccccatacctttaattctagtctaaaaaagatcactatttgaggtacaatagaagtctctaatctacaagcacatttgccccatcttctattaataataagaacatttttactctgcatagccaaccttatatgttatattctggcagttttcatccacagaagcgttaaggataggaaactgtagtaatcccaaggaagcagcctgtttaacagaaaaagaatgcaattttagtacttttaacttagaaaggatagagaatttgaaacaataagaggtataaaaggagggagagagagaactcttatttatgctgagtttaatttcaagtctacatgtacctagtcacattactgccaatgttaccttcaggccatgtggaactaggtcaccctaatcattaaagaataaaagataaagtagtcaggtagcttgtaaacatcaaggagattttcaaaataatgatacagaccagccaaagttccaaagaaaatgtctaaattctaggtgatttcctcactgacatgttgatcttaagatttccatgagaagtaatactaggaatcaaaacacaaaaaaagcaggtaagctatttctctgtgtggaaagaacacgtaacgaggatttcaaagcgcactgaccagtagatgccagtttgctacttggtgtccttggccagctgaagggcagagatgtcctgaacatttactttacagctcaagtctcactgaatagcatttatattttccctctctgctgccttctcccttttgtcacttaataccatttctctcctgtccatattcagatttccctaactgtacccaaaatgttcttgataatctgtttttgggatctaataatcaagtttcataccttacatgtggtggccatgcattgtattgaatttaaaagatagcaaaataaaaatgcttaagatcattcttaaaaagaattccctcccccactgcccttgtctggtccctgttaaagttctttacatgcattgtgttattcttctcagtgcatcggggtcttgatgggaaaaaaatcaaattcttgaactagagagttaagaaaaaagtttaaatatatagagacatttcattttcattagttaggacaggttaagagagtagatcaactgaagaaaaatataattaaaagaactgctacgagttccttaatttttatgacttggaagtttttcttgtttgtttttgagacagggtctttctttgtcacctaggctgcagtgcagtggcatgatctcagctcactgtagcctcaacgtccttggctcgagtgaccctcctgcctcagcctcccgagtagctggaactataggcgtgtgccaccatgcccaggtaacttttgtattttttgtagagatggggtttcaccatgttgcccaggctggtcttgaactcctgagctcaagcaatctgcctgccttggcctcctaaagtgttgggattacagtcgtgagacactgcgcccagccaacttgaaagttttagtaagcatttgattcaataactgtaattttaatagtctttatctaaaaacccctaaggttagtctaaactgttacatataaaaatatttgagtataatccaaattttgtccaagaaaatacaaggtatgtgtcaatggattaggtcatttgttccccctctacaatactgtgtagtattttttcgaatgttctgaaacttatgttttattttaaaacaaaatagccaggcatgctggctcatccctgtaagaccagcctgggcagcactgcgagacacatctctactaagaataaaaaaaaattagccaggtgtggtggtgcacacctgtggttccagcttctcgggaggctgaggcagaggatcacttgaacccaggagttcaaggttgcagtgagctgtgattgtgccactgcactccagcagcctgggcaacaaagtgaaccctttctaaaaaaaaaaagaagaaagaaagaaaaagggagataaagaagaatagtttctgcctcatgaggctcagcgcccagtaagtgagtaagtgaagagaaaactgagtaagcactcaatgcactgagataagttaacagtgggaaacaaaagtatttaattcaaatagtgacagccacagaaggagtctgtacctgaccacagtttgggatttgcaggtgtttgatcgagaagaacgggcacttcaggtggaattgtgtattccagcaattatgggtaccttaatatgagggagtgaggtaagaatggagaggcaggcagcagagacttataacacatttgtatgccacactaaggagtatggcatacaaattatcctgaaggtaatgaaagggaaccactgaaaagaatcagagaatattacagtaatttgatttacggaagaccagtcttggtgcagtgtagagaaaggactggacatgttggcattacagacatcagtatgtccttctgagtaaaacagaccagaacctgaaagagcttctccacctgttagctgtaagtccttaacaagtttctcaacctctctgagccccaatttccttaaatggaaagtggagacagtaatgtttacatgtcagggttactctgagaattaagagataatgggccctgccccgcgtctgcctcagaggggcccgagccacccggggcgtgcgccgcgtccccgccggggccgacagagccgagccgggccgccatggaccacaagactctgctgcaggagcggccgcccgcctacaacctggaggccggccagggcgactacgcgtgaggcccgcacggctacggcgccatccccgccgcgcccccgcagccgccctactcctacctcgtcacacgkacacccacccaccatcccagggtctacaacatccacagctggaccgtcatccgctatcctaccaacwctatcgtggtcgtgggaggctgtcccgtctgcagggtcggggggctgcaggactgcttcaccttcctgggcatcttcctggccatcatcctgttcccctttgggttcatttgctgttttgccttgagggagcgaagatgccccaactgtggagccaccttcgcttaaagggaacaccaggctcggcctttcctacacccagctctctttttctaatgtaaatgttgtgttcaatagttttatttgattaagcttcaggactgttttgtaaagcgaggtgggaccgatgtggcacacgccagctgcggtttcccggagcgtggagaggcagcgctgctgctcctgccccaggctcatgacaactcaatgaagcactgcttttattttttgcagtcttcaatttgagaaaggtgagaaataatcttttcaataaatgagattcataccaaaaaaaaaaaaaaaaaagagagagataatgtatacagcatgcttactatggaggctggcacatggtagctgctgcacagtcactaatgtgagctagactgtatgctgctcaaggttagctgatggtcttactccattttatactggtcccaaggcttagcactagaaatgattcccaggatcctcaatataagttggttgagtaaatgaaaataaatattaaatatatgtcagtgatattgcaaaattaatatcaagtctcattttagttcaaaccaagacttggttggagtgatccttttaggatcagaggctttacttaactggcagaattgtctctacctagctcaaagataagcagctaaaaatatagtacagaaatctcaattttataatttcctattgaacaaagaaatggcacattttctaactatctgatgttgcgaaaagtaatatttttattcaaggccacagtcaacatattgcatgttggcaaagcaaaatttaaatgtcctacttggggccgggtatggtggctcacgcctggaattccagcactttgggaggctggggcgggggtggatcacctgaggtcaggagttcaagaccagcctgaccaacatggcgaaaccacgtgtctactaaaaatacaaaattagccaggcgtggtggcaggtgcctgtattcccagctactcaggaggctaaggcaagagaattgtttaaacccggaaggtggaggttgcagtgagccgagattgtgccattgcactccagcctgggtgacaagagcaaaactctgtctcaaaaagacaaacaaacaaataaatgtcctactcaagccttgtttgaaatgaatgaatctcacctttaagaagaaaggcataaaggagagtttaattccacgagcaaatgcaatgggttttaattcttctcggagcttaaccagttcagtaaggtcaatctcatcacaataaccaaaatgaggtatcttcagggctgcagacatagtcttgaccattgctttttgaaagcctgaaaagcattaaattgttattcatttatttaaattctcaaatctcttcatcctttttttttttttttaaagaaactaaaatggaaggttctctaatgtcttttactctctcagttaaacccttcctcttactactctcttcattacattacactgaaagtcactaatttcaaagctggaacactgactgcatcatgacactcagtggcaaatgcaataacatagcaggtaactgctttaaatgctgtgttatataaaaaattcaaaagaatgcaagccatgtatttccctaacagctttcctgcaaagccactcttctggaagttaatcattccaggagtttataaataacaaatcagaactagttattttgaaagctaactacaaatagtgaatgtttaaaatgtcctgtgtgtcttcaaacagagcaattatcaatatacaagtttatatttcaagaaacctgctaacgtattactcttcagaagataatgatacacataaattgtaagtgtttcctggaaaagctatgctatttcaccatttaaaaattatggccaggcgcagtggctcacgcctgtaatccctgcactgtgggaggctgaggagggtggatcacctgaggtcaggagttcgagaccagcctggccaacatgatgaaaccctgtctctactaaaaatacaaaaaattagctgagcatggtggcgtgcacctgtaatcccagatactcaggaggctgaggcaggagaattgcttgaacctgggaggcggaggctgcagtgagccaagatcgtgccactgcactacagtctggacaacaagaacaaaactccatctcaaaaaaaaagaaaagaaaagaaaaattatatgctgactgaagttgaactttcccttcagtaagacttgaaaacaccatattatatacatttatctactgaggtagcttcccccaaaataaatgaactattgccttatagtattgttattattatcattaccttttatgggttctgttttgtctttgcctgtgaataccggaggttttgatactagtataggaacagtcatgtcttttggctttggtggaggtggcataatttcaactttgggtgaaggaggcaatatagctcctgtctgcttttccaaatagttgaggatatcttctttaagtattctgccatcttttcctgagccaacaacttcactcagcttaatctaaaaaatgatatattttaatgccaaaaatacaactatttaaaaacatcattaaagtttcaaaatggaatttgatcaactgacagtaaaatatatctgtccaataaattagtaaaaggaaataaccttttcattttctacttaagtaatcattacttttgtatatactgttcacatatgcatgtggtaaccatcaggtatctatattatatataatctagagctatttatgaaaacttactttttaaaaaaattttttgtagagacagggtctcactctgttgccctggctggtcttgaactcctagcctcaagctatcctctcacctcagcctcccaaaagtgctggaattacaggcgtgagccactatgcccagctgaaaacttacatttttatactcaagtattttaaaatctcttgcataattcttactcgaccttttctattcttggggactacataagaagagggagagctgagaatttaagagaaactaaatgctataccaaatttagaccaatgtttctgacactggctaccagttaaaaacgtaacaacttaaataatcataatacaaaagctctctcaaattagttatttttctggtagttgctttggaaagatcagtacaaaacatttaattctatttaaataaaaataaacataaaagcttggaatgatctcctcatatatagtatgtattaatttcttagggataggccccatttcatttgtattagtgcatctctaaggatgactaaaataataaaggactttactaaggcaaacactaagtttgtaacaaatggactatgaaaatttaaacaaataatttttaggcagttacaaacaactgtaaatgccactggttcttaattttaaacaaactcaattcataaatatgcaaattcaaagaaaaaagatgatttctgataactaaatccaatatttaatttttagtaatcatacaagcactctacccaagtattctatacccatctttagggagtgttttaggaaagccaaatcatacatttcttctatatatttctttctatattattaagaaaaaaattattaaaatgctttatagatttcaaagcaaaatgttaaatcattatttcatctgatgcccttaataacctaatgttccacattactatatctattttctgttatgctaaatggtcttcatacttaaacacatttaagggttacataacattttatcaaggatacataacataatttgaatgcgtatgcatcttctaatttttggctatataaaatacaaggaagaatgattcctagattattttcttgggatagttccccagtggcaggataactggctgaaagaatatgaacattttaatgactctattacatatttcacaaaatataaacttttatttttttcccacagcaaccttacttttctcaaaaagagacaaacaaaaagtctcattgtggggcacagtggaaagtattcaggtttcagaaccagacagatttgtgttcaaatccctagttcagcttacttggttttagattagttaatcaacctgcctgcagggtccttgtgaggattacagataatgtgtctatagtgtctggcacatatgtgctcaaataatggaggcaatgattgttgaggtttatataacatctaacagcacaggttttggagtgatatagactcacttttgaattctggctcttgctatgttagctgtgtgactttagttacttaaaccctccaagtcttaaaatagctccttatcttacagggttaaatgagaatacgtaaatacctatcccagtgccagggagccaccctgcctggcattccaccttccattcagtcagtgactggcagaggaaatacaaaaggccggcctccttgcctcaaagcagtaattctgtggttctcccttgcaccctcagatcaggccagagtctttctttttttacttaggaccatggcaagctttgggacaggccagatgcttgataccataaccatgtctggccaatttcccttctcttctcttttttatctcgcttccttcagtccctttacaggttttccctccttcaaattcctatctcatgctgtgcctctagagcacctgacataagacctgttatttacaagtgctcagtaaatggtagctcttactgttattaggctctaagaaagaataataaaatcatactgctcaattgatagtaagtaataagtttacaacttctcatttctcccatgtatttttatgcaactattgcttttcagtagcaaatatcttcatgtttccttaatttcattgagctatttcatcatgggatagttggctaatttttcagagatacaaatgtacacttcctatacaatctcagacttaaatattaagagaacttacattgttttccattgccagacggcgaactgcaggagttgccagtgtttttcggccctttatctcttggtgtgtatgttcatcatgagacactgcaggagtttcaacaacatcttcttctgaatctggtaacaaggtaaaacttaacttcagttgaaaaaaaattttttttttttactaagatgtaaagtaaggccactaagatgtggcctataatatctaaataaattaaagtttatagtctaaatgtataaaagttgaactacttcagaataggaaaacacaactatcctaatggtatgggtagagtgggggggggtgtgtgccggtacctggtactttttaattattagtacctggtggatatgtcactcctgttgaaataatatagcagctacaagtttaaacatgagagttttcctcaagaaattttaaaatgtgttgtggctaggtacagtggctcacgcctgcaatcccagcaatttgggaggtcaaggcagaaggatcacctgagcccaggcattcaagactagctgaggcaacatagggagaccccacctgtacaaaaaatttaaaaattagctgagtttggtggcacacacctgtggtcccagctacttgggagaccgaggtgggaggattgcttgagcccaggaggtcgaggctgcagtgagctgtaattgcatcactgcactccagcctggatgacagtgagaccctgtctcaaaaaaaaaaaatttgtattttaaacatttttctaataaaattctcatttatatttataaacagcacggaataaggatcaaatgtaagataaattatatgaaagaatgggctgggcacaatggctcatgcctgtaatcctaacactctagcaggccaaggtgggtggatcacttacttgagcctaggagtttaagaccagcctgggcaataaagtgagactccctgtctctacaagtgaattttaaaaattagctaggtacgatagcacacatctgtggtccaagctacacaggaagccgagggggggagaatcacttaaacccaggaagtcaagcctgcagtgagacatgttggcgccacggcactctaggttgggtgaaaaagtgagacccagtctcaaaaaaaaacgcacaagaatcatataaaatctatgaaaatcttaaacactttcctgagatgatatagtacgtaaaagtttgctctgctttgaatagtttaagaaatgctgtggtggctgggcatggttgctcacacctgtaatcccaacactttgggaggtaaaggcgggagaattgcttgaggccaggagttcgagatcagccagggcaacat

SEQ ID NO: 97279 - DNA, 13177 bp, Homo sapiens
ccccaaggtcccagacaatacagaatctataaattatatctgtccactttaccactaattaagatattactatcaattgtattaattgtaaaaatgcttagattagcttatggaatgttggcttaagtcattaaataacattacaatgcttttattatagttttgatggtttgtaaatattgtttatactctaaccaaatttaatctggttctagatattattagaatttgatatctcatttaagggatattatagaaaaatcagtcacaacattgataaaaacttaaaactcattcattgtccattgaaagtcttgatcaaataagacttagacagatacacaggttcattttagttatacgttaaaggtaattaagaggactctcccattttcattttacttttgttcaagtttacaatcagaaagttatagcatttatgcactttcaagtttatatcatgaagtttattcattagaaaaactaattctaaccgtcttcatgtgcctcattgctacatgatataaactcattactcaggttctaaaataaacattagcttaattttccattttcatctaagattattatcaatgttttattattttataatgtgaactttatactgaccagtcatcaaggctgtgacaagatctttcaagttcgttttcatatttattcagtttatggaaaaataaattttaaaaacccaagttataaaatacaacaaatacagtgagcatttcgtagtgatctttaaaagtttttcttttattccagtgcttcgatgaagaagttatagtataactatacaatcactatagaagaaaaggcagaatagcaaaggcaaatttgaaccacattaacactacccttatattggtataatttgttaattaaaagaagatttataaattcaaaacgtatttctccttcacattgtcattttctgaccaaaaaaaagactaccacaaagaggtatttttttaaagtagatgggtaagaaaatttaaatgaaattagccctataactctgctttcagtaagagtacaaaagtaacccttatattgacaaatacggcataattccataggtcccatttgctcttcctctgttaaaaggaaaatgtgtagtatcatataaagtttatatgggttttatgttcagaatattgtagagattaagaaaaacctttgcctggtgggaggtaagattaactttattggtttgatttcccattattccaaatggaagactgttggatgatggggggtagctggggaaaggaaaaaatgccaggagattagaatgttgaaagaaagagaagttgagatttgaaactaatccattttttaaaaatcttacaaccaagcatggtagctcacgcctgtgggaggccaaggtgggatgatcacttgaggtcaggagttcaagaccagcctgggcaacatggcaagaccctgtctcttttaaacttagaaacaaacaaacaaacaaaaatctttttaataaaataaaggagccgggtacagtgactcacgcctgtaatcccagcattttaggaggccaaggtgtgaggaccacttgaccccaggagttcaagacaaacctgggcaacataccaaggtctcatctctacaaatattaaaaaataattagccacgcatggtggcatgcacccataatcccagatactccagaggctaaggcgggagaatggcttgaaccagggagttcaaggctgcagtgagccgtgatcacgccactactgcactccaacctgggcaacatagagagacaacccccaaccccaatctcaaaaaaaaaaaaaaaaaaattaaagaaaataaaatgttaaatctacacatccccatataatattcttctgttggagatttttttacaggttctttaaaaatcagtcgtaaatatcttttacttttaaatatgtttaattgtttcactataacaagctgcaatgtaaaaacaattcaaactccaagaaagaaactccatactatacggtagtgaaatatgagccagagaatcaataagaggatgctacactactgttgaagaccagaagttgatatctcctttgaaaagtatcaacagaagcagcattgatgcagggtacaaaagtactataataaagctggctgtggtagcacatgcctatagtcccagctactcaagagactgaggtaggaggattgcttgagcccaggagttcaaggccaacctggacaaaacagcaagatcacatctctttgggggaaaaaaaaaaaaaggtaccataatagtaatacttttagtttcagagttgtttaaaaatcttaattttatgtttagtaaagtaacttattcaagtttttttaaatatttactcttatgattgtaaaactttcttttatatttatcaatttgctataatatgaaatgatgtatccaccatttaactaaatcaagagatttattaaatgcagtttatcataaatcaaaaataaccattaatgaaatggaagaatctatttactttatcagcattgagattctatttacataatgaagagctatggataataaacagcccaaacactatctgcaaaaaaaccaatattccaatgattttaatatacatataactatcagtttctaggcttggatttaaagaatatgtgaatggaaagaagtaaattaacatactaatttattacagcttagaaacctaaatgaaatgccacaggccacaaaacaactgcttcgtattcaaaggcacacattcaatttggtagatcagctggacgcactgcattatactgcaggagataagggttaagtgacctggggatattgttctccagatgtctaaaaggtccatttttttattggaattatctctactttaaaaaaaaaaaaaaaaggaattatatctacttttgataaatacctagcttaccacacaattaataccttcgcccatataagattctacttgaagcttcgtttttgaaattttaggattgtagctattataaaaacaaaatttaagaacacacaacatgtacaatgggtcaagaatacatgccttagattctgatgaacaggacaagaaggttaagaaaatactataacatactctaagtttgggggtacattttagagatttttaagtgagaaatccaataaatctttaagcatttagctttccattattgcagcgcatgaaaagacttttttaaactaatttgtaatacacaatatattcactccacaaataactatgtacatatatatgcccacatcaatttcctactcttttaattaaaaatttatgtttcttttggtcataaaaatctggttttgggtgttttaaaagttcaaacagctattaagctatactttgctttggcactagctccccctccagaccaatgtactaatataacagcatttttaaaaataataagttaacagttttttccaatccactggcaaattttaagattcaccacttttaaggacactccaattgcgtaaaaataactggtaagaatttgcaacaaaacaatgcaggatgtaatcagaattagttttgttttgtttttttcgattccatacatcttaaacagaactgatttgtaggaaaacaacttcaggtgactttttaaattcaaaaatatcctcaaaatataacctatataaggccgtactttatggaaattattttgaatcactatcctattacacaagacactcttcaagttaactcacaacttgaccaaagatacatttttgcatctgtttctgcaatctatgcaagtttcattccagctgttcagctcttgaattcaaatagaattctcaatttataaggcagcaaaaagaaaatccatgtcttggaactacctttgtacgtgtcttatagcctattcatctctaactccctgcattttttacacactaaacctgtgaaatcacaattacaaatgcttgaattcccaccttttcaatactactgtagtatttacaaatcaagtaattaagattttctatacacataccagatttcacaaggacagcaaggtacagggccttattatttggcatagggttttaagatgtttttacagttattttaaagagcagagactacaactccattatttctcatatatctgatatactgtagtgcttaaataataatttctctcctaaaatactttctatatgatgcacctatttaaagaattagtcataaaacatagaatgtaaatttaatcaagaaaataaacatgcacctaaccgccggaataacaagaaaaaaaaaatctataatgaaacctgcctacagttttcatagaggcaagccagttaagtcagttacttgagatgcgtttaactctaaactgacacaaaacttgtgttgaatttgttccgcaaaaccttgaaatttggggttatgtactacagaatttggcttttctgggtccaccttcctgagtgggtttaaataaactgtgaataattaaaacataggaaggaaaaaaacaccacctgtccgtgcctttaaccaaggcctcaatctatatattatatggcaaaatgctaaaataaaagctcatccgggacaaaccctaagcatgacactgccacttaagaaatacactgcgtctctgaagattgcaatccccactgtgaagaaagaacaggtgctgcacccgacaacccactcaatcctgcaggacaaacctcctagaactgataaatatggactcatttaaccttcccaaataagttgatactcaaaagccgccagctcgtcatttgcacatcaaaagggagtacagctgcactcaagcctttaactgccctgcatcagtccctcgcggatctttgtgagggtccactccctgctttctagcccgagcagcactcagaaagagcccataacgcacgggcatcttcctccccacaaaccgcgactccagggaccgagctgctgacgaagggaaggtaggtgtggaggggaaacgacggacacctcccacccccgcccccaacccttctccttccctaggctttggcccctgccctaggcaaggatgcgcgacgccgagggcagcagcggcgcagctccgcgtcccggctggagaggcgggcgcccctcaccctctgcccgcgcccccggggctgcgccaaggcatccgccagagcgtcccgggggctccctccccacttttccgagagccgctggttaaccggcagcagttgcagcaacaggcccgggtgaacgagcagggacagccgcggagcctcctcagatcccgcgcgcagcccagcccaagaccccgaggcgcgcggggcccggctcccaaaacgcccccttaccccaggcgggagcagaggcggtctccgccgctccccgtcgcagctgccaaagccacagccctcagccgcagctgccccacgatgggggagtgggaagggtggctgagtggaggatgctactcccgaccgaacggagaggaagaaacggaaacaggaaccgccgccgccgcttaacggagccttcggcgccactgactgaggcagagcgcgaggcggcgcgagccgggcagtcgctgacagcgcgagaccgagagcgagctgggtccagggcgcgcgaccctgagcagtgccggccccattccgcggggagacgaagggacgggtcggctggggccaggcggcgggggtgggatggggagggggcctggagaggagggaaccggctgctcgggtcggccggagataacgcgcgcacgcgccggagcggctctgacaacgagcgcaggcggggaagcctcggccagcgccggcgtgcgcgcgcgaatgggggagcgcgcccctcggcgttcctggcttctgggagagggcgcgcatgcgccggccgctgccacctacggcgaccctggcatgtgccagggattctccccgcccccttcctcgctgcgccggtggagagcgtagcagcagcatccaccgcctagcagagccgcgggccacagcgggacggcacagttccagcagggcagcggctgcgcacgccggctccggctcgcacacaggcgtaggccgccctctaccgcctgaaggccggaggctgagcggggcgcgagcggatcctggatcccgggaggagactcgcctccagagaatgctgtgctccctacagcgccgggaatggaccggcccgtgccagctcagtcggcggccctagggggcacccgcactagaggttttgaagctggctccttgctacttttaggggtgcgcgctgctgctgctcagcccctgcagcccgcatttggccgcttgactgctgcttccagcgcgatcctacaatggcatcgctcccccaggagactcagcraagccctactttatcttgtaagagctgtttccacattcactcgaagagaaagaccccccccacgagggcctgagttcgatgcccggcctctcccgacccgcrgctgcgacagcccctctgaggcggaagtttatttagtacgggaaagagaacagcacggggagaggggagaggctttgccctaggatgcgtcctacccgctcggactcggaaaattcccggcgcccgcgatgcagagcagtggaccgaagggctgccccagagcagcccagaccgccagctgagcgggaggaccggagcgcgccgccccagcacacaaagtagtcgcgggacgaggggtgccgccgaggccaatcagagctgcgcgccgcgtgagtggagtgcgagccggccaatcagagggccggaagatgagcttcccgttccaaactcttccctgtagccttgggacccagatcccaagcctggggcgctttacggtgggagagcgaaatggtgcccttaagacaagaaycatttctctaggcttgggcattttaaagtacataccggggatacttatcccaaagcaagtagcggcggccttttagatgttaaatattaaaagatcacagaaaggagatttaagaggcagtggcctgtcaaggttgcaatctgcctaatattcataaattcacatatttattgagaccttatgtaccaggaactctatcacagatacacaaataaggtactgctgattcaaaagaaaatcccttgtcctcaagcagctcaggttgtgagggaggctttcctagaccttgagactcgtatttattgtcagctctttaaacaaaaagcactctatgaagtgctgtactttacagtcgtttttatgattatctccctgtgagaaaagaaaattgaaaggaaagtagagtgacttgtccaagatcacacagaagatgtactagcagagccagaattatgttctagctcagtttgggtgtcatcattcaataaaataattcaataacaatttgtaaatgcatggatgctctctcccatgagatttctgtactaaacgtataagcaggacaaaattctggtataaaagtgacacactttggttgttggaaatgaacacaaattttagacttatgtgggattaaaggtaaaaatcttaccagtcatactttagataatttttagaagtcagaggtggggtggatatttacttcttagtttaaacacagcattttaaaaatattttaacaagcaagcgtaactttttttttttaagatagaagaagcaggaaggatcacttaagcccaagagttccaggctgcagtgccacatcgtgcctgtcagtagccacttcagcctgggcaacatagcaagaccctcatgtctaaaattaaaaataaaatttaaaaaaaagaactacttctagttggttaataatcatgatagtttacactgtataatactttgagatacccaagtacaaagctttacatttgcctaaaaattccatttttgtctggtgttccatttttacttccaaaatcctaggaattaaagcacttattttccctacctccttccaactgaaaaaaaaaaaaaaaaaaacctgtcctaggaatgttttgcccaggatttggtgcatttgtatagaacagtataatatacgttaaaataacaaataactttggtatctcttgaatacactcagaaactaattcttcagtggttttgaagtctgctttgttgaatcaatgtgcttctccacctgtgatggaacattattatcaaaaccctttccaaggcaggctcaggatttagctgccatcccaaaactggaggtctctgtcaaacaactgatatttgagaacaagtctttacacattaagttccaagccaatcatgaatttccaggaaattcacttatgaaagggaattttataccctgcctcttctcagtgtggataacagtcccagcttttaaaaaatacatttattttactctctccagacaagaaaattcctagaactcagtcgttctcttgccaggttaaattctgagagagaaggaatcccccaaaaggttctaaacatcactggccatcagaaagtatctgtgtcaaaagcatttttccacaagctgcaggtcccaccctgttgctgcgctctctcattctcttctcccaactgcttgcctctgctgctcatcactgccagtttgtaatagttgcttaagtaagtacaggtactccacctcttactccacccctccctcaccaaactaggttttggacccatctttgcttatcccaaaagttaaagacaagttctgttcaacaaaagattagacagaacaatcgttatgatctgttatacaacaagtaacagggccttgtcagtgcattgttttcttgtatatagcctcggtcaaattcttaaccatcagctagagctatggggactcgggtgtcccggggcaagaaggagtcaacccttagactatggaaaagatcaaaatgaaagttaaagtgagtacatgagtggccattttattgagagattagctagatcaaagttaatgaacgtgaatgctatcacatttcctaagttgtgaacattcatgtagaaactggtttgaaatttactaccattttattatgactgtaataaaaataatagccaaagtgtaatagtgctgagcaccaggcctcatgcaaaactctttacctccaccatttaattctcaaatcaaacctttgaggtggatcctgttattacggtggggagatctgtggagttccagcaaggggttgaggcactcagaaggcttagcataagctacttaccaaatagtttagaaatttttctatctctaccaacgtgtaccaactgactgtcagccatggaagcattctgaataattgttaattgttctcgttgttttataattgttgctctagctacatttcacttacaggatccgattttccaggaagtcatccaaagggcagcattgttattgccaagagcaagaaggggtgaccttgagataatcattttacccatctgggcctcagttttctcatttgtaaaataaaagggttggactaggtaagttttagttgttcgtcagttctaaaactataaatctagccaacttgacacaccattgacaataactacaaaaatgaaatatagggaaaaaaagtctatattttcatttttattttttagagacaaggtcgcagaatgttgccaaggctcgtcttgaactcctggcctcaagctgtactcttgcctcagcctcctgagtagctaagaatctatattttcaaattcaatgtgttttaagtcacttttgagccagctccttaaacaaactctatacctactcattaaaaagccagagcaaatctttcccattacaagagtaaatgaagtgattgatttaaagactgatgaaactagccagactatccctccctatgacttgcctccatggctgaaatttctgtcttctccactgggataaagcagcatatagttcacactattgatttctaattgaacattcactcccgtccttccttattaatagggctgtttatttttgttttcatctgccaattctttaggtaaccacccaaaactccaactacagaaaggcaactcaattagccaataaatgggttccctaatatggtaggagatttatcatgcttactctctctttccagacatacaaaaagattatatttttccacacccacccccagataccctcctccccttgcagttgggctggaccatgtgactgactagctatagccaccagtctgtagtgggttgtgggcagaagtggtatgtgtcaattccaggtagaacagttcatggccagcgtaagtccttacagtgtttactcttctccagactcaagaccagtattatcttgaaagtatcggtaaagcctctctcggcttaacttccaaaaaaaaggacaaggtagagcagcctgcctcccattttcatctggttttaataagaaatacacctttgtagtttaagccactgagatttgggggcatttttcaatgcagtatgacctagcatctaggttatgctagactagaatatgctagaattagaatagtcctagactattctaattgatacacttgaaaaccattaggaccaggataaactagcccaatcagactgaaggaaaggattttcagtccatatctgggggaaggagttctctctttcctgccagatatgagcaagtcaacctgtaacccagattgccattggcagcaatcttgcaagaggaactaacctgaaaatgaagtcaacctactggcgatggcagacagatagaaaacccttgcagatttgattgagctgtggtcataccactcctgaaaactattctttcctggactattaattctacaaaataataattatgtttgtttgttcccaccataacactgtaagcaaaaactctatcttgtatatctttaatttcatctcagttcctaacacagatatgtctcaagaagcactaaaacgtattggatatagccagcaattatggctcataccttcacctcaacattttgggaagccaaggtgggaggatcacttgaggccaggagttcaagaccaggctgggcaaccatagcaagacccctgtctctatttttttaaatatattggatacattaaaaacattttaatgtaatagatcatactcttgccttcagaaaaaaaagtattatctgtattaacaaggagagagagtaatttgattcaatccaatcttcttacagatgaagagattaaaaccttgtaagacattacaaggtttatcaagctcatatagctttggtatggcaaaattgaagtagggaaatagctaataatttcttcatcaaaattgaccatagtttccaacttaggatagagaagtattgagccagtatattactctcagacttactagcttttttgtaaccacatcacaccaatctggttcaacttttatgtaacaaagttgtgagttgtttttcagttaccaatggccccccagtttgaaggtcacctaacctgaacatgcccagatgaaccgagtctgcaactacagcgggaacctaagtgctctgactgaggagtgaggactgaattaagaaggggacaccacattgtaggatccaggatctaatcgtatcaagcttggcatcaccccatggcaggatccaatcaaatcatacctcccagcatcacctcattgcaagatccaatcagatcacatctcatgactttatgcttataaaacctggcccaggccaggcgctgtggctcacacctataatcccagcactttgggaggccgatgtgggcagattacttgaggacaggagttcaagaccagcctggccaacatggtgaaaccctgtctctactaaaaaaatacaaaaattagctgggcgtggtagtgggcacctttaatctcagctacttggaaggctcaggcaggagaatcatttgaacccaggagaaggaggttgcagtgagccgagattatgctactgcactccagcctgggcaacagagcaagactccatctcagaaagaaagagagaaagagagagagcgagagacgaaaagaaaagaaaagaaaaagaaaacaagccctgcacagggagacagagttgagcatatcttcctgtctccttgcggttgacttgcaataaagcttttattttctcaaaagccagtgccatggtattggccattggcctctatgcacattaaacagtgctcagttacaatctgaccttgggcaagttacttaacctctctgagctctggtttttccatctataagaagggatgatgtcccctagctcatggggttgtataaaataaatgactcaacatacaaaaagcacttagtacaattcttgacatatagtaaatgttgtatacattgcagccctattaaatgatgtttattcatagctaaaccatttttatgcattaggatagatcctgttctcctttaccattcatttaattcagaccatcgacctgtattttatcatctcatataattttaacgtatacctatattagtgtgtggccagcacccacctttcctataggaactactgctctcatgcccacatttttattatgatggcagcgagagctgtgtgaccgctgtccattgcccacacctaattggtcaagagggggacacctgacccaagatgggacaatgaacccattcctccagaatgtttatagatgtgagaagagagattatctcaggcctcacctagatataaaatctgggagaagtcattagtcatttgccaagtggagaaactcattctgcattagagaataaagtcagtggaaagaggaagcagagaagacagaagtatccttatactggaattctcagttccaggttttgctgaccagtagttgaatttctgccttttcttctgcttaggctcctctgtttctaggctttccctgtatccttccaatattgtttccatcttgcctaagctatttccaggtaggtttattgtagatgcaattaatgcaataatatgctctattatcataaagtaaaaaaaataagaagaggaaaaatttttagatgtattacttttcattaatgacctggatgataccactaagaatatgaccatcaagtttatgaaagtgaatcaacaaattt

SEQ ID NO: 97280 - DNA, 12883 bp, Homo sapiens
tcctattccctctcagcatcaccattcatgacaatccaaaaggcctatgggaacccttcttttccacctctacctttccaatttaacagacagataccttcctctgggagaaagttcctgcttctgacctgtgagaactaactagttcagtcagttccaggccatcatgacatcatgagcccagagctgatctctagtggacttctctgtttttgtttctgttttttttcctgagacagggcctcactctgtcacctaggctggggtgcggtggcacaatcatagctcactgcagcctcgacttcccaggctcaggcgatcctgctacttcagcgtcccaagtagctgtgactacaggcacatgccaccatgcctggctaatttttgcaattttttgtagaaacaaggtttcaccatgttgctcaggctaatcttgaactcctgagctcaagcaatctgcctaccttagcctcccaaagcgctgggattataggtgtgagccactgtaccctggcagatttctatttcttgatacaaatggctggctggctcctggtaggttatagactccctccagcaacttgctaggctgaagagatggtgtgaggctggaggtacttctggggctggagggacatctcgaaagagggtttgctacttctgtctctcctgctctagaaaaggccagacagaaaacttagggaagaacagtgagagcagtgaacagtttgggctcaggtttgtcacagccagtgatgcttcagccttcctgctttcctgtcttcctcaccttcataccactgtgaattgaactaaggggattataacgagagggttcgcttgggttcattctccctgcttgtacgttaaaatcataggtggaaatagaagaatccctaaaagagaactcgaggtgtgtgggctgaagatctataacagcttgacccattaatcagaaataggtgcatgtaatgcccagaggcacgtgccttttgaaaacctttctctttcctgcttattttctttccacttggctaatttaaaccaacaaaaatcatcctcaatctaaataacagtttgcttgcatttgcatagtactttatatttttcaagttacttttgtatatcctgtcccctaaacatcataataatcctatgagctaagtggtattatccccaatttacagatgaggaaactaaaccgaaaaatgaagcgccctttccgagggcacagagccattaaatagcaaaaccaagtccagctagagctaaggtctcttgagtctgtccaattcttgtttgattcctggcctctactttctccactcatttattcaacaaatatttaatgagtgctttctgtgccctaggcactgaggacacagtggagagaaacacagacctggaaccagccctcatggagtaatatagtagaaagacagtaaactataaaaatcacacagcctcagtgtttaatcttaaaaaatatataccttctcttggtatgtcacatgcacctaaagacctagcttaacaaaacataccccattattccagacactccaaaacatggtcattcagcctctccttttatcccacctgagctacaccaacccaacacttttggtgcattacaaggagggacccctcacctgatgtccaaattggttgcaagggaagccaaggaccaccaggcgcctgggaaagcggcattgcagctcgttgagctgggtgaagtcccgggtggttgtgcctcagagcgaagccacattctcaatcagcacggccctgccccggaacgtattgaaatctaccttctccccatccaggctgatggcactgaggtcatagaaggacttggcaatgaaagccatggtgaagcgcagagtgagccccgcagagaggcctgagcccacttatgagcctattagaggggtggggaggaaggaggagccaggaaggaggacagaaaggatctaacaatggagctttgagcatccccaggatgacttagcaaaaacaggtccccacctgtaagtgctgtttgaacaaggaggttgctcctcctattaacagactgaacaaggccgcctccccgccccaccctgctgcaacctgggaagggccaatttgatatctatgagcagaggtaaataattcactgcttacaggaaaccagagccctaaaggtcgaatggagaggaaaaaaagggagggagggatgcaggattgactcctacttccccatcaagttgttctcatttgacacagacgtttattgaatgcctgctgagtgtcaatctctgaattgtacagtgagagggcagggtctgcggagatctgaaagatgaagaagagaattgagcctcctatccatgggactcagatgacaactgaaatatacatattcctgttcacgttcttctctttgttgctttccaccaggacaaaatcaaagggacccttaggaggagagtgtgtcattttctaggggaaaaaagaagttttcagtgcctcagctcttgccaggctgaagagacaaagttgtgtttatcttgaaaagtctttcagtgcgtggtgccacttgtcctggagaacacaccagcctctgcccctgcactgtaccatctcctatattatatcccccacctccacctcatcccccagcccccaagtcatgaggctcagtcgttgctgggagaatggtgaagaggagtcacagaacaggtggataaacttagtggatgaactgcacctaccttcctctcagacagagatttggtccccaagacttttcagagcgggtttgtgctggtcaccttcccacagaaggaagtgtgtggaggaagttgaagctgctgtggttccagacgcaggcaggtcacccctgatgctttcaacaagaggcgtgcagtgcatcgcaggacatctgctaagggccatctcagaggcccacccctggaagccacagaaaccgaaaagacccaagcacccgccaactcaacaagttactcttttaaaaatgccttgatttcttcatcagtaaaactagcaatggggcttgacctagctttgggattttagagtgaaatttcaataacaaagcaaatgtttactagggtgttttcacaggggcacatccattgggaactgtctccttggaacaaagaataagcaagtccggggagcagctggtcttgagaatctgatttgttgagatgagatgaagtaattatcaccagggagcgccaagctgccttgcagcttttccatggctgttcaagtatacagggaccatgtgtctcagctggctgctccctaaaaacaagtttccattacctaagtggacagaaggagtgacaggaagtgtagagggaagtgtgtcccctgctgaagctgggtggagttcctagaagcaaccaataagaaagagtccccaccaagccactgagtcacaaggacttggcactgatagtgggcagaactgtaacttgccggatttatgtgcatacctagagcttccccctagtactctctgggcctccagagacacctcttattctctgctcttttgcaagccttcttcaagaaggccatgggagttcccaagatgaggagtgtgggggttccctcttccttaggtacatgccatcccttttctcctggtgtgaccttggacccttcagactcccagggttctcacctttcctaatggaatatacttggtgaggctctcctaaaatatctctgtctccaaatttacctcaaactggcctcgctttccaaaagcttacaactttaagcatacactaagcagcgtatgattcttatggctttctgtgggacagtgcttgctctggacacagcactggcttaggcagaaagcctgggttggtggttcttaattctgactgcaaatgagaattgtttgtaggaatttttctagagatgccaaagctttgccctccagtgattccaattcagtggtttacaaccacaattctgccactgttacttcggacccttaggcaaatctttaagctctttttattgagacagggtctttctctgtcacccaggcaggagtgcaatggtgcaactgcagccttgaccttctgggctcaagtgatccactggcctcagcctcacaagccaccacactcagctaattttttctagagacagtgtctcactatgttgcccaggctggtcccaaactcttgggctcaagcagtcctcctgcctcggcctcccagagttgggattacaggcatgagccactgcacccggccaaatctttaagttctctgatcatctgtttccttgcctgtgggacctgggtagataaccaccctccccatctcacacggtgatggttagggtcagaagagtttatctatcactagtgccgggtaaagtgtagtgaaaatcttaagactactgttgtcctgcgttgtcctactcctttcttcattcagtccttatccccaatattctccacctccatcaattccatatcccaaagtatgaaatacctgcagtcctgagatcccagtctgcctctgctcccccgaggtatccaatcacaaatctgaaagattatccagtcccacctcatgccttcaggaagacccgttcctgacccacacaaacagatgagactcatcttggctttaaaacctgctcatagatgttcagcatcctctcgataactgtgtttcatcttatttctgcagtgccagcccaatgcagggcaacggggctttgctttgggcctccctgcaggtggcactagggaaggtagagaagggaagacaatgtttgccgcttccgtggtcactctactgctgttgcctttgcttctggagctgcttctaccagcactgcctctctccctcccacatcactgccagggtctgagtgagacctacccccaaggactcatccaggcagccacaccggtggtttgaaataatctttattttgtaaacatctgtgtttaaaatagatgaaccctgctcacaattcatatatggacccgagacacagtacacgaagttcacccgtcacagggagatagtggaggctcaggagcaggtggcgtgcctggggctggatggagtctcaagacagcaggtgcagaggtggtgacgagtaaacaggccagcagagcctggttaacagtctgggcctcaagacatgccccaggccaccaaaagtttagggtgagcgtagctgcaccctaaaatcccaattctccttctgctcccataccttttcccagtcatggcccttgtggatagggcctatcagtctatagaatcctgattccatgttttcccttccagaacccctagggtacagtacaaatatagtccttctttcctgagggggctaggagagaaagacaatgaatggcaccctgcctgatcttcagggaaagctgaaatactggtccacagattggagccactgcccaatataacttctcaagtccctggctgaagacagacttgagggctggcatcacctacttccctagccccagtgtgatgtggcataggtcttgatacccaaggagtcccatcttcaaggaagcaactccagcctagtcacagcttcatcctagagttagctgtctccttttctcattagccagtgatttacaacttcctgctctcctttgctttccaccatctaagctataccctgtccctaagtcctgagccaccctctcctgctgttttcctggtttggtaagtcaggaggaaaggtttgatggttctttccccacttctttttggaggagtaaggaagtgaggttcttatccttcacatatgagtgccctggattttggttcttagttgatgaatactcaacacccagttctttgttttggctgcagccacgcagtgcagctaatgtgtggcttaagaatgaccctcttcctaggcctcgcccaccttgggacggtgggcaggaaccccagtagaactggtaaattacttgttccgtctttaaagggcctcctacragctactcttgggccatatggggttaaagaaacttcctgaacatagcactctggaggaaggagtcctcttccctccacctgtagccacagtgtggttggcaaaccctcaagcctatcaggaggtagagggcaagatgagcgctttgtcttaaaggccaaagagaacagcaccaagcgtttctacccagggccttccttctctcttcccatgaagtctttgcccttctcccataaactttgggtcccaggagaaccttggttgctgaaggctaggctcagtcctccgcctgggagtctgaggaaatgctcttcttacctaagaaatggaagatggggcctaggaggccctgctgttgctacattcccctctgctgtgcaaactgctgtccctggccagctctcccttgctcttaacctgatacataggagctagtccttcatttccaaatgctcccctttgtggagtgcatggttggcctgacagtgtcactgaccccagggctctccttgcccctggagtacccacaggccttggtccacatctttaaatttgggagccaggtggagagaaattgtgttcatgctgcatgggaggtagagaatggaggtgactttttatccctgccacccctcattttgtttccttctctgaagcacctgcctctgagctcagttccccaaagaggcaggcgggcagccaagcaagggcaaagctctggtcggggaatgggtagaggtagggcagccccaggctcgaggactcccyggttgcygtttccctcctacctcgatgctccactttcgcaggtcactggggaggcaggcccatggcacatgagggacagtgggggtgggggaagaggaagaagcaccctgtagcctttggcccacccacgaggcagggtggagggttcttcctggatccaagggtggaacctccccacgagcctgggtccatccccttggatagcttaggaaggaaggaaagagcgagctgcacacagcaggacacacgggggacggggtttgaggagctttgatacgaaacgcaccggaggggaggggtcagagaaagagaagtgggggaagagagaaaaagcagagaagagacacgatgcacggagaaaggagcagctgaaagtggcctggactccagccctggctgttgtctggtgggtgcgggatggtgagacagtgcttgcggcacatcgtgggggtcgtagcaggcctgtggctggggaaacaggctgaagaagaccactccagggtggacgggctggggacaggggctgcttgagatgacagcagagccgctctcagggccaggcagggggagtagtggctactgatactcaatagggtcatcacacgagaggacagcagcagggcaaagccccggctcccctgtctgcccacgggcctcctgagggaagaggggtgtcgtgtggggtgccccacacaggactcagcaccagcaggttttcgaagagttcgctgggccctcgggtttgccctcctcctcctccagctctgccagtgccaactcattgctggcacgcatccggaggccttccagctccttcctatgggcctgcagcaccagctctgtcagacgcgtgaatgactggaaaccaaagggcacaggttagtccagtgtctcctcctctcccctggcaaccctgcagcggcctgagggataaggtccatcttatggctcctcctcccacctctgctggactcagcccgagagagcgggcgcctggtcaccagggctctcacctctttaatgttgaggttggtgcaggcacttgtttcatagaagtccatgccatactccttcgccagctgcaagagaaggacatttctgaaagagagtcagtaaggcaggggaggggcccatacaaccaggcacaggcttctgccactgcactcacaaccatgctgtgttgtgacgatttctcagagtagataatttctcagatgggactgggagctccaagagagggtagcagagaatgggggaagatcctccacaaatatgcctctccattcttccagctgccaccccacgcctcccaacacacaatcatatatcaggagataaagacaccatccattgtggcagtatggcatcctcgtaaaaaacatgggctctggagtcccacagtcccagacctgaatagcagcactgccactgatggctagctgtgtgaccttggacaagttgtacattctctgtaagccccagctttatcttctgttaaaggagactgagtgtgtctcccatccatggttgtgggatgattcagtggggtcgtgcacttaaaagcgcttgccttagcacagtgccacacatagagtgctcaataaatactatcctagtaggctttgcctctactttcaaattggtcaatgaccatgtcttatattttataccaaacaatcaatttcattttaagtactaatggaacgctattgactgaaaagggagaggaaaactcttgaggtccacggactgagtggataacttatctcagaaataccaatcttggctgggcacagtggctcacgcctgtaatcccagcactttgggagactgaggcaggtggatcacctgaggttaggagttcgagaccggcctggccaatatggcaaaaccccatctctactaaaaatacaaaaaaattagccaggcgtggtggcatgcacctgtaatctcagctacttgggaggctgaggcagaagaattgcttgaactcaggaggcagaggttgcagtgagccgagatggcgccactgcactctagcctgggtgacagagcgagactccatctcaaaaaaaaaaaaaaaaagaaagaaagaaaaaaaaaataaccaatatttctttctgctctctgggaggatggtctccctgcatgcttggacattccctcagcgtcatcctcctaccctttctgcccccatggcttctccagctgtggctctttgtctcctcatttgcctccctggctctttcctgggtaagaaggacaggagtgggggagtgttgggtgggatgggagatcatttctcgaccgtaacatggcagctaggcctggatgctgtcagagaagaggttgacaacttgaagtccttcattactaacacggggatgatctcttaagcagagggcaatcctgcatttggggacctggacttgggagagttgctgcctatgacgtctttgtttctggatggaccccgaatctctgggcttctgtcctgaaacccagacaacaagccttccgaggatggccactcccccagggccttggggtgctggggacgtgtgggaggacctgccactggggaacacacccctaggtccccacgctcaggactggccctggaggcccagcagaggacctggggtggacttgccttttccctccacttacctgctgcccttgctctcttcccacctgccgtttctgctcctcatcagccttattcccaataaggatcttctggacgccttctggtgcgtactagggacaaaggatgggcagaacagccagtgagtgctgcctgcccccccaattttccctacagagtctgcactgcctccagcccaccaccaattccagagccctagggacagggtgggccgactggatgcaggtgccaggctcccccaagtgccatggctgacctcaagggtatcacggggagagcttagggtagaagacactctggctaagactggtgcttccttgggttagaccactggtatcagagctggaaaggacattggatgtaagtccagccctcattctacaggaactggggacccagaggattcaaatggcttcccaaggctccacagctattgtgcagagccaggactagatcccaatcttgcaactccacctggtcccaagatttcaggaaagaagctgctcacagggaagacttggaactaattcatttccgggaaagacacagccgtggaggcctggcagggtatagagagtgagggcatggcagcttcggtttcttccccatgtcttactcacccagaggtcttcatccagggctgtggaaggcaaagcttcctggaagcatttgccttcccatctggccctcgccttgccttccccggtgaggcaccctctccacaccccggcagtgaggtggcatctcctacctcatccacgtcactgacccacttcatgatgtgctggtaagagcgctcgctgctaatgtcatagaccaaaaatatcccctgagagagagagaaatagagagatgtgatatgcacagagagagtgcagtcatggggccagaaggggccgtggaaacttaaaggttgggtcccactctcccattctccctgctcagcatccagaaatatctcttctctcagaccccaccactgccgcctcccaggcccatcacagaactctctacagcaggaagacaccacatgctttgacctggatctttgacccaggatggagggtggaagtcaggggtgagggcaggggcctgcctgcagtgagtgggccatgaacaatggacggacaaatgatcagtgaacagctgaaagacgccctgcgctcctccaagcaggcgaactgtatttaggggatccgtggcacagacatctcaaatacccagagctgggagtgtgggtggcagcttcccactttgaaacccccaatgtggtggcttacctgggcccgccgatagtactgctttgtgatggtctggtatctctcctgccctgcagtgtccctgcaggagaaagccagtccctcagaggagcagggaccatgggaacagacggggaggggaagagcagagctgtccccttgtaggaaaaactggggagctaaagggtgaaaaaccagggatgcttggatccccacagggatctgcagtcagaggcctggtcatctgtgctggtgctgaccaggcctgcagggccttggcccctcctgccaactgccctcctggcagaaaccagaagccacagccagaacaggccttggacagctctctggaatctggccactgtggccagatttggttggatgggagttggcaggggatgctgctacacccctagtccctatgggacctctgaaggcagtgcccatactgctgtggaattgagagggagctctaaaccctggcaaaggcagtgcttccaagacctcaggcagagagccacagcagcaccctctgctactgtggaaacttcatcatgctatcctgaggaactctctcagggtctcgccctaaatgatggggggtgtagcctccttccttccaatcttaacatagtgtggcacagcccaagggcaaagcctaatcctgagataaattcacaatggttagtgtgccagttccttctaattcctgccctttggtgcttgtagtcaatcccctaaagtttcttagaggttggagattaaggcttataggaagagatgggcttctgagacttcgcttccatccatcagagaggtggccagttatcccaggtgaagcctaggaattttacacatggcaggggcagctaaggagcagccagaagtcctcttctcctacatctgcctcctcctcctccccagctcaccagatctgtatccgcactttgatgccgtctacctctatggtcttcatcttaaagtcaacacctgaagaaaggaagaaagaaagaaagttagaaagcgtacccacgagaaatgaacaggaaagggccaggcaatcacacttgaaaggtttcctttcagtttaatttggcaaagggatgaagtaatgtaaaggccttctttaagcagaaactgaccttaaggaagtatctgaagctttgaaaggggctttcctccctccctgagctgaaagttgccacaagtaaaggccctgggggacccagaggagggagagtgaatctggggaaatctacttcatcactgccttactcgacagacttaaaacatgtctcgttctagtcatgtgtgaagtcttcctatttatacttctggagagaacgctgtgtttatccttcctgaaattctaatctctaggaatagcaacccacattatttgcctgctttcttccctctctctctttgccttgttaataaccagaaggggtcatagtgccagactgtggagagagaggagggctcttccaacccatgattgtacctgaagcctcagcacccagccaaggctcaccaaaaagaaggcctcatgcgtcttggttgctgactcactcattcaccataggaggcactgtggttgactagaaggagcatgggctttggtgtcaggcctgagcttatctcctccctctggccactcatagctcattgctataacatcaggcaccttgcttcactgagcgtccatttctgcctcagtaaatatcttcatcagggacattaccagtatctcagagggttgctgaggaggccggatgagatacagcacctggcccaattgactgcagctgtcatgagctagtgcagggccgggtacatgcgggtgcttatgagtgactgtcataggaccagatgaagaggcagtggcatggcatggcatgtcactgcgggagggaaaggaagcaaagagttcccacgcttcttcatccaagggctggaggagctaagctgccacgagacacaagaaaccgaagggatttggcaaatgcgtgcagggcagaaacatattggagaaatctgcagcaagagaagtcagcaccaccagcagcagccagcttgactctgagtgacaacagagagatgagggaggttgttttgctgaccatgcctctccccaactctaactatacccagg

SEQ ID NO: 97281 - DNA, 12690 bp, Homo sapiens
agagtgaagaagacaaggaaattagaaaaaagagagagaaagaaaaagtatatactatggtgggcaatgatggaaaaggccacaattgttgaggaaccaattaatagcatcagaagtactggagttcaggacaggggggttggtggttgaactacagcactgaaatcccagagagcacagtgaattcacaaagtgagagtctcagttttctaaaaaaaaaacagggtgactccactggagggtcaaatgctaaagtaataatcaatggaaaatacccatccctctgcaacccagaaaagagacaaagaagtcagtatctgtgagaaagaaagagaggaagcctaaccaactgctcacatctcagtgcaaagcggctgccagcatacccggacagcccggcacatgcggaggcacttgccgctgctgccactgcgctatgacaaggagttttgtgccttcggaggagcgccaaatccaatgacgctaattgcattgcagatttctagcatcattagcaattcttaaaattacatttgccctgcttaagttctctatttccagcctggtatacgacgggggcaagtctctaaaggggatatgggttacagagaaatttgattggacatgctggcttcaggtgtgcaggtggaggctggccggggggattcacagcccaggaaaaaatgcttgtttgtcttattttaaatgctgattgccgggagaataaacaaaacccgcagctaaatgggccttaaaggaacactgggaattttggaaagaaaaaagccttaccgaataacagttggaactagccctgtgggtcctatggtgacaagcaccatccaaccaccccgagcgatggagtaacttgcatttgaaatagttggtgcagaaataaccactctccttttgtttgtttgtatttaaaacaaatgaataaaatccagatgaattggtgtttttgctttgtttgtttgtttccttaaagagaacatatttgctcattaggaaagctagacagccagctcaagaaacaaaagccccaagtctgtgtctctcctgagctttggcaaacactttgccacaacatttcccggcccaagtatctcaaccctgctgggaagggaaaggctatcccaagagcagagcagaggtcaggatccgcctctcccgaggctgctggctcctgaaactggggcagggctctgtgcagttgggacttccattgcagagtcattgagagatcaccaacaccagcctctcccagagtggaggggtggcctctactctgaatctagcaacagaaaggggaccagctcctgggtattttttccaacaatttatcccatgtaatgaaattgctaagcctatatatttatagacacatacatacacatatatatatacacacacttacaaatatgtattatatatacagctctatgtataaacactcacatagagggagtgtatagcttttaattgggccgtcttctcaaaataattaagccagttttaatgaaatactgtttaaggctgctggcaagcaaagaagccatctttagcagagcattaataaactgagtcattcgcacaagggaatggctagctgtatcagtcacattcatggtgctaataaaagagctcagttctctgtggcaggccaaggattggagggccgggagggagcacagagcccagtcatctcgggctcactgtcacagacagtccttacggctgcagtggagttcacagtccgagctggaagaagggtctgcttgccctcaaaggatcccagcaggaatctctgtccatagaagagtgaggtgaccaatcccaggggctggtgaggtctctagagctccttaccatctgtgggtgacactggaccaggattgggaacagggtgcaagtgtggccagagtttctccttttggtgtcccagttcctcgtctacagtgacctgccaaccccgtgatattaatgagataaacatgttgggagggtttttcagaggtgttaattgggggtaatgtttaactcataaaatgaggatagtcattctctaaaccaggaatttagataggacttcccttatcaatacctcctgctgctttttagctgctgctttttagcagcaggaggtattgataggtaaaggagtatctggtttggtttttagtcaaagggatggtttagccatactcacaatgagaatctttacaaactggactgactttcaccaaaagcgatgagatggacttgctgccacatataggtccatgccgatgagatggtgtagcagtatctggtgctggaaaggaaggggcctgtgtaagagtcccatcgtaccaacaaggaaactgacctgccccagtgttacaccgtttatccccagcggcacagccacatcctgaatccttcttcaagagtcctgggagaagaaaataagccccgttaccctctcctcctttctgtcttggagagaagaggcctataaaacactaatagtgcaggggaagttttttctaattccaaacaaggtgggaaaagcaggaaccttttgatttctgtaagatcaatttggtgaagggctagcacggaagtttagactggaccatgataacagttaccctttactgagccttttcacttgccaggaggacactgtagatgcataatagttcataatcctcaccacaactctgtgagctaggaagttgtattcccacttgacagaacaggaaactgaggctcaaaaagttaaccaacttacccatagtgctagagctcacaaacagcaaaggcaggattcagacacctcaaggcagtgaacaggcggcccctggttctggtcctccctctcccgttctcctctacccaggcttgatgctgggtccatcctccctttggcctcaccattaaagctaatgctgacatttccatcagcttcccagtctcacactcccaggagtagcaacatgtatcaagccctggcgcagacatagtccttacaaaaggcaacttctggggaagaaaaagaaactccttgttctccgctcactttcagaactgatgccctggcagacatgaagcgtgctttcggcacgaaggaggaagaagaggaacgcgcagggcttgattcccggttctccagaattcggaagtggaagaagcctgggagtgacaagggaccccagatccggcctaaaccagcgccctggggtcaagcccctgcgtagtcctggacaaaggagccgcgacctggaggggggaccgggagaagggaacggagaccccagtggagccaaggagcctggatgggcaaaggaaatgggcgacgggtaaatggagatgcagccggggatgggagaggacgaccatcgactgggaagcggaaacccccttgcggtttgagggccctgaggaggggaagcgccccgcacccgccccccagcccgcctccaggggtgaaggacggcagggcctcccgcggccgccgcgccgggacagcctgaccgagcagcaccgagacgaggccggcgcccaccgcccctgcccggcccccgtccgctcctcgggctagcactaggccccaccgtgcaagcgcactgtgcatcgcgcctgcagcctttcgaaaatagaaaaatagggagtatatgtagtaccccacacccttgtaatgatgccgctccaagcaaatgagtccttaataacaacagggtgctgggggcagcgaccgatggggagcaaacagcctggccctgtggtgtagaactcgcggcaatggagactcccgacactccatgtggcacaagtcccaggtcccggcgggccagcatccggccttccccggcgaggagccgggcttctgacgggagggcagggtggcgagagggcgccagcaggacgcctgaccttgcgtgaaaaaccagagaattccacagcaccgtggcgagtgctccccggctgcgaccgcgcctcgggccgcgaggatgttcctatggcgccacctagtgtcggaggtgcagacaacgctctggcgagggctgcaaggacggcctgcgaccagccctggaacctcagacttaggctgggaccttgggatgggtcatcccaggggctccagctgtggacgagtgatgcccttccaacaggcaaaaagccccccagacgtctctctcttcctgctgcaaccaaagctaaaaagaaaatttgccagaatgaatggaataactgacggtccccttcaatgagacgtccatgaggtgatgtctggtttttcctaaatacaatggccagtcgattattagttcatccagaaaaaatatagatgctgtcatcgtataaacatgagtctccacatagaactgagcctcagacccgctggaggtgctctgtctgggaaacactgaactagaattttgggtggaacgaagtagaagctttactttttatttaacagtagcctgaagacctcctgcagaataatggaaaggataaagacctgggagccaggatactaaggttctggcattagctctgccccccagttgtctgtttgacctcgaccagagggaaacagttttactacctctcacaatactgtgcagtctggattggtatctccatgtaatcaataaggaaataggggctccaggagtttacccaaggccgggcagcagatcagtggccagaccaagcttcagctgcacgtctgcccgactctgaagagcacgttgccttcacaagccatcaaatcccttcgtgctttggcctcttcatctaccgcttgaagggtctgtaccaagtggtcatggttccttccagatacagcaaaccgtgattctaaggtttcactgatcccttaaaatccagttttagtgctcacaaaccccatggtgataacaaaagagcctttaaaaaggatttatccacctataaaaaccattagattttatttggggctgtgggcaaagaacaccaaagcaaacgtgttggaacatcaaacctcctttaaaatttagggcagcagggacagaggagaaaatctgcacagggcaaggagggacaacttacagattccatggctggaaccagactgcgggacactatttatctgccattggcttcctgggggataattgcctcctgacaattgtttagacttgataaatacatgaaatgggaccgccaacagtttatctggctaccagttcagatccggacagaaccagatgaagaagtcaggcatatttgcaataacctcaaagataaaaccttcctatcagaggcagcttatctcctcctctgggtcatgctgcctagtaactgccacctccaaaagaaggaaggggagagcacttctagcagggggttcacagtgggccttgcttgccttgaactccccttcctgcccacacgacaggccacctgtctggcagcaagggagtggtactgtgccctgatctggaaggcttaggaaagatgttggcaaggaaagtggaagtaatgagcaactagatcccaaagccaaggtcacctaactctgagatgaatgcgttccttgtgggctcttcctctgtttcacatggacaagctaaaggaacttcaggcctccccagcaaagataacaccatgaatcgcagctcacaggagctgggaccctgctgggctacatactcaccccatgaccaaaggcaagtgggacctctgggcctcagtttcctcacctctcaggggtttgagctaaataatccctaagatcctactgagccattttatggactggaatcaaaccagccagacctctttatggtttaaaagaggccagaggtttcatcgaagaaccatctccctcccttacatttttcctcagcccgcttgcttttctcttctccctccccgacacctctcatttgccggccacaaacctccatcctccaactcctttccaacgtcagtagctggctccaccaggctggctaaggagcgaggagaccatcacctcagaaagcagccccrctgggaggtccacggagcagttcgccgagctgtgcacaggccctttattttccatctgtcaagaarggaagctgcctgttgcttatttcctcctcccactcttctcccttcccgccagcagactcttccactttcaaaatattctgatgggggatcacaggagttttcctcaaacaagatcacttggggtcaactactgagcaactcccagcctcagccccacccattccctcaccctccagcttgagcaatagctccagttagtaaagcagttggatcaacaggacaacaaccaaaagtgaccttctacgtcctaaagcccttgcctgacaccacctctttttttttttaaattattcaggggccttttggggacccccagttgagctgtattctgcagaaagaacttccaaacgaaaggaataaggcattgttttaccaagagccttttctccctcaagaaacacaatgtaaactaggaaacttgcactttcttttmcctttgggtagatgagcagaagggaagagttactacccagggtgaggtcattcctccatggtggtagaatatctggttctttcagtttccccatggtgctggcctcacaataggtgttcatgaggtgcaggctaattgggtgagtggatgcagtgctctgatggatttattcagtgtacaagattgcaaagccatgtgccagcaaaggcttaaccaccccaccctacccttcagaccagccccatagctttccatgtccctgtctgcccagcctcaggccaaagcaaaggcagggatctgagctgtacccactgtgaatgcccatctcctgacccctgtgctagtgtcttgtccctgcatgcctcggctgtcttctctctggactatgattcatggcagatattaaaaaggaaacagcatccttcaattctttctaccatttctcttatctttaaagggttcttattaagcagtatcttcaaacttatttatgtgatgtcatgctaggaagcagcgttgtcaatgtgccactttccatgagcactgaattcagtaaaaataaaagccaaataaatgatatattgtctccatgcagaatcttctctagtcatgactagctatccagatagtagggaatccctaaagataatcagataatggtgacttttgcttactgaggcaagctcccctttcctctgcgcttctggagtgattgatccagagaggccagcttcttgctggggcacagctgcaatccgctgtaagaagccagcccagaagcggggacacaaaatcatggggagccgaccatggccaaagcatcatgctattacccttcacttcacattttttagctcttttttgaatgttatgaaagatacacagatgtatatattttatgttttcatattaaaatgttttcatattaaaaatcaaagggcaggaggaagtgaggaaggggaagaaagtagcattcaaacgccaagcatcatgctgggaacttggagttctcaagccctccagtcttggtcactggggaagggaatgggtatcacccgcttagttcatatttgaataactgctcatacttgaaaatgtcttcaactgcaacaacatgaagtggggagcccccacaggatctccacgtcttccctgagagctcttggaccatgctccttcatcctccatgattttgatcttgcagttctgtttaccttcagtgccttctcactctttacaccctcatcccaaccccttccacttttcaagactcatttagacatcatccccaagaaagcttctgattccccactgtccagtcccatctgggtgggtacccatagagatgtcctgtacaccttgtccccacgtgttagaatactctgtatatctgtctgcttcctcaaggtactgtgagctctttgaatgagagtcttgttcaggtttgcatccccagtatctactggttcagttctaggctaccacttgcccaaacaacacctctgtgttctaagaaaaagaagaatgcagccccatccctcccactcacgccatacgcacactgtcagcctccaagcaaggccatgtgactcccttgttcaagtcagaaaaaggttctccctcctcatagtgggtgcagctctacagcaaggagcaaggcgtggtgagtaggagatgagctggatgtcagcacccactgggcccaggctccaggtaacctgcacaactgtattggttggctctggttggatcaatcactccatccagagagcagtgacccacttctcctgacctctggctcagcttccaagacaccaggctgcttttctgctctactaccagctactccctctaactacagctgctccatgaggtagataagcccctgtgtctctaatggcacagtgccccatgcaacccaaacacagacccccaggagagagaagccagggaggtcctgtttcttccaggcccattgccagcctctgtccgggtctgggcacatgggctcatttacatggctggtttggagcctttggcagatgaaagcgtgcggatggttttatatgtgttgctcatcattaaacctccccttcagggtttcttgccgcctttggtttgtgtctcaatctggagcaaatttaagcaacggtttaggcctctgcatttccttggtttaattaataattcataataaaaatttaatcaaggcataagcttttgtggaaggttataaaacacttttatttgccctggagatcagaatgaccactttctaaatctgtgaaatgatgggtttttttcccaaatgaggaaattttactctcaactgtaaatttcagctgtttgccatatgtaaccacagagaatctgtttattgacttagtatattaggaatagttaggcaggaagaaaaataaacccaaactccagacaggagaaagtgtggggaaggaatgaagagttgaagttagagtctagcaaacctctagcctcagagaataacgagaagagataaatggtagaacccatctcccaaaggagatgatcatgatagtaaccagattgagagacaaagaaactggcaggacagtcatcacaagccattcaagatctttggagacataagcagagaatgcaaagggaagagtagagccgtgagaggatattagacactatatgaactctgcagcaaggtgtggagtcctgcttagtgaaaactgtaaacacaggatgggtttttacctgcctgaaatagcagaaaagagttcttggcaaatagcagagagagggtctagaccaggggtagctcaaacgtacgtctatagacaaagccaaaccaccaggaaagccacctaaaaatacggagtcctcggcctccactttaaatgccttttaaagctctgcaggtgactttgatgtcagccagctttgggaaccgtggtccagatgaccttttaaagtccttcagcattaattctctgagatttgtaaaaattaagtcaagggaggaagcacaaagttgctgcaaagagctggattcaggggataatgtctaataatcagttttctccataataattattgtaaaaacaacatgttattaactttgtggttactcccttactctgacaacaactcttaaagaagggtattatcatccctcttttagagcaggaaatggagtttcagagacgtgaatcagttagctcaaagccatgctgctagtgaatggcagggacaggttttgagtctcctgactgcaaacacggtactcaaccctcatggcctgcacggaccagtcctccttaaagttagctaagtgggctgggcatggtggctcatgcctgtaatcccagcactttgggaggccgaggtaggtggatcatgaggtcaggagttcgagagcagcctggccaacatggtgaaatgctgtctctactgaaaatacaaaaattagcagggtgtggtggtgggcacctgtaatcccagctactcgggaggctgaggcaggagaatcgcttgaacctggggggcagaggttgcagtgagctgagattatgccactgcactccagcctgggcaacaagagcaaaactctgtctcaaaataataataataataaaataaagttagctaagtgtaacaacagggtttgccaggtggtaaaggttatgaaggagaagcccctggaaggcccagtggcagaccccacccagcactagttcaggcttaagtggtcactcaaggatgagcaaaaagaaactgactcctcagggcctaatggtcacaaacaattctccagtgtggaaaaataactccaaggaaaagcactcagatcctggcttggtagtattggctttaaataagaagtcctcatctttcaagccagatccctcacctccaagcccagcctcaggcccaatctcacccgtgaaagcccactggtcagagtggctaacccattcctggatgccaggaacttccaagagaaagtgtttactggggtccctaaaagactaaggtgttggcggcaagacacagaatacttttagaaacccactagcttagaccagtacatttagttataagaaaagttcctgggcttctaatttgcaatctgaattcattgactttggagcggagggggtcagcatggaagaagagattagtgagagcagccccactgcctgcacctgcaacaggaggtgccgtccaggggcaaggatgggtgcaattgtttggatgagcctcacatcggctgtgagaacccacttcactacgtgcttgacccaatcccctaaatccctccatcaactacttgttaatacagactgagtatcccaaattcaggtatcccaaatccaaactgctccaaagtccaaaactttttgagtgccatcaaaatgctcaaaggaaatgctcactggagcatttcagagtcagattttataatgcaaacattccaaaatccccaacaattttctaaatctgaaatattcctggtcccaagcattttggataggggctactcaacctgtatttttaaatatatattcttcctcattataaagaggattagagatgccttctataagaactgtttgataaatcacaggtgggtcagcaacttttagtcccaagcattttggataagggctactcaacctgtatttttaaatgtacgttcttcttcattacaaagaagattaaagatgccttgtataaagaactatttaataaatcacaggtgggtcagcaatttttaaaaaaacacaagactataaataaaaaatggaataaaggatgaagctacatcaaaaatttctagcacatatgcttattttggatcaggcagagatttggctttgttttctagctgccatggcaaagcaaaaaatgggggaggagagacatctgatttgttagagaattcagtgatcataacaaaccagaaccatgaaataagccagtcacaaaaagacaaatactgtctgattcctcttagaggaggtacccagaggagtcaaattcacagagagagaaagtagaacgctggctgccaggaagtgtagagaaggggaatggggagttattgtataacgggtacaaggtttccatttgggaagacgaaaagagttcaggaaatagatggtggtgatggtggcacagcagtgtaggcactgactgctactgaactacacacataaaaacggttaagatggtaaattttatgtcgtgtgcattttaccgcaattctaaaaagttatgacttaaaaaagaaaagaaaagaaaaaaaaaaaaagccaggccctgaggagctgaactacttctccttctgatacgaagatgaggaagaagttctctaattagagttccaccaaaaggagacgtttaaggttgcaaatggcagcttcaacaacatgcttacaggagacgcatttctcagccttcagtggaggttgatggcttcacgctaaaatgcagttcagagaaagcactatggtggggcagggggatataatggcgtccaggtaaccaaacgggatggttcatggaggcaggagaggacatctgctcacgtgactgtgggagagcagcctgcctggccttctgcagaggctccagcaggagggaacttgtgatagcaccactgctgcccagtttgaaagtgagacatgcaaatatggccacttggccacccaccagagttaacactgatgtgatactcatgtccccaagttcttcagccttcaagactcgactcttcccttaacatgcaaacagctacaaccttagctcctatcccaggaggctgcaggaaagccagtctttagtgagcttctcctaccccagttgtttctaagaatcacccaggaatgcatccacgttccaaagatcaggcctgtttgccacatcaggttgccctggatggacaagttttccactgcctctaagtcacccttggcttctccaggtcgctggctcccccactgcatacaaccatacccctcctttagtctcccagaacataagaccaaactataatattgatcgaaattttctgaaagctcaaagatagcagaagggaattacaaaatagaaacagaaaggttaaacctcagagataggaagtcctaactatcttcgtccttaactcctaattt

SEQ ID NO: 97282 - DNA, 38322 bp, Homo sapiens
tgcaaggcagatcttataaagaacaatgtcggccgggcgcggtggctcacgcctgtaatcccagcactttgggaggctgaggcgggcggatcacaaggtcaggagatcgagaccatcctggctaacagggtgaaaccccgtctctactaaaaatacaaaaaaattagccggacatggtggcggacgcctgtagttccagctactcaggaggctgaggcaggagaatggtgtgaacccgagaggcggaacttgcagtgagctgagatcgcaccactgcactccagcctgggtgacagagtgagactccgtctcaaaaaaaaaaaaaaagagattaggacattgataggcacaggtggaacaccatgtgaacgtgaagacagccatctacagccaaggagatccctcatgagaaaccaaccctgctgacaccttcatctcatacttctgactgccacaattgtgggaaataaattcctggtgtttttgtgtgtgtttttgtttgtttgtttgttttaagacggagtcttgttctgttgcccaggctggagtgcaatggcgtgatcttggctcactgcaacctccgcctcctgggctcaagcgattctcctgtctcatccttccaagtagctgggattacaggcatgggccaccatgcctggctaatttttgtatttttagtagagacggggtttcaccatgttggccaggctggtctcgaactcttgacctcatgacctgcccgccttgggctccctaagtgctgggattacaggcgtgagccaccacgcccagccaaattcctgttgtttaagccacccagtctctggtactttgttatggcatccctagaaaactgatgcagtcatgaaggtggtggccaggacactaaggacaacctgaaatggtactgtgggtcattttgtgtcaacatcaattaccatcagaattgtttcctgtggttcccagccctcaaatgcacgtgtctctgataatttgcctcctcccctctttccttgtcatttgagtatctttcctccattctctatttagtcaggggaaaacaaagaaaaagcatgtgaatggaggacagtactgagaccgtggtagaggggatgtgtcctgtttctttcaatcacgaggtaaggaggaaatccttctgcaccgcgggcacatcactaacagtcccccagagtaggaaacacagggtaagtctagaagaggcgggtgtttcactaacggggagccccatggtccagccgcgttgagtcttggtgatggactgcctattggtgcaactctccagctgttcagctgttgctatggcaggtcccacagtggtgcctttgggtgcatgctcagtgtggctggggtggggatggggtggatgggggcaggcacttgtctccctggttgaagaatcagtatcacataattgagagactgattctaggaggattctagtggaaaagatgttcagcaaccattcctcagatgtctcccagttctactgaaatgtgccccagtccaagttgaccacaaatggggaggatgccaaaatgttccactgagtgactgaggtaaggggatggaatttaggtatttcatttacaaagaccgggttaaagtgaactttgttgtctccactagtctatatgttttttttttttatttttttttgagacagaatctcattctgtcgcccaggctggagtgcagtggtgcaatctcagctcactacaacctctgcttcctgggttcaagggattctcctgcctcagcctccggagtagctgggattacaggcgtgcgccaccatgctggcgaatttttgtatctttagtagagatggagttttgccatgttggccaggctgttcttggactcctgacctcaggtaagccacccaccttggcttcccaaagtgctggcatgagctaccgcgcctggccatctatatgattcttttgctaacattgtcccaaaatcttaggtcctccatctcacaaaacacacacacagacatatagacacacacacacatagacacacagagagatctgtatgatggctctgaaagtggctgaacacagatgaggatgaggatgaatatttgaagcttgggttttggtttctaaactattccccatctctttttttttttttttttttttttttgagacagtcttgcttgctctgttgcccaggctggagtgcagtggtgtgatctcagctcactgcaatctccacctcccaggttcaagtgagtctcctgcctcagcctcctgagtagctgggattacaggcacgtgccaccacgcccagctaatttttgtatttttagtacagacagggttccatgttggtcaggctggtctcgaactcctgaccttgtgatctgcccaccttggcctttcaaagtgctgggattataggcgtgagccaccgcgcccggccttttcttttcttttttttttgagacagagtcttgctccgtcgcccaggctggagtgcagtggcacgatctcggctcactgcaacctccacttcctgggttcaagcgattctcctggctcagcctcccgagtagctgggataacaggcgcccaccactaggcctggctaatttttgtatttccagtagagatggggtttcaccatgttggccaggctggtctcaaactcctgacctcaggtgatccatctaccttggcctcccaaagtgctgggattacaggcatgaaccacctcgcctggtctttttttttttctaaagcaatgtaagctactgaatttgaggtcagtccagtatgactacatacactcctttttttttttttttttttttttttttttgagacagagtttcactcttgtcgcccaggttggagtgcaatggcaggatcttggctcactgcaacctttgcttcccgggttcaagcgattctcctgcctcagcctccggagtagctgggattacaggcgtgcgccaccatgcccagctaatttttgcattattagtggagatggggttttaccctgttggccaggctggtctcgaactcctgacctcaggtgatctgaccacctcggcctcccaaagtgctgggattacaggggttagccaccgcgcccagccatttttttttttttctaaagcaatgtaagctactgaatttgaggtcagtccagtatgactacatatgctcaattttttatgagtatgaacatttatttctctggattccttcagcaaacctcattccctttcctgtcttgcctagggaaagccatttctttcaaaatgaagtgaggaatccacgtcagcttgcattttctttcctgttttctcagacagaagcaagcagagagccactaaaggtcccagtgaggaggcctgcagagagctatttaccattacagtgccgatcaatgggaaggcagctgcggtgcccaaagggggtcaggctgggttggatctgcgctcggtactctggtggtcgtgggaggaaaatcacagcaggttgggcctcggttcctagaaaacatccctggccatattcatctgtgggatattcttaccacccgggatgcacaggggaaacattacagggtgttttctgcacctctgctttattgagtgctgggtcaagtgttatgctgtcctttctttttttttcttttttctgacggagtctcgctctgtcacccatgctggagtgcagtggcgtgatctcggcttactgcaagctccgcctcccgggttcacgccattctcctgcctcagcctcccaagtagctgggactacaggcgcccgccaccacgccgggctaattttttgtatttttagtagagacggggtttcaccatgttagccaggatggtctcctgacctcgtgatccgcccgcctcggcctcccaaagtgctgggattacaggcgtgagctaccgcgacggcctgtcctttccatgcattatcttatttcatctttccagcaatcctgtaaggtagtcactctaaatatcctattttgagatgaggaaactgagtcacaggggggttcagtaatgtgctcaagattgcacagctggtgagtggtgacactgggactggaacccaagtgtgccttactccagagcccttggcatgcacctgaaaccccatgtaagcccactgtggagacgcgcacctcgaaataatggaatccactacatcagttcctttagctttctgtgtaatcagagtagctagcaggctcgggatttcgccccccggcttttttttttttttttttttgagacagagttttgctcttgttgcccaggctggagtgcaatggcgcaatctcggctcaccgcaaccttcgcctctcaggttcaagcaattctcctgcctcagcctcccgagtagctgggattacaggcaccggccaccacgcccagctaatttttttatatttttagtagagatggggtttcaccatgttggccaggctggtcttgaacttttcccctcttattataattcagacacttaacctgaaatataccttttcaaatgaagtaaatgggcttaccactttccttgacctactattgaaaaatacattctccatccaatattcagcctgaaaacaggtatgtacatatatacttttcattgcttttttttttttttttttgagacaaggtctccctctgttgcgcaggctggagtgcagtgtcatgatctcggctcactgcagccttcccctaatgggttcaagcaatcctcccacctcagcctctcaagcctgggattacaggcgagccaccgtgcccagctaatttttttttatttttagtagagactgggtttcactacattggccaggctggtctccagctcctgacctcaaagtgatctgcccgcctcagcctcccaaagtactgggattacaggcatgagccaacgcgcctagcctttcattgctttttaaagacctaataggctagactttgctctccctcaatactcgttggtagggataggcaattttctcaactccggagagcattcatttgcctctctccggtgctaacacattcagtggtaggaaactggatcttgaacaagggccattcattctttggtgccactggctataccacagagaaatttaggggtctgaaacaatacattggtcacctgggcacctatcctaagcaccttagagggaaaacggagacttgcccgcacacctctaaaggattttgcacttggagatgttcttatggccatctatcttttcaccctggtggaggccgtgaataggcattttccccatttaaagaaaaaatggggacgggggagggccgtgacacagtcacacaggtaaggggcagccagatggcagggagggggaattccacccacactctcggggactcatggagacgggtgttcgaatccagatcctgctcaaggccttcctacctcgggtgagcccagctgaggtaccagccactggggagcccggccagatcctgcagatgcagggtgccacggcgggcggaattaccggcgccagacttggggtgggatatggggagaagtggtgagcccggaaagcggagcacggtagaagtgggctgggtgggggctcacctcaactcccccattcggagcgtccgcggaaaaacgaaaacgttcccccgccccgggcaggaaggggttgggagggggggctggcgccccgccccagcgtcgcctgctcgatggggtcccgctctcctgcgcgcgctccccgccccctctctccggggcggcggcggcggcgcaggggaaggggcgggcaggggccgccgccggtttctcctcccaccgcctcgcgccagcccagccgagccgagccgagccgagcgggcgccgcgccgggctcccgccgcagccgcgcttcccggcacccagcgagcgagtgggcaggcgggcgggcgaggcagccgcgggggccgggcccggcgtcctcctcgccgcccgcagcgtccccgggcgggcgcgggccgcgatggcagcggcggagcagggctgagcccgctgcccgcccgcagttcccggccccgctggccccagtcatggcgaagcagtacgatgtgctgttccggctgctgctgatcggggactccggggtgggcaagacctgcctgctgtgccgcttcaccgacaacgagttccactcctcgcacatctccaccatcggtaaggggcggtggcccggggcgcccctccctccccgcccgcggcccctttccccgccgcccccgtccccagctggggaggaattgccagcccctccggctggaggcggtggcgccggaggccggagtccgggataaatctcggggtgagcataggttttggcaggtgagggtgtccctgctgcctgccgtccggaccaggggtggggtctcccgcctcttgccgggaagccttccgtcccatcaaaccgagaaaccgggggtgaggggagctggtgtaggcctgggtaccccgagctggggtagcaagaatcgtagccgctggaataacatccccacacccccagggggaggggaagtaaagcttctgctacggaaaagggggtcagggtggagaccggagtcactgaggcgcccttggttctgtggtgacccaaggtggagccggcggggggcgagggggggaagagaggacgtacggaggggccacagggatcgagtttccagggcagagttgggaaggtaagccgcaaggtgggacacctgggggaggacacagatagggtgaggagcccctgcgcctgggaagaggagacatctgttctgagggaggctaaagaggatggaggagtgtcaggaatacctgcccagaccaaggggtcagaaggcaggcaggacccgcctgagggcatctctcatctggcagtgctggagcctgtggttagagggacaagacccggtggcatcccagacagcactatgatggggtcacttattctaggaatgggtccatggcctcccctctgagacagtcagtctcccgcttctaggctgtgaggggccccctccctgagaagtctgagtagagggaatttcatcctcagctgctacccgggtcagccctggagtagcctctgcattgcccaggcccctggaaacacctgctggctggctggtcatccatttggaatgctctcctagaagtccctgctgccatcagggatgggcaccagctctcagcttcctcttgaggattcatgtccacaccatcccccctccccccaacacacattccttgctgagagagaagtaggagcagatagatacagccaggaggaacagaaccttctggttaagaagccagctttattgtccaagagacctgagacctcactgtggggcaaagcaaccttgaatattgcctaaacttctgagctttatttagtttctcatctgtagaacgggtataataattgcacctacctgccaagttgttgtcaagattaaatgagataacgattgttaagtgcttagcacagccagacacatggtgaagctcgataaatgctgattgttcttactgctattgccattatcattgagcttttagggtctcctctctttgtttcaccaacttgaagggtgaaacaacaggacttagggtcagggaacagaacttgtccgtctttctcagaggagctgtaaggccaactcttaggaaacccaggagcttgggctgagccatggtttggatgagagacattgcagaaagaaggggagcctatagacactaaggctttgtgcctgccgggaggacttggggaagaggcaggtgcaggagaaaggcatgggcgtgatggaggaagtggcagaggaaccagatggtgtatgaggacaggttgtgggctcagggacaaagggcggtgggttatcccttaaggaaactaggagtggctatttttgggagaggcctggtgcttggaactactgagctatctccagagagctgtgggctgcctgggaggccctggctttggcctgaagagctgttgtttgcacctgctctcctagtcccattccaagtcctataggtgacatggacttttccctttgagggcttcattcaaccacctcatttcagaagctctgggactcctgcttagtgctgtgggaggcagcctcccctgggagacacataccctcctttttgagggcacccctctttctaaaataccaggatggccctctgaggctcgtgctctccttaaagagagtccattgcctcacacctctaatcatccacccttctccttgtcccttccccttgtaatctcccttcttagacaccttctgctaataggtgaacactaaataggtcacagggacttcctgaaaccctccagggcagaccactttgggcacataggtgaatcagtgaactgagtaggggtgtctctgcagcactgtctcccctcaaggcccttggtatattggcctaaaacctaaagatggctcccagatttcttcctccgcttctgacacccgggttcccctttctacaggacacagaggattctctagggtccccctttccacaggacacagaggactctaggagtttggattccatggaatagaaagaaacctgtctttcttcacaccagccttttaaaatctgccccactgggtatcttaaatgctttcttatttaaagcttattaagggacttgggattctcccttatcttgggcgtgtttttcagcattaactaaaacttaaaggaaagagttggatggtcaagaaaagctttttccttaagtgatatggacagtttctcaaggaggtagaaggggcagccaggagacaaatcaaggagccaacgaaatgagtgctaccaagtcatagtcattcgcttatttttaaaaaatgcgtgtcctgtatgccaggctctgcactgagaccgagagattccaagatgaataatacctacagtcactgttctcaaattgtgcattayctaaaacacattacatgaccatgctggccactgatcgaggcacctttcccaggggctttttttgtgaattaagaaaacaaggtaattcaccagttattgccaagatagtttggcttcttggctcatgtggatatcacctaggccagtacttttgtgatttactgtgtactccactttaacggcctgcgatcttctagagaagaacccgccagggagcagtgagaggcctccctggtagactgagacactgactgtccctccccctatccttttcgtctttctggccagcagaccagcaggtggccctgccactggctctgccacaggcatttcctttctgtgcagctgtgctggcctggctgggggttggtgcgaaggggtccccaaaatactaccttaaacaaattaattgagcattcactaccaagctctgtgccaggcattttagagacatattgcagtctacgttttctgcccacagaagcccataacctagatggggaggcaagacaaagggaaaaacaaaaaacaaagagctagtgccaaaatgagatatctgaaagaacttggtgaatcactcttcaaatgtaaaggatggattatgatcattgcagttactcttaatgaaggtctcacagtgggtatcagaagctaaattatgatgcaagatgtaccatgaggcagccggagaatggcgatggatgggatgggtgagtgctattcccacgactccatgctgtcggaggctggggaagagagaggcccctgtggactagaaccggcagggaaggctgaagctaggcctcagtgtgggctgctcgtcagttcctgcagcagaagggagcagatggagtaacatgagcagagataacagaggtgggattgagtaggtgtccgtggggctctaggcagtttagatgcaacagaagggattcttcaggaaagtgagaagattcttctgtttctctctctgtctcccaaattataagtgccttgatggtgcgaccaaatcttattcctcattgtttttatagtccctagtacagggccaggcagattcaatgcctgttgttaaattaatgaatgaatgcagggaccagttggcagagggcattgagagcctggccaaggaggtggaacatgagccttagcaatggtaggaggggttttgagtagggtactaatgaggttggctggaagaaggggttaagacttgaagcagggagactagtcaggggctgcagtagtatctgggcatgaaggaacctctgaatggcccctcacccccagtggtaccaacaccaacttccacacagtcagttgttctactttccctccagaatggggagtggttcaagccaatcaacctggcaacttctgaaagaatcttatgggacctgtgccatgaccaggtagggagaagatgtcatacatggacatctatgttcaggggacctttgaggacctttctgcatggtggccaggagtgagatgatgtaaaccacaaatggaaactgaagagactgctcaggagttgttggttttcttttcttttctatttttttttttttgagactaggtttcactctgtcacccagtctggagtgtggtggtggcacaatcacggctcactgcagcctcgatctcctaaacgcaatcctcccacctcagcctctcaagtagctgggactacaggtgcatgccaccacattcagctaatgtttgtacgttttgtagagatggggtttcactatgttgaccaggctggtctcgaactcctggactcgtgatccaccagcctcagccttccaaaatgctgggattataggcgtgagctacctcactccctcaggagttggttttctccctcccatccttagtcttccctgagtagacctgtcacctagtccctggaccttttgttttgaaagccaccctccaggctacactccttctgggtgaggaggagggtgatctggttggacaggttgggctgctgtggcttcagggcactttctcaggctgggttgctgctgctatgtcacctttctcaaggagttctgctgggactggcttggctgcctgtcttgactttgcttttgactgaggaggtgggagatggtgagggagggggtggggctagatccaagcctggaatggggtgacctaacagacactggggcctgtgcttagacactaggatcctggggtttgcaggtttctagactgagaggagctgggggcaaatgcagtgtgacgttgtgagagggtcagggctgggtctgtgtcagccttcaggcagcctgagaccagtctctacctactctgttcccctggtacctagaaaggaagggaaggtgagaagcaatgagcagaatggaaagagcccagattaacatgcacatttcccatggccttactggccctgtgaccttcagacactttgatgacatctttgtgcttcgtttctgcatctgtaaattgaagatggtaacagagtctttcttaaaggttgttgtgaagattatagagcctagcgcatataaagcacttggcagagccctcgataaaataatagctgctatcatattatcattattattattttatttatttatttatttatttttttttgagaccgagtatctctctgtcgcccaggctggagtgcagtggcacaatctcggctcactgcaacctccatctcccgggtttaagtgattctcctgcctcagcctcctaagtagctgggattacaggcacccaccaccacacccggctattattattattcctagctataagaatgctgtagagatgaatacactgtcagtgagctaggaggtcatcctgtgtatccatcacttgtgcactcagtcgttcaggcgctatttgctgaacaccaactacatgccaggtgccatgctaagatttggggacacagtggtgaccaaaacagacagaaaccaaggagctggcttacattccaagggagtgcataggaagctgtgtttcatttcagtttctgctctagtacccccctttccctggcagtgccagggtctgagaaggaagagtgaggtggtgaggaggtgtgaagcagtggggtgacctgagaggagaggatggggtggctttgcctcaaggcttgggcccctgctaggtgtcgctctgcctcaggcctctgtttctcctcctgacacaggcacaractcggcctcccaccccttccccaaggacatgaccttgggaaggaacatatctgaagcccgcggagggtttccgctgctgtgcatctgtgccacagatccgcagatgcacccacagctgggagcaccggttcctcccgcctacctgcactccctggtttctgttccttcctcctcctccttccttctccccgctccccagacaggctggtgatgagctttataacatgaaagctgatatttggccattatccttctaccctgattgccagctcttctcagagtgccttcttctgtaatccaatctttgcaccagtttccctgtgaaactgccagttttctgtataggcctctgccctctccttggctcttctctctggtcagtgagctttgtcaaggggaacacagggcttcctggacacgtaattcctcccactgaggaggaaggggctaatcaccagccctgttttattttattttatttttttgagatgaagtctagctctgtcgcccaggctggagtgcaaatggctcgatctcggctcactgcaacttctgtctcccgggttcaagcgattcttctgcctcagcctcctgagtagctgggattacaagcatgcaccaccacacctggctaattttttgtgtttttagtagagatggggtttcaccatgttggccaggctggtctcgaacttctgacctcagctgatccacccacctcggcctcccaaagtgctgggattacaggagtgagccaccatggctggccgaccccatctcttaaaaaaacaaaaagaaaagaaaagaaaacaaaacaaaaacactttttaaattaactgattatggtggcatgtgcctgtagtcctaactactcaggaggctgaagtggaaggattgcttgagcccaagagttggaggccacagtgagctgtgatcacaccactgtactccagcctgggtgacagagtgagaccctgtctcaggaaaaaaaaaaaattactgagaactctgtgaccatggcaccatgaactatagaaagggctaacagttggctttgaaatgtgggttatggctgggtgcggtggctcacgcctgtaatcccagcactttgggaggccaaggtgggcagatcacaaggtcaggagtttgagaccagcccggccaacatagtgaaacctcatctctactaaaaatacaaaaaattagccgggtgttgtggcaggtgcctgtaatcctagctactcgggaggctgaggcaggagaattgcttgaacccaggaggtggaggttgccacaagctgagatcgcaccactgcactccagcctgggcgacagagcaagactccatctcaaaaacaaaaataaaaacaaaaaaaagtggtttgttttcttttctttcttttttctttttttcttttttttttttgaaacagagtcttgctctgtcaccaggctggattgcagtggagatctcagcacactgccacctctgcctcccaggttcaagtgatttccctgcctcagcctccagagtagctgggactacaggcacgcaccaccacgctgggctaagtttttgtattttagtacagaaggggtttcaccatgttggccaggatggtctccatctcctgacctcgtgatccgcccacctcggcctcccaaagtgctgggattacgggcatgagccaccacgcccggcctaaaagtgggttattttctaattgctcttccctgattaaaattttctctttgcccatcttttctctagatatgtactgacttcattcatccatttattcgtctcacttgctcattcatttttgctttcatttactctactttgttgaataatatttagtgatctacctgctgccaggcagtgagagtctgaagtgaacaggatgctgctttgccctctgggagcttacagtgtagctgggaaccagacatccaaacaagcagaatattatgcaaaagaaatgtcaggatgctttggaatcacagaggagtgagaaatccctcccggggaggctggtgaaggctttgaagaggaagtgacatttgagtggagtcttgaagactaggcaggattctccaggggccctgggtgtgggggaagcacacatcctcttccctgtaggaggtgctgtggagaacacctccagtggggctgctactcttcagccttgctggggccagctggagtggccacaccatggtcacaccagctgaagttcaagaagccccttgccaggagattgctttgctggctctgggtgagggcaggtgcatctggaagcccccttctttctaagatgtttgctcctgagtytctatgtcctagtcttttcttccctgaaccttttgctaccagtcagcacagccctgcctgagaaggaggctggaggagtgagtggtcagtagcctggtgggtcttggctgcctctgtggtgcccgctggcctaagtagcaggcttagggaggcgagacccagttccaggggctgccaatggggagcgagatggggtggctggagcacactgcacatgtcaccaaggctctagggaggtctgtgcacaaggcagtgggaaaagcaaggggaagacccagcctggtcaacatggtgaaaccccgtctctactaaaaatacaaaaattagctgggtgtggtagagcacgcctgtagtcccagctaacttgggagcctgaggcaggagaatcactttaacacaggaggtggaggttgcagtgagccgagatcgtaccactgtactccagcctgggtgacagagtgagaccctgtctcaaaaaaaaaaaaaaaaaaaaaaaaaaagtggggaaggggaacactgatcctgattatctactccatatacttactatgtacctactacctacacagggacggtgggctttacgcatgccatttattcagtgtatagagatctcagcatcacataggagcagggagttctgaagttggccttgctggcatttgagaagtttcttggtgtattcttcaggttcacgcctccagacaagtgtaagtgctattgaatgctgactatgttccaggaactaaaccagatgctagaagacacgcagtaaacagtacagatgcaggtgcacatgtgagggtccrcacaagacctgagagaagggaggggtcttgctgcagttccccttttgtaacaaaggagagagtactgttgaccctcttcctaggaactgtgagtttgactgaaatgtgtcctgccacaggatctttgctgcttcctctacctgattctttggatctccctgctggcaccttcttgtcatttaggtctcagctcaaatgttacctcctttaaaatgtcttctctggccagccagtctaaggttgcttgtgcttggggtctcctcactctctactttatcccgcagttgcttcttatcacatatggctctctgaaattaggtattcattacttayatctgtcttccccactagaattaagctctgatgacaaggatctttctgtgctgttcatagcttatcttctagtacctggcttagttcctggcacattgtaagcattcaataacagtttgaatgaatgaattaacaaatgaaggaatgaatgaatgcattttcctagaggacttctgttcttccctgagggaagttataggtcgtattggtttcttgggactgttttttgtttgtttgttttgttttgttttttgagacagagtctcactgtatcccccaggctggagtgcagtggcacaatcttggctcactgcaacttccgcctcccaggttcaagcgattctcatgcctcagcctcccgagtagctgggattccaggagcctgccaccacgaccagctaatttttgtatttttagtagagacaaggtttcaccatgttggccaggctggtcttgaactcctgacctcaggtgacctgcctgcctctgcctcccaaagtgctgggattacaggcatgagccaccacgcccggcctgttttttttttttttttaagacagagtcttgcactgtctcccagactggagtgcagtggtgtgatctcagctcattgcagcctcaacctcctggcctcaggtccaggtgatcctcttacctcagtcttctgagtaactgggcccactggtatataccaccacacctggctaatttttaaattttttgcagagacatggtctcactatgttgccctgactgatcttgaactccttgggttcaagtgatcctcacaccttggcttcccaaagtgctgggtttacaggtgtgagccaccatgcctgggcttgagactgttaagatgatgaggctggagggagtggatggcctcactgcttgagccctagagattccttactccagagtgccctggctgcagaggtggccctggagggtcactccagcaacctggctgagctgatgggcatcatctgataccagctctgaccctgaataataggcaacatggaccttagtctaaagcactgacccctcatctctgcatataccaaagaagatgagatttgggtgaggacacagccaaaccatatcagctcccgggatccctgtgtgaatggggtcttttttggtgtttgagggctgcacagggtgacctctttagaggtgacctcctgccacaacccacaggaggtgcacatggcccacacatgctggtttcctgcagtgggaggggctggggcactcctgggacctgtgcttggtaactggagctggcctggccctggggattgggtgtctgccttgggtttcaggtgtattaggttgttcctcgttgtggagtctcattactaatgaaaagytcaggtcgcactgctggtcctttgggctgtggttgatcctggtgataacatttggcacccagaggcagccctgtttccactgaagcatgcggagcttggctggcaggcaggcaagctggcagctgcccttaacccatgaggtgctggcccgctagtaggcacaccctacctgtgccagaattgaggttgtagccagactccaggagccatctgggccccacagggggcggcatttcctctttttgttgaaacattccagccaagtgctggcttgggcttcatctctctgtcccactctccttcctctccccaacataagcctccttctacatcctagagctctttccattccccctcctgcagctctgggctcgctaatctcatgcttccctaagggagcttgacggctgcttctgctaacatttaataaagttctgcgtgccagaccctgtgttatgggttttacaccttatctcacaatcttaaaaaaaaaattctctgagaatcctctgtcacccccactttacaggtgaggaaactgaggcaaagataggctaactggcttccccaacaccatgcaggtaattagtgataaaggcagggttggaaccaaacttgacctcccaattgtgctcttaatggccaggacactctgtgtcttgagccacacttcctccatgttttctagggctttctagggaggcagacagtgatgggaaggggtgttctttagtgtggatgtgcccygcctgctcctttctgtaagcgtcacagcacctccactgctgtactggggaggcaccaagtttttccctgtttgcccacccaaggcgagctagcttaggagtcacgtgagtgctgggtgtctcgcctgctgcatccctctatcctgcccctgcccccggtgcccagaggagggccctgcctgtcttcccagttctccaacagcagcgctgtcccagcaccctcgggctccagttgtggcctggcagctgctggggcagacaccatacagmcagagtcacagcaggaagaggatggggcccagggctgctgcctcaggccatggctgcatggcaccatcagttgattgaggagcttttcttgccaatgtctgaggcatcaggtggcaggacacgtctccctgctcttaagcctcaggcatgcagcccttcttatgctctctggggtgagggggagatccccctcatggaattgcttttttttttttttttttttttttgagacagggtcctgctctgtcactcaggctggagtgcagcctcaacctcccagactcaagtgatcctcctgcctcagcctcccgagtagctgggaccacaggtggacaccatcacacctgggtttttttgttttttgttttttgttttctagagatggggtctcactttcttgctcagtctggtctcgaactcctgggcgcaagcagtcctcccacctcgtcttcccaaagtgtttggattacaggtgtgagccactgtgcttggcctttttatttatttagaatttgttttggaattgcttctttatgcctggcactatgctggcactatgtggcagagattttaaaaamgagcaaacaaaacaaatgctttgtcaaccacaaaatgtattctctgccccttaggttctttttgtgtagttgaggctagaagacaaaaatagggggcagtaaggagcagggagcgatggtttaggaggtcttccttccagcccccttgttgaagcatctggctcactagcttgggggagccattaggcagcagtggccaatcctgaggcactctcaggtgtcactaagaaaaggggcatgtgctctatggatacccatgggctgaacttggagtctggtctggacccatggctgtgctaggatccaccgtccccagccccaactgcagtcagcatgttcatcatccttaggcctctccgcttctttctgcatgtttgtctgcctcatgccctgctcattaccaactggtcagtccccactgccctgcctggagtgagctggtttgattggcttagctaagctcccttgcctctgctggccaggtcaccctgtgggtcaccagcaaacctgttgatggtccagtctgaacctgcttctccacaaagaacatgttgcacccagccctgcttctctgagcagaggtttggggctgagctgttctagccagaaagggacacagggtgtggcaggcaccatgatgggcatatctaatgtgccgggaaaaacaatgagctgctctccgtgctttgggcacctggttgggagagggcccatctgtctgactttctcctcctggggctctcagcgtctccgagaacctctgccagagctgtgtagaagtggtttgcttgtttcttaacacttctgtgccctatttctttctgtacccaagaaaggaagtagactgttttgtagggacactgtcggggtgatgaatctggacttactggaatcatgaaccatgccaaggaggaaggagaaaataggctatggtgggtgtcttagttagggctggctgctgtaacaaaatgcctttagctgagtaatttaaagcaagagaaatgtattgctcagagtttgggaggctgggaagtccaagatcagggtgccagcagattcagtgtctggtgaaggctgatgctctgtgacaaaggtggcaccttctagctccatcctcacatggcagaagagggaacaagctccctcagacctcttttctaagggcgttagtcccatgcatgagggctctaacatcacgactgagtcacctcccaaagccctcacctcccaccagcactgcactggggattaagtttcaatatgggaattttggaggaacacagaccttcagaccacagcagcgggcttctcctcatgtgccccctgcctcacttctagatgccgcataatgtcagtgaaaccccgtctctactaaaaatacaaaaaattagctgggtgtggtggcacgtgcctgtaatcccagctacttgggaggctgaggcaggagaatcgcttgaacccaggaggcagaggttgcagtgacctgagatcgtgccactgcactccagcctgggcgacagaggaagactccgtcaagaaaaaagagaaaaggcatcaggtatgccagggtgtgcgggaaaaggcatcgggtatgccagggcgtgtgggaaaaggcatcgggtatgccagggtgtgtgggaaaaggcatcgggtatgccagggcatgtgggaaaaggtggtaagattcctcagcctcccagggttgggaagcctctggccgagtgaagcataccctgggtgggttttaagacaccagctttccagtccagctcagctgtgggatgtgggaacatgagtcagtgggaacatgagaattggcttccctgtggctcacaataatacctactcctgcctacttcatgggacccgcataagagctgagggattccatagctcaggggtatgctgtaaagacaagcactatgcacctgggtgtggttctgaaactttcttgtgcagaagagtgagtagggctgggcgagtcctgagaatgtgcatttctcacacacctctgatgctgctgatgctctagtcccttggctggcaagggtacctggttagtaggggccaggactctgtaatgccttccacttcagggttctctgggctggttttcctgactccccaggaagcctttattcagcagagggaaggtaggagtgagaggactacgctgtcagtgcttcacatacatcgtttaatttatcccagcacagcccttaggagggaagcagtattctccttctacacttaagaaaatcggcctggtgcggaggctcatgcctataatcccagcactgtgggaagctgaggcgggaggatcgctggagcccaggagttcaagactagtctaggcaatacagggagacctcatctctacaaaaaaaaaaaaaattagctgggcatggtggtgcacacttgcagtcccagctacctacccagaggctgagctgggaggattgcttgagtcctggaggatcgaggctgcagtgagctatgattgctccactacactccatccctggcaacagagtgagactccatcccaaaaaaaaaaaaaaattgaagctaggagaagttgagacttgcctgaagttacacagtaagtgccagaaccaggacttggaccaggtctttctgactccaggccaatggatgtttcttccatgacatatatagctcttgaaactacttctatctaatatcacccacagtgctgttaaaaatacagatttctgggcctcaccctcaaattatgattcagtaggtctaggcacgtcaaggtcattgtttttgtctttgttttaagtcaccccaggtgattctaaagccgaagctctgcaaagcacaccttgagaaacagagaactcttgtgctctcgctctcttgacacttcaggtgcaaaacttttgtcctaatgtcgttctcaaacttacgcatgtgtgagaatcacygtgagagcttattgaaactgattgcgggaccccatacctagagggcctgattctataggtctgaggtaaggcccaagaatttgcatatttgcatttcgttttcttttcctttcttttytttttttttttttttgagatgaagtctcaccctgtcgcccagactggagtgcagtggcatgatctcagctcactgcagcctctgcctcctgggttaaagcgattctccccacaccccagacccgctcctgagtagctgggattacaggtgcccgccaccatgactagctaacgtttgtatttttagtagagacgggggtttcaccatgttggccaggctggtctcaaactcctgacctcaggtgatccactcacctcagcctcccaaggtcttgggattactggtgtgagccaccgcgtgcggccagaatttgcatttctaacaagtcccaggtgatgctgatgctgygggtccagggacacactttgagaacagcttgttactcaggcgatatgtggacagtagcgtcatcttcacctgggagcttcctgcagcatctcaggccttgccctacacctaccagatcagaatctgcattttaactcaatccccgcgtgattcycatgcacctggaagtttgagaaatatgaccttagaggagccggaatgtgaaaccactggaggcagagatagatggagaatatctcttcttctcacggatactaaagatgcaacaaaaagggctgactctctgggtgtgcacccaggtgggsctgatgaccgaaaagaggccagatgtggacagaggactcttccctgagggaaggcagagagaacttaggaaaatctgaagaaaggaggtggcttcagaggaaaggcattcatctgggccataaaamagtggagaaggtatcctgctgagarcacaggggtggggagggggtgccctggagctgaagtcttcagtggggggacagtgataggtgaacacacatgtgaataaacagtttgctaagcagctgcgagggctggccaaggtgagaaagcatccgtctgcagaggcctcaataaggccagtgtgttgactttgtcctgcagtgctcagcagtggaaaaaaccaacagccacgcagggagagggaaggagccacgatgggcacgggttactggggccagggcttgactggtaggtggacacagctgaaggcccaggttgtgtgggaacagagcgcagaagcaatagattcctcttgaagatccttgggctgttaaccttttttaaatttaagagaggttgtgtgggcggggagggaggaaggaaaatccttcagaagacatagacttactctgtttcttccatcatatgtgaatgcatatgaatagccaaaaggtgaataaaacacatgttcccaggtggccagtgagacctaggttgcaagatggtggggtgtgtgtgaggccggggagtgctgcgagccccggaattcctcagccttagtcccccgccacatagctaagaagtgagggaggaggtgagaaggagtcactgcccagcctcacttccggtggagtaccctgtctccttgtcagttctgtctctggggacagttgcctgctttcacctctccctccatcccctcttctctcacagggaaaaattcaccttaatattggaagttcctctcctagcaaagtccttctcaggcacccacaggcaaaaaggaaactaagcagagttagggcttccakgcctagccaactacacgactctcctcttgcttccctaagaaccagcgcaaggggcagcgtgggttccagcatagatggacctgtgttggaatctctgcacgtgctgtgctgaccctggctagccattgacctctctgagcccttgtttcctttccactaggctctctgagggcaggggccatgtctttttcactgctctgtctgcactgagcactgtgcagggcacataggaagttcccatraatgtttgtgggataaaggaaataaaaccttctctcttcctgtcccccttgtgatggctttgcacaaggcactgtccttggccaggtttgctaggctagtgtgaggataaaccaggtatattacaaattggagaaaatttctcgttcttcttggaagaaggtgctgtatcatgaaacaagaatgtcttgattcccttctatgccaggtactggggagaaacaggtgcctgataaccgttgatccaggcagaaataagcatactcctgcttcccaaggcctgatgcttctctccttcctcccttcctccctccttctcttcactctttctctgcacacatggaagaatggctgccaggcattgcccatttggaaaagtacagctcaatggatatgaatcagcttgggcaggcgagaaatgattcacgtctgaccaaatcgatttagttcaggttgcccgttctgcatcttttttcccttgtaattaaatgatgattggtcttgatggtgggaaggaagagacagaatttaatttgtytgcctttgtagaaagctggggacagcacagataagggaagatgtctcccatttggcaaataactgatgcggaggtggagtggcagtggtgatggggatgctggtgccttcaggccttctgggccgggcagtgcagctggtggcagacggttcggaactctaccatgttcccatctgaaaactgtggctgatcatgcccactcctgaccttgctccagggagtacacaaagacgtaagcttaattaacccaccagacgtagctcttgaatccctgggcatagtgcctgggtatagttagagttggggagaggcatggtcagcaaaacaacctccctcatctctctgttgtcactcagagtcaagctggctgctgctggtggtgctgacttctcttgctgcagatttctccaatatgtttctgccctgcacgcatttgccaaatcccttcggtttcttgtgtctcgtggcagcttagctcctccagcccttggatgaagaagcgtgggaactctttgcttcctttccctcccgcagtgacatgccatgccatgccactgcctcttcatctggtcctatgacagtcactcataagcacccgcatgtacccggccctgcactagctcatgacagctgcagtcaattgggccaggtgctgtatctcatccggcctcctcagcaaccctctgagatactggtaatgtccctgatgaagatatttactgaggcagaaatggacgctcagtgaagcaaggtgcctgatgttatagcaatgagctatgagtggcyagagggaggagataagctcaggcctgacaccaaagcccatgctccttctagtcaaccacagtgcctcctatggtgaatgagtgagtcagcaaccaagacgcatgaggccttctttttggtgagccttggctgggtgctgaggcttcaggtacaatcatgggttggaagagccctcctctctctccacagtctggcactatgaccccttctggttattaacaaggcaaagagagagagggaagaaagcaggcaaataatgtgggttgctattcctagagattagaatttcaggaaggataaacacagcgttctctccagaagtataaataggaagacttcacacatgactagaacgagacatgttttaagtctgtcgagtaaggcagtgatgaagtagatttccccagattcactctccctcctctgggtcccccagggcctttacttgtggcaactttcagctcagggagggaggaaagcccctttcaaagcttcagatacttccttaaggtcagtttctgcttaaagaaggcctttacattacttcatccctttgccaaattaaactgaaaggaaacctttcaagtgtgattgcctggccctttcctgttcatttctcgtgggtacgctttctaactttctttctttcttcctttctycaggtgttgactttaagatgaagaccatagaggtagacggcatcaaagtgcggatacagatctggtgagctggggaggaggaggaggcagatgtrggagaagaggacttctggctgctccttagctgcccctgccatgtgtaaaattcctaggcttcacctgggataactggccacctctctgatggatggaagcgaagtctcagaagcccatctcttcctwtaagcmttaatctccaacctctaagaaactttaggggattgactacaagcaccaaagggcaggaattagaaggaactggcacactaaccattgtgaatttatctcaggattaggctttgcccttgggctgtgccacactatgttaagattggaaggaaggaggctacaccccccatcatttagggcgagaccctgagagagttcctcaggatagcatgatgaagtttccacagtagcagagggtgctgctgtggctctctgcctgaggtcttggaagcactgcctttgccagggtttagagctccctctcaattccacagcagtatgggcactgccttcagaggtcccatagggactaggggtgtagcagcatcccctgccaactcccatccaaccaaatctggccacagtggccagattccagagagctgtccaaggcctgttctggctgtggcttctggtttctgccaggagggcagttggcaggaggggccaaggccctgcaggcctggtcagcaccagcacagatgaccaggcctctgactgcagatccctgtggggatccaagcatccctggtttttcaccctttagctcsccagtttttcctacaaggggacagctctgctcttcccctccccgtctgttcccatggtccctgctcctctgagggactggctttctcctgcagggacactgcagggcaggagagataccagaccatcacaaagcagtactatcggcgggcccaggtaagccaccacattgggggtttcaaagtgggaagctgccacccacactcccagctctgggtatttgagatgtctgtgccacggatcccctaaatacagttcgcctgcttggaggagcgcagggcgtctttcagctgttcactgatcatttgtccgtccattgttcatggcccactcactgcaggcaggcccctgccctcacccctgacttccaccctccatcctgggtcaaagatccaggtcaaagcatgtggtgtcttcctgctgtagagagttctgtgatgggcctgggaggcggcagtggtggggtctgagagaagagatatttctggatgctgagcagggagaatgggagagtgggacccaacctttaagtttccacggccccttctggccccatgactgcactctctctgtgcatatcacatctctctatttctctctctctcaggggatatttttggtctatgacattagcagcgagcgctcttaccagcacatcatgaagtgggtcagtgacgtggatgaggtaggagatgccacctcactgccggggtgtggagagggtgcctcaccggggaaggcaaggcgagggccagatgggaaggcaaatgcttccaggaagctttgccttccacagccctggatgaagacctctgggtgagtaagacatggggaagaaaccgaagctgccatgccctcactctctataccctgccaggcctccacggctgtgtctttcccggaaatgaattagttccaagtcttccctgtgagcagcttctttcctgaaatcttgggaccaggtggagttgcaagattgggatctagtcctggctctgcacaatagctgtggagccttgggaagccatttgaatcctctgggtccccagttcctgtagaatgagggctggacttacatccaatgtcctttccagctctgataccagtggtctaacccaaggaagcaccagtcttagccagagtgtcttctaccctaagctctccccgtgatacccttgaggtcagccatggcacttgggggagcctggcacctgcatccagtcggcccaccctgtccctagggctctggaattggtggtgggctggaggcagtgcagactctgtagggaaaattgggggggcaggcagcactcactggctgttctgcccatcctttgtccctagtacgcaccagaaggcgtccagaagatccttattgggaataaggctgatgaggagcagaaacgkcaggtgggaagagagcaagggcagcaggtaagtggagggaaaaggcaagtccaccccaggtcctctgctgggcctccagggccagtcctgagcgtggggacctaggggtgtgttccccagtggcaggtcctcccacacgtccccagcaccccaaggccctgggggagtggccatcctcggaaggcttgttgtctgggtttcaggacagaagcccagagattcggggtccatccagaaacaaagacgtcataggcagcaactctcccaagtccaggtccccaaatgcaggattgccctctgcttaagagatcatccccgtgttagtaatgaaggacttcaagttgtcaacctcttctctgacagcatccaggcctagctgccatgttacggtcgagaaatgatctcccatcccacccaacactcccccactcctgtccttcttacccaggaaagagccagggaggcaaatgaggagacaaagagccacagctggagaagccatgggggcagaaagggtaggaggatgacgctgagggaatgtccaagcatgcagggagaccatcctcccagagagcagaaagaaatattggttattttttttttctttctttctttttttttttttttttgagatggagtctcgctctgtcacccaggctagagtgcagtggcgccatctcggctcactgcaacctctgcctcctgagttcaagcaattcttctgcctcagcctcccaagtagctgagattacaggtgcatgccaccacgcctggctaatttttttgtatttttagtagagatggggttttgccatattggccaggccggtctcgaactcctaacctcaggtgatccacctgcctcagtctcccaaagtgctgggattacaggcgtgagccactgtgcccagccaagattggtatttctgagataagttatccactcagtccgtggacctcaagagttttcctctcccttttcagtcaatagcgttccattagtacttaaaatgaaattgattgtttggtataaaatataagacatggtcattgaccaatttgaaagtagaggcaaagcctactaggatagtatttattgagcactctatgtgtggcactgtgctaaggcaagcgcttttaagtgcacgaccccactgaatcatcccacaaccatggatgggagacacactcagtctcctttaacagaagataaagctggggcttacagagaatgtacaacttgtccaaggtcacacagctagccatcagtggcagtgctgctattcaggtctgggactgtgggactccagagcccatgttttttacgaggatgccatactgccacaatggatggtgtctttatctcctgatatatgattgtgtgttgggaggcgtggggtggcagctggaagaatggagaggcatatttgtggaggatcttcccccattctctgctaccctctcttggagctcccagtcccatctgagaaattatctactctgagaaatcgtcacaacacagcatggttgtgagtgcagtggcagaagcctgtgcctggttgtatgggcccctcccctgccttactgactctctttcagaaatgtccttctcttgcagctggcgaaggagtatggcatggacttctatgaaacaagtgcctgcaccaacctcaacattaaagaggtgagagccctggtgaccargcgcccgctctctcgggctgagtccagcagaggtgggaggaggagccataagatggaccttatccctcaggccgctgcagggttgccaggggagaggaggagacactggactaacctgtgccctttggtttccagtcattcacgcgtctgacagagctggtgctgcaggcccataggaaggagctggaaggcctccggatgcgtgccagcaatgagttggcactggcagagctggaggaggaggagggcaaacccgagggcccagcgaactcttcgaaaacctgctggtgctgagtcctgtgtggggcaccccacacgacacccctcttccctcaggaggcccgtgggcagacaggggagccggggctttgccctgctgctgtcctctcrtgtgatgaccctattgagtatcagtagccactactccccctgcctggccctgagagcggctctgctgtcatctcaagcagcccctgtccccagcccgtccaccctggagtggtcttcttcagcctgtttccccagccacaggcctgctacgacccccacgatgtgccgcaagcactgtctcaccatcccgcacccaccagacaacagccagggctggagtccaggccactttcagctgctcctttctccgtgcatcgtgtctcttctctgctttttctctcttcccccacttctctttctctgacccctcccctccggtgcgtttcgtatcaaagctcctcaaaccccgtcccccgtgtgtcctgctgtgtgcagctcgctctttccttccttcctaagctatccaaggggatggacccaggctcgtggggaggttccacccttggatccaggaagaaccctccaccctgcctcgtgggtgggccaaaggctacagggtgcttcttcctcttcccccacccccactgtccctcatgtgccatgggcctgcctccccagtgacctgcgaaagtggagcatcgaggtaggagggaaacrgcaaccrgggagtcctcgagcctggggctgccctacctctacccattccccgaccagagctttgcccttgcttggctgcccgcctgcctctttggggaactgagctcagaggcaggtgcttcagagaaggaaacaaaatgaggggtggcagggataaaaagtcacctccattctctacctcccatgcagcatgaacacaatttctctccacctggctcccaaatttaaagatgtggaccaaggcctgtgggtactccaggggcaaggagagccctggggtcagtgacactgtcaggccaaccatgcactccacaaaggggagcatttggaaatgaaggactagctcctatgtatcaggttaagagcaagggagagctggccagggacagcagtttgcacagcagaggggaatgtagcaacagcagggcctcctaggccccatcttccatttcttaggtaagaagagcatttcctcagactcccaggcggaggactgagcctagccttcagcaaccaaggttctcctgggacccaaagtttatgggagaagggcaaagacttcatgggaagagagaaggaaggccctgggtagaaacgcttggtgctgttctctttggcctttaagacaaagcgctcatcttgccctctacctcctgataggcttgagggtttgccaaccacactgtggctacaggtggagggaagaggactccttcctccagagtgctatgttcaggaagtttctttaaccccatatggcccaagagtagctygtaggaggccctttaaagacggaacaagtaatttaccagttctactggggttcctgcccaccgtcccaaggtgggcgaggcctaggaagagggtcattcttaagccacacattagctgcactgcgtggctgcagccaaaacaaagaactgggtgttgagtattcatcaactaagaaccaaaatccagggcactcatatgtgaaggataagaacctcacttccttactcctccaaaaagaagtggggaaagaaccatcaaacctttcctcctgacttaccaaaccaggaaaacagcaggagagggtggctcaggacttagggacagggtatagcttagayggtggaaagcaaaggagagcaggaagttgtaaatcactggctaatgagaaaaggagacagctaactctaggatgaagctgtgactaggctggagttgcttccttgaagatgggactccttgggtatcaagacctatgccacatcacactggggctagggaagtaggtgatgccagccctcaagtctgtcttcagccagggacttgagaagttatattgggcagtggctccaatctgtggaccagtatttcagctttccctgaagatcaggcagggtgccattcattgtctttctctcctagccccctcaggaaagaaggactatatttgtactgtaccctaggggttctggaagggaaaacatggaatcaggattctatagactgataggccctatccacaagggccatgactgggaaaaggtatgggagcagaaggagaattgggattttagggtgcagctacgctcaccctaaacttttggtggcctggggyatgtcttgaggcccagactgttaascaggytctgctggcctgtttactcgtcaccacctctgyacctgctgtcttgagactccatccagccccaggcacgccacctgctcctgagcctccactatctccctgtgacgggtgaacttcgtgtactgtstctcgggtccatatatgaattgtgagcagggttcatctattttaaacacagatgtttacaaaataaagattatttcaaaccaccggtgtggctgcctggatgagtccttgggggtaggtctcactcagaccctggcagtgatgtgggagggagagaggcagtgctggtagaagcagctccagaagcaaaggcaacagcagtagagtgaccacggaagcggcaaacattgtcttcccttctctaccttccctagtgccacctgcagggaggcccaaagcaaagccccgttgccctgcattgggctggcactgcagaaataagatgaaacacagttatcgagaggatgctgaacatctatgagcaggttttaaagccaagatgagtctcatctgtttgtgtgggtcaggaacgggtcttcctgaaggcatgaggtgggactggataatctttcagatttgtgattggatacctcgggggagcagaggcagactgggatctcaggactgcaggtatttcatactttgggatatggaattgatggaggtggagaatattggggataaggactgaatgaagaaaggagtaggacaacgcaggacaacagtagtcttaagattttcactacactttacccggcactagtgatagataaactcttctgaccctaaccatcaccgtgtgagatggggagggtggttatctacccaggtcccacaggcaaggaaacagatgatcagagaacttaaagatttggccgggtgcagtggctcatgcctgtaatcccaactctgggaggccgaggcaggaggactgcttgagcccaagagtttgggaccagcctgggcaacatagtgagacactgtctctagaaaaaattagctgagtgtggtggcttgtgaggctgaggccagtggatcacttgagcccagaaggtcaaggctgcagttgcaccattgcactcctgcctgggtgacagagaaagaccctgtctcaataaaaagagcttaaagatttgcctaagggtccgaagtaacagtggcagaattgtggttgtaaaccactgaattggaatcactggagggcaaagctttggcatctctagaaaaattcctacaaacaattctcatttgcagtcagaattaagaaccaccaacccaggctttctgcctaagccagtgctgtgtccagagcaagcactgtcccacagaaagccataagaatcatacgctgcttagtgtatgcttaaagttgtaagcttttggaaagcgaggccagtttgaggtaaatttggagacagagatattttaggagagcctcaccaagtatattccattaggaaaggtgagaaccctgggagtctgaagggtccaaggtcacaccaggagaaaagggatggcatgtacctaaggaagagggaacccccacactcctcatcttgggaactcccatggccttcttgaagaaggcttgcaaaagagcagagaataagaggtgtctctggaggcccagagagtactagggggaagctctaggtatgcacataaatccggcaagttacagttctgcccactatcagtgccaagtccttgtgactcagtggcttggtggggactctttcttattggttgcttctaggaactccacccagcttcagcaggggacacacttccctctacacttcctgtcactccttctgtccacttaggtaatggaaacttgtttttagggagcagccagctgagacacatggtccctgtatacttgaacagccatggaaaagctgcaaggcagcttggcgctccctggtgataattacttcatctcatctcaacaaatcagattctcaagaccagctgctccccggacttgcttattctttgttccaaggagacagttcccaatggatgtgcccctgtgaaaacaccctagtaaacatttgctttgttattgaaatttcactctaaaatcccaaagctaggtcaagccccattgctagttttactgatgaagaaatcaaggcatttttaaaagagtaacttgttgagttggcgggtgcttgggtcttttcggtttctgtggcttccaggggtgggcctctgagatggcccttagcagatgtcctgcgatgcactgcacgcctcttgttgaaagcatcaggggtgacctgcctgcgtctggaaccacagcagcttcaacttcctccacacacttccttctgtgggaaggtgaccagcacaaacccgctctgaaaagtcttggggaccaaatctctgtctgagaggaaggtaggtgcagttcatccactaagtttatccacctgttctgtgactcctcttcaccattctcccagcaacgactgagcctcatgacttgggggctgggggatgaggtggaggtgggggatataatataggagatggtacagtgcaggggcagaggctggtgtgttctccaggacaagtggcaccacgcactgaaagacttttcaagataaacacaactttgtctcttcagcctggcaagagctgaggcactgaaaacttcttttttcccctagaaaatgacacactctcctcctaagggtccctttgattttgtcctggtggaaagcaacaaagagaagaacgtgaacaggaatatgtatatttcagttgtcatctgagtcccatggataggaggctcaattctcttcttcatctttcagatctccgcagaccctgccctctcactgtacaattcagagattgacactcagcaggcattcaataaacgtctgtgtcaaatgagaacaacttgatggggaagtaggagtcaatcctgcatccctccctccctttttttcctctccattcgacctttagggctctggtttcctgtaagcagtgaattatttacctctgctcatagatatcaaattggcccttcccaggttgcagcagggtggggcggggaggcggccttgttcagtctgttaataggaggagcaacctccttgttcaaacagcacttacaggtggggacctgtttttgctaagtcatcctggggatgctcaaagctccattgttagatcctttctgtcctccttcctggctcctccttcctccccacccctctaataggctcataagtgggctcaggcctctctgcggggctcactctgcgcttcaccatggctttcattgccaagtccttctatgacctcagtgccatcagcctggatggggagaaggtagatttcaatacgttccggggcagggccgtgctgattgagaatgtggcttcgctctgaggcacaaccacccgggacttcacccagctcaacgagctgcaatgccgctttcccaggcgcctggtggtccttggcttcccttgcaaccaatttggacatcaggtgaggggtccctccttgtaatgcaccaaaagtgttgggttggtgtagctcaggtgggataaaaggagaggctgaatgaccatgttttggagtgtctggaataatggggtatgttttgttaagctaggtctttaggtgcatgtgacataccaagagaaggtatatattttttaagattaaacactgaggctgtgtgatttttatagtttactgtctttctactatattactccatgagggctggttccaggtctgtgtttctctccactgtgtcctcagtgcctagggcacagaaagcactcattaaatatttgttgaataaatgagtggagaaagtagaggccaggaatcaaacaagaattggacagactcaagagaccttagctctagctggacttggttttgctatttaatggctctgtgccctcggaaagggcgcttcatttttcggtttagtttcctcatctgtaaattggggataataccacttagctcataggattattatgatgtttaggggacaggatatacaaaagtaacttgaaaaatataaagtactatgcaaatgcaagcaaactgttatttagattgaggatgatttttgttggtttaaattagccaagtggaaagaaaataagcaggaaagagaaaggttttcaaaaggcacgtgcctctgggcattacatgcacctatttctgattaatgggtcaagctgttatagatcttcagcccacacacctcgagttctcttttagggattcttctatttccacctatgattttaacgtacaagcagggagaatgaacccaagcgaaccctctcgttataatccccttagttcaattcacagtggtatgaaggtgaggaagacaggaaagcaggaaggctgaagcatcactggctgtgacaaacctgagcccaaactgttcactgctctcactgttcttccctaagttttctgtctggccttttctagagcaggagagacagaagtagcaaaccctctttcgagatgtccctccagccccagaagtacctccagcctcacaccatctcttcagcctagcaagttgctggagggagtctataacctaccaggagccagccagccatttgtatcaagaaatagaaatctgccagggtacagtggctcacacctataatcccagcgctttgggaggctaaggtaggcagattgcttgagctcaggagttcaagattagcctgagcaacatggtgaaaccttgtttctacaaaaaattgcaaaaattagccaggcatggtggcatgtgcctgtagtcacagctacttgggacgctgaagtagcaggatcgcctgagcctgggaagtcgaggctgcagtgagctatgattgtgccaccgcaccccagcctaggtgacagagtgaggccctgtctcaggaaaaaaaacagaaacaaaaacagagaagtccactagagatcagctctgggctcatgatgtcatgatggcctggaactgactgaactagttagttctcacaggtcagaagcaggaactttctcccagaggaaggtatctgtctgttaaattggaaaggtagaggtggaaaagaagggttcccataggccttttggattgtcatgaatggtgatgctgagagggaataggacagggatggcagtggggagggaaaggcagggaccaggttttgagccaaagcatgcgtagctgagagcagtgagtggataggaggtgcagcagtctttgggtagcagcctactcaagaaaagaatgataattacatactcacaatctttagccatcaagcacttatttcctcaactccccctccccctggcctattgccaaaccctaaatcctgtatcctatttacttcatgcctgttggttactaagtagttccatttagagtacacattcattgttgccttgaacttgctctgctgttatggcacctgaaaactagatgttcttggatgggggtcttccttcatcaaagcttcttcccatttgtacttcagttctaggacaaggcaagaagaaagcaagaagctgtaaatcccattcctctgggtctcaatttcaccctcagttcaaggagctgagtaggcagaggcaaaggctatactcaacacacgtgcaattgaaagcaggcgaggcaaaaccagggcagaggaaaggaaaggggtgtgtgtgtaggtatggatttatgggtaggtgggtcggtaggttagttgaagaggaggttctaagcagtataacctaagcctcttttctctttcttctgcttcaaacaccttaagaactgctcagggtagactggagacaaaagcaacagctcagaagtgctaaatcttgaagagcagccaaagcatgggcaacaaagtgagaccccatctctacaaaaaaaaaaaaaaattagccgggcatggtggcctgtgtctgtagtctcagctactaaagaggctgaagcaggaggaatgcttgagcccagaagttcaaggctgcagtgagcaacacctcgtctgtcttgtctctctctctttcacagtgaaaaagaatgaccctggggagggagtgtaggagggtgaaagagtttcatgttgtggatctttctcttcccccacccactgtcc

SEQ ID NO: 97283 - DNA, 21505 bp, Homo sapiens
tcacctgaggtcaggagttcaagaccagcctgaccaacatggtgaaaccccatctctactaaaaacacaaaaaagttagctgggcgtggtggcgggtgcctgtagtcccagctacttgggaggctgagagaggagaattgcttgaacctgggaggcagaggctgcagtgagcggagatcacaccactgcactccagcctaggcgacagagcaagactctgtctcaaaataaataaataaataaataaaaataagtgctagagttgaaaggtgaggagcggcctccaagaacaagactattggtgatgcatgctctacatttacccaaactcaagaggagccaggctgttatatcttcccaagctattaacaagtatttcggtggtcataacgtattaagagctgtaccatagagtcctggccattggcacaatgaaaactaacatttctttttaaagatttctcttacttttaacccatatttgaaatcacaagtgcaatgttaacttttacaatggccccaggagcctagaaaaaaggttaataacattacctattcttcattattttcttaatttcattctctgtaaaagcagctacctaacattactaaatttaaaattgcagacgaatctattctgcaaaatgagatgggtctcattttgtcacccaggctggagtgcagtggcacgatctcggctcactgcaccccaagcaatcctcctacctcagtctcctgagtagctgagactacagaggcatgccaccacacttggctaattaaaaacattttttttggccaggtgaggtgtctcacgcctgtaatcctagcactctgggagaccgaggcgggtggatcacttgatgtcaggagttcgaaaccagcttggccaacatgaaaccctgtctctactaaaaatacaaaaattagctgggcgtggtggcatatacctgtagtctcagctactcgggaggcagaagaatcacttgaacctggcaggcggaggttgcagtgagctgagattgtgccactgtactccagcctgggcgacagagtgagactgtctgggaaaaaaaaattttgttttgtagagacagggtcttactatgttacccgggctggtcgcaaattcctgggctcaaatgatcctcccaccttggccttctaaagtgttgggattataggtgtgagacacctcgcctggtccctattaggactttcttttttttttttttgagatggagtcttgctctattgcccaggctggagtgcagtggcacaatctcggctcaacaagctctgcctcccgggatcatgccattctcccacctcagcctgccgagtagctgggactacaggggcccgccaccatgcccggctaattttgtttttgtattttcagtagagatggggtttcaccttgttagccaggatggtctcaatctcctgacctcgtgatccgcccgcctcggcctcccaaagtgttgggattacaggcgtgagctactgcgtccagctttttttttttttttttttttgagacagagtttcccccttattgcctaggctggagtgcaatggcgcgatcttggctcactgaaacctccacctcctgggttcaagcgattctcctgtctcagcctcccaagtagctgggattacaggcacgcaccaccatgcccagctaatttttgtatttttagtagagacgggatttcaccatgttggccaggctcgtcttgacctcctgacctcaggtgatccacccaccttggcatctcaaagttctgggattacaggcatgagccaccacgcctggcgaggacttttgatgtcattaattgtaattctttattaaatatgttcagccttgatagcaacaagttttaagttgttatgccatttgagaatgtgactagagggacaattatgaattattcataactattatgacatttattacaatgataatgataaattattcttcacagcacttctgccaaatcagatgttcagagttgtggcagggagcccagaggcaatgtccttattttttcaatggtcatgccactttcagccacatttgcaggcactgctgactcctgttctatcctttcaaaacggacgtcttagacaaggtacagtctagaatgggtttggaaatgaaacatttatctgtttattatgtgtatcctttgtctatttacttgctcacacacagtaccttctttgaagacatgaagacataaatgattgagtgatattgccttctctgaggtcagttacactcaccaggatagcctttgagtccataggcttgccacttgctgacgggctgaagacctgctctatatgcattctgctcactgacagaagacacatttagctgagatttgatcacctggcaggaaggaaacagaagttaaaggactaaatctattttgcaggtcaaccccgggaacctcaaacctccaaagacatttcttgtatgaggcaaagctaggattcttgtttaagatacagaaccttgctctattgctcaggcgagtgcagaggcatgatcatagttcactgcagcctcaagctcctgaactcaagtgatcctcctgtgttggcctcccaaagcaatgggattagaggtatatgccactgtgcctggccaaagcaaggagtattaactctggggttaatcttagctgtactgcttacttgatctgggcattttagatgagtcatttaatgtcttagagcctcagtttctcatctatatagtaacagtagagtcacccaaaattaaggcaaaatggtaataagaaaacttaagcaggctaattttggctttcaaaactactttttcctatgacatcatacctttccaacttcttatggggctgaatcatgaaaggtgcttggtgtactgaaatatcttgagtcacaaagctatttacttcagttagggctaacagtaatgcttttgagacacttgtatagagttggtatttaaacagagctataaggaacaccaagctggacagggtgagaaaatgaaaagagaaggccggtcgcagtggctcacgcctgtaatcccagcactttgggaggctgaggcaggcggatcacgaggtcaggagtccgagaccaacctggccaacatggtgaaaccccgtctctactaaaaatacaaaaattagttgggtgtagtggcgggcgcctgaaatcccagctacgagaggctggggcaccagaattgcttcaacctgggaggtgaaagttgcagtgagctgagattgtgccactgtactccagcctaggaacagagcaagactccgtctaagaaaaaaaaaaaaaaaaaaagagaatgaaaagagagtgctgtaaacagacagaaaaaatgttgcagtgagacactgggaatcctgtctgctaaaagtaaaagctaaaaaatcctgtttgccctcttctagatgaaatgtccaactgacgctacaacttctgcttctgttaattacttagaaatgaatttagtatttcaggggctgaagttttctttgtatgtgagtatctaatggatggctcattacattggttaagagacccactatgcagtcattgaagtcaaaacattaaaggaaaaaacctttattcttccctgaatagtaaacctagggtctgccttgccttaaaatatatgaaacaggccgagcggtggctcacacctgtaattccaacactttgggaagccaaggcaggtagatcacctgaggtcaggagtttgggtccagactggccaacatggcgaaaccccgtctctactaaaaatacaaaaattagccaggcatggtggcgcgtgcctgtagtcccagctacttgggaggctgaagcagaagaatcatttgaacctaggagatggaggttgcagtgagccaagatcacgccactgcacttcagcctgggtgacacagtgagacgctgtctcagtaaaaaaaagtatatatattatatatacacacacatatatacacacacacatatatatatatatgaaacattctctttgaaagagaatgatcttttatcttatcaacttctccaagtgtggagattcctggacaaaataccaaaagtttgctgatgtataaccagtctctataataaaagggctatatgaaaccctctgacagtactatcagctgagttttccaggtacctaggcactggtaaaacacttttaagcattttgtcatgatttctttaataggccatacttaatactgcactataattcaacacactctcagaggtgatgttagtggacctattctatcatatgctaaactgaacgacaccactgagcttttataaaaggttttctctttcctcccttgccagactgttaaccaccactttccccaccagtctcatcagctggcttgtaatagtaacttctcttaattactactttaatctgctttgagctgaggaactaaacacccaagctttcatgtactcaacacatactgtacttagtactgttttaggtcctgtactagacacataatggctcattccctgatggctgacattctaaaaagcatgtacatattacggtaaaatgtaggtaaaaggagctgaatgagagtctgaagcgctctggagagaaaaagtatattattattggggtgtggactttctgtattttgacaactctaagaccactttttttccctaacaaatgaaggtgctgaaaagctgagctcaagtatgcaatcattaacacttaatactgtagcatcccaattttatcagagctgttaggaagcttggaaagaatgcctcatctagacatctgtggacaacaccaagagcaaattaagggactgcatatcctcaacgttaaagtggattgtaaagaaagaaaatataaattggactacagttttggttccccgttttccctcttgcctgttatgttcccttaaaaaaataatttttaaaaaatctatttacttgagaacaggttatgagactggctaattttttgtatttttggcggaaacgggggtcttgccatgccccaggctggtctcgaacccctgggttcaagcgatccacccgcctcggcctccgaagtgcgggattacaggcttgagccaccgctcccggactgtgttccccttcttaatctccatggggaaaagttgagagagagaacggtgcctgtattccatatatacttgtttgccatttattttcaacacggagggattctcagaatccttcaatgacctccttctaaaagagccagaggagaagacagggactagttttacgcacagtggcttaacaaacagcgccgcatccctgtcagttctgggattcctcgggagtggttttttttaagctgcagaagtctaccctaccgtctacaaagacgttctatggggttttacaaaaacccaaacagaaatgtgaggagacagttacagtaagaaataaacacggattcccaggctcttttgactgagcgcccccgccaggaatggccgcctaaagaaacaggcatctcaacgctttattgctaagtgtgacggttagtggggagttcgactctgcagccaaaggaggtcaggaatcgttcaataacaatcggtctggaggtgaaaagaggcgaagaagacacgtaagtccctccaagacgcggggcaaagcgatggagagacgcgcgccactcctctctctgtaccttttgggcaccaggacccttgccacgggctgcgtgggccgccgagaagtcgatgaccccttccaggtctgcggtcccgggccggctctgacggtagaagcggaaaagtttccgaaaggcgtcctccccgggctcagtcgccagagtcgccacagagcccacggccgctgccatcttccccatctcgcggcctataccctctgatccggaagcagattctctcgtgttccggatccggaaattttttccggggccgcgacctcggctcgagaaggtgctttagtctgaagatggcggcctcagcagcgmgaggtgctgcggcgctgcgtagaagtatcaatcagccggttgcttttgtgagaagaattccttggactgcggcgtcgagtgagtgatggagatgtgggagtagtggaatttttaggtccaagtgatcctcaaagcttctgctttttgcagggtacttaagtcagcgtggtggctgaattaggagactgctcctgagcatgcaagtgagcagaaagaaattttgtttgcagttaaccgtttagggatgtcccttgagcttttggggtcacgaatgcaccggctcttgcctttaggagtgatttggtgtaaagatttattacttggtaaccaagatttacaatttagaagggataattttgactgtagtgtggaggatggattcaaggtggcaagattgtaggcgtgcagaggagctaaaaggcaatttcattaatttacttaaaacgtgaggacctgaattagggcgatggtagaaggatggtggtcagatgcattaatgttttaaaagcaaattagatgccgtttcgtgatggcttaagtgggagaagtgtacggaataaaggaaagggagaaatgatttctgggtttttagcattggtgaattgtttgtttagaagttaggagcaggccaagagaagatgagtaaagtttgaatgtgttgactttgagaaacttgtgaggtttccgtcaggcaattggacaaaggttgtatatcattgtggctgagaagtggactccgaagctagaccgttggggttagaattccaacttggccatttaatcgttgttatcacttgaataactgaagttagtatgggaaaagggctcacaactgggcctcagtttactcatmgataaaatggagtcaataatacccaactcataggattgttgagaggattgagtttatatgcaaacttcttagacttgtgttagatacagtgtaagtactcagcaaatgatagttattttcacggtaactaaaattgaaacttacgggagaggcctagtctacagataaaggttggaataattagttctgaaatctttcaccaccttcaatttttgtcagctgcagttttgagatgaggtttttatatttgcttaccaacatgtaaacattcgtggtcactctttttgtagatattcatgtttcaggtcaacccctggaaacaaaatggagcaagatttagtttcttctaagtttttagtggctcagatgtgagtagtagaatgggaaataggttggtttgtgccccrtgttttaaacatgtggttggtgaagaccaagcccagtaaagtctcccgtagtccctgtgaaackttatggaaaggctgaggagtttcattagcatcttgcggatgcaagtttccagacaataaagggctagtttaaaacccttaaaaagagtcagcattatgtacagcttcgaaacagtttctctttgttgttccattgattcagcaaatatttatttgagtatctattctgtggtaggcattgttcttggtgcttgcagctgtttttccttcaccattttaggcaatttaggaagagggttaccttccagagctggtttgttttgaaatcagtgtcttctaggactttaattatctggtataaaacatatgtttaacattattttgttctccagtatcatattctgtgagaccttgatcttgccagttggtttgacttaaccattagagcccttcaaaatttagtctctgtggattkttggaaggattagtggacttttacttattcatttagccaatattgaggccctgctgtttattggtcactgtaaacatagtggtttatatgctgagggagcttacaattagtggtggggatgaagagacttagaacaaatataggcaattgttgaaccagtgaggttttggtgaactaggagaactaaatagatattataaaaagtaaatcagtgaagtacaagcactgtagttcagaagagaaacagatcgtgtagtttttagtctttaagattatatactctaaatctttgaagtctcacagggctggtacattgtcttgtactgtgataggagcccaataaagtaatactcagtggatgtacttggtttgggtcttgaaggatagttatagtgttacaagttagccagggggagataggattaccaacatatggaggggagagaacaacatatgcaaagagggtaacccgcaggacagataaagataattcaattagttgtactagagagtaactaggggctagcagtgggaaataaggcaggaagggtaggtgagggcaactcaacacattttaytaaattgtgaaagaccagtaagttgggattttatttggaaatcttcagtataccgggaaacrcactggattgtaatttgtctttttcttcattgtgatctgctcacagggatcatagtccacatagcacagtaactggtatgaaaacactcgatatttgctgaggatggagactgcagccaactcaacaacttytctgtccatctcaccaccaagtctggtacattatggctttatagtcagtaccatagctgcttcctaaatcttaagcctttaaggaaatgcaaagtagttcctgtccacaagaaatctggtgaccctgtcttyctacagtctaagatagagaatccaaaatatagtaactacttttaatgttttcttctgccacacaggtcagctgaaagaacactttgcacagttcggccatgtcagaaggtgcattttaccttttgtaagtattaaggaaaagtaggtgggaggtggggatggctaatgggtacaaaaaaaatagaatgaataagacctatttgatagtacaacagggtgactatggtcaataataattgtacattttaaaataactcagagtgtaattggattatttgtaactcaaaggataaatgcctgaggggatggataccccataagtcaaaggataaatgcttgaggggatagataccccatgctccatgatgtgcttaatttacattgcatgcctatatcaaaacatctcatgtactccataataaatatacatatttatatatataaatatataaatatatacacctaataatatataaatatatataaatatatacccaaataaatatatacacctactatacactcacaaaaattgttsaaaaaaaagcttaaagtgttttaaaaaattcttatcttgcaacagggtctcgctctgtccccctgcaggggtgcagtggcctgatctcactgcagcctctgcctcccaggcttaagtgatcttcctgccttggcctcctgagtagctgggactatagacatgtgccaccatgcccagctaacttttttggtattttttagtggagacagggtttcgccatactgtccagactggaaaatttttttaattttcattttctttaagagacagggtcttgttctgtcaccccaggtggagtgcagtgatgcagtcatggctcactgcaacctctgcctcccaggcttaggtgatcctcccacctcagcctcctgagtagctgggactacaggcatgcaccaccacacctgggtaatttttgtattttttgtagagatggggtttcgccatgttgcttatgctggtctcgtcgaactcctgggctcaagctatccgcacacctcggcctcccaaaatgttgagattacaggtgtgagccactgtgctggcttatttttgtggagatgggggtcttgccatgttgcccaggctgatcttgaactcctggcttcaagcaatcctcctgcattggcctcccaaagtgctgggattacaggcgtgagccactgtgcccggcctacagtctttattgattacattttgagtgatacttgattaaaaagtgaaaaagctttatcataggtatttgtgttagtttttttattgttgtataacaaaataccacaagcrtaatggctcaaaaacaacacatctctcacagctgagcacagtttagctgggtcctctccttaggatctcacatagctatatattccaggtgtcagctggggctgtggtgtgtctcatcaaagggtcaactggggaaaaagactgacttgcaagctccctcatgtggttggcaaaattccttttttttttttttttgagatggagtctttctcccttgcctaagctggagttgcagtggtgcagtctcagcttactgcaacctctgcctcctgggttcaagccattctcctgcctcagcctcctgagtagctgggactacaggcatgcgccaccacgaccggctaatttttttttttttttttttgagacggagtctcactctgtggcctaggctggagtgcagtggcgcgatctcggctcaccacaagctctgcctcctgggttcacgccattctcctgcctcagcctcctgagtagctgggactacaggcgcccgccactacgcycggctaattttttgtatttttagtagagatggagtttcgctatgttggccaggctggtctcgaactcctgacctcaagtgacccgcccgcctgggcttcccaaaatgctgggattacaggtgtgagccttcatgcccggccataattcatctttaaytgtaggactgaggtctgttttcttgttgacctttggctctgagttgggagctgctctcacctaggaactccctgcagttccttgttamctagtttatctgtaggctgtcttacaatatggcagcttgcttctttaaagccagcaagggcttctccagtctgcttaagatggcatcttatacagaacataatcacaggagtgacatcccattactttygctgtattcttttggttagaagcaagtcaggtttctcctmcacccaaggaggggaggagattatatagggtgtaacatggggaatgcatggagatcatggggcccatcttagaattctgcctactacagtattctaataaggacttgagatttctaataattggcagaggatattttaagttttatcttcattgagtaccattttcttttttagatttataactaataaaacaatatttttatattaattacatttcctttgctttcttgtgagggtttagaaatcagcctataaatttatcctgggctgtatttttctgtgggcttttttagggtgtgatgtgagtacatagagttcacacacacttcactgaaacccttttttccttgcagcactgtaagggctgtggtaaaataacaacataaaggaacttaaattcttaattcttggtttaatgttacttgactcccaaagactaacagattagttatatatagtgccggtgaaggtgtagggaatctggcactcaagttgttgagaagttcaactggtaccttcagttctgttgtgtagttggcaaaataccaaagttaagaatttatatttgctttgatctagcggttacttttctaagaatttatcctacagaaatgtgtggtcaagaatattccaaagcagcattatttaatgtcaagtaagaagaagaaacttaaatgttcatcactgggattgattagatattaagtcactgatgcaatggaattttatatagttgaatagaaaagttgggcacatgtattatggacatgaaatattttctgtaagtttgaaaacttcaattttttcaagagcatttaaataaaaagttccttgcaaaaaaatgaatagatttttattggtccataaataaaataggacctgcaaagaatagatcttagatttaaataaaaggcggctttgatgttggtaaaacaaaataaaatatgacaaaaaaaatatttttttgttccattcattgtactctagttggaaatcctggttccttttttgagacaggttctctcactcaggctggagtgcagtggcacaatcaagttcactgcaggcttgaactcctgggttcaagggatccttctgcctctgcctcctgagtagctgggattagtcgtgtgccaccacacctgactaattttttgtactctttgtagaaatggggcttcaccatattgcccaggctggtctcgagctcccgcactcaagcagtctactcacctcagctcccaaagtgctgtgattacargcatgagccaccacacctggactgagttattttttttgagacagccttgctctgtcgcccaggctggagtgcagaggcgtgatctcagctcactgcaatcgctgcctccygggttcaagtgatcccccttcctcagtcacccagatagctgggactacaggcatgggccaccacacccagctaatttttgtatttttagtagagatggagtttcacyatgttggccaggctggtcccaaactcctgacctcaagccatccatccacctcagcctcccaaagkgctgggattgagccactgcacctggcctatgttttaatataaacaaatttcttaatgcctttgactgtggaagtggtcacatgacaataaaggaatgctttagaaattgttgtatctacaatgaatggatcattgggacatcaccagaaactttccgtcttctaggttaatccttataaagttatccttgaagtagaggagcaattgtaagattttgttttttttggcaaagcacagcatgacttgaatgagactaatgaggaccagtttgtcatctacagggactagacatcttaatatctgttttctgtygaagggctggaggggcagggtacatccaagcactctagaatctgttttccgtatgcgatgtataggttgaaacttttgcacaagggaaaatagcaaaattgtttaaattaaccagaagtctgtaactaggttgagtaagggctaaatattatcttttcttgtttttcattaggaacacgtgatgatagtcgtggtggtggtgagggtgactggattcagaaatgagtgcaacaaggctttgaggcttaattttctagtttctagaaacgaagcttagaacaagagtactgatcaaaatttcccttagctattactgttagtatggtttgcatctagaatgacacagaaagctcatgacccgtatcttctctaatggcagcaaggaaaacaggaagcttaacaacacagggatttagccttgggtaatcaggaagggtgtaaagcaaggttactgacacttataaatgtctgtgatccgattttyggctgggcatggtggcttatgcctgtaatttcasyactttgggaggcccagatgggaagattgcttgagcccaggagtttgagaccggcctgggtaagatgggaagaccccatctctgcaaaaaatataaaaagaggcagacatggtggtatgtacctgtgatcccagctactgaagaggctgaggtgggaggattgcttgaacccaggaagttgaggctgcagtgagttgcgttcataccactgcaccccagcctgggtgacagagcaagaccctgcctaaaaataaaataaaattaaattaaaaagtccgatttttggcagatgaaaaagttggtagtttgatttggaactcatggaaactttctgaagttcatgattaatcttttcctatattttgaatttttaggacaaggagactggctttcacagaggtttgggttgggttcagttttcttcagaagaaggacttcggaatgcactacaacaggaaaatcatattatagatggagtaaaggtaaatttatttctatgccagatacatacatgatatacatgtaggtactatttaattatgtatcaattaaatagatcataaatgtggaatgatggggacttggagagatttgtaactgaagctgccttaatgcttgttaagaatggtggggtggaggctgggcayrgtggctcacgcctgtaatcscagcactttgggaggccgaggcgggcggatcacraggtcaggagatcgagaccatcctggctaacacggtgaaaccccgtctctactaaaaatacaaaaaattagcctggcaaggtggcgggcgcctgtagtcccagctactcgggaggctgaggcaggagaatggcgtgaaccccagggggtggagcctgcagtgagccgagattgcgccactgcactccagcctgggcgatagcgagactccatctcaaacaaacaaacaaaccaacaacaaaaaaagaatggtgcggtggtaggccaggcgcagtggttcatgcctataatcccagcactttgggaggccgaggcgggggggatcaccagaggtcaggagtttgagaccagcctgaccaacatggagaaaccccatctctactaaaaatacaaaaaaaattagatgggcgtggtggcacatgcctgtagtcccagctactcaggagactgaggcaggagaacccaagagacagaggttgcagtgaactaaaatcgcgccattgcactccagcctsggcaacaagagcaaaactccatctcaaaaaaaaaaaaaaaaaaaatggggggtggtagagtgcccagttttaaaaggtccaggaaagtacaagatgaccctttaatgggtagcaagatatgtaacacagtggacataacagtctacttttcttttttctttttgagagtcttgctcttgttgcccaggctagagtgcaatggtgcaatcttggatcactgcaacctccgcctcctgggttcaagcgattctcctgcctcaacctcccgagtagctgggattacaggcatgcgccaccacgcactgctaattttttttgtatttttagtagagattgggtttcatcatgttggtcaggctggtctcaaactcctgacctcaggcaatccgcccacctcggcctcccaaagtgctgggattacaggcgtgagccacagcgcctggccagcagtctgcttttcaggtcaggcaagctggggctgaaatcttggcttacccaccatgtgatcctgggccaaactgatttactattttattttaaattttagttttaatgagacagggccttgctatgttgcagggtggtgttgaactcctggcctcaagcaatcctcttgcctcagcttgccaaaatgctggcattacaggcctgagccactgcccctggtctgatttacaatttttaattgagggttagggagtcataataccaacaaagatggtaaaaggaatttgaggagaaaaygaaagaacaagggacaaataaaaactgcctgggttattcattattcatactgactccctaataaagtgattttcagtttgaatgtttttgcagacattgcctttcctcccttacagtgcttatttttttaaggtccaggttcacactagaaggccaaaacttccgcaaacatctgatgatgaaaagaaagatttttgagactgcagcctattaataaagttaacataactgagaattttgtctaaatgtttttatttgaaacaaatagttgcaccaagcaagaggttactttgcccactccaaattaaaacagagcacaataggggcaaaatttatttggcaggacagttccagtatgtgaacatcttcctcctcactgtggttggggtaactttactcatatgcagctgttcttacacaaaacattaaccccaaactactagtgtcacataaaagtaagtggtcttgactttgtatgtggggcagcatgttctataaatgctgaaaggtgggagaagcacaaacacaacccactctttaaaaaaaactaaataattcaaagtagaattttctatcccccccatttctccagtaataaaaagtagtgctgggatctggcacccagatttggtttttatcctgaccatttacaaagtgttcccccatatgacttgcatcattagggttatgggtaagagttcattcactttggagagacctgtgcctattccttcctcctcttcttgccttcatgctcgtgttccttggggcggctgctatctgagggtcttttagagccaccatgctgtttggcttcttccaaaaacttgtccaaaccaaaaggatcttcctcaaactgaactggtccttctcggcctctctgtctacggtctgaaccagaaaactccttgtcgggaacaaatctaaggaaaaggagaaaaaactatgaactactttgctttcaccagtgtaaacactgaaattgagttgtatggcttggcacctgttggtctttattctggcttctaggtcatcaccatacatgtccttgtccagatttttactgggcctataaatactctgggccatatctttaccacctctccaggcttgatcataaacattataaatttcatcttctccacctgcaaatccactgtccataccctgtggaaaaatggatgacattaaataaaagtgtaaacattgtttatcaaaagctgaatcataacatgtttacagtaaacccttgctaatgtacagctcacattttcaacaatctgaactgcaaattaaaaagtcttcattaaaaaactggtagcacatgaacttcataacaactttggattcttttttttttttttttcagacagagtctcactctgtcacccaggctggagtgcagtggtgtgatcttggctcactgcagccaccgcctcccagttccagtgatcctcctgcctccgcctcccaggtagctgggattacaggcatgtgccaccacacccagctaatttttgtatttttagtagagacagagtttcaccatgttggccaggctggtcctgaacccctgacctcaggtgatcgcctgccttggtctcacaaagtgctacatagctcactggagctgtgacctccctgtgctcaggtgttcctcccacctcagcctcccaagtagctgggagtacaggtgtgtgccaccatgtccagctaattttctgtagacagggttttgccatattgcccaggccggtcttaaactgggttcaagcaatctgcctgcctaggtctcacaaagtgctaggattacaggcgtgagccacagtgcccagccagaaatattttcatcacaatttttaaatgttttaagcttaagcttctaacaggtgattatcttgaaaatatttacttacgtgaaatttcacccctagatccctttgctcagctggtaagttgccattgtatagtggttaagaaagctttgaaattggctgggcacagtggctcacgcctgtaatcccagcactttgggaggccaaggcaggaggatcacgaggtcaggagttcaagacccgcttgacccaacgtgatgaaaccctgtctctactaaggatacaaaaattagcctggcatggtggcacatgccctgtgataatcccagctactcaggaggctgaggcaggagaatcccttgaacctgggaggtggaggttgcagtgagccgagatggcaccactgcactccagcctgggcgacagagtgggactccatatcagaaaacaaaaacaaacaaaaaaaactttgaaatcaagacacccagtttgaatcttaattccatcagtcacaagctaaacctgtgtttcaatttcctcatctataacataagagataatagtattatttcataggatttttgtaagaattgagataataacaagacttagaacaatgccaagaatataaaatgcatctaataaattatcacttagaagagcttacttaaaacctccaagtcataattaagtttcccactctactttccagtagaacttacacttctgtattcttgtgtgtgcgcacgcgcccgcgtgtgttttcccaggcttaaagtgtcctagttagctaatggcaattggtactagaaatcagatttcctgacagccagcctagtactttaatcccgttttacagcttcatttttaaaagaatcccaaattgatatatttctatagcattaaaagaaaaatccaaaaatcaacaacaaaaaaacccaaaaggcacttttgtaggacactgactcttttatttttttgagatagagtctcagtcacccaggctagagtgcagtggcacaatcttggctcaccataagctgaagcaattctcgtgcctcagcctcccaagtagtggggattacaggcgtgcaccaccacacctggctagttttcgtatttttagtagagatggggtttcaccatgttggccaggctggttgtgaactcctgacctcaggtgatctgcccgcttcggcctccaaatgtgttgggattacaggcaaaagccaccatgcctggcctccctggttctattttagaaacaaaaggttgacataccacaacaccaagtttttaatcacctaatttctttcttctcctagtgtctcaaatctcagcccactataagaagttaaaatcagaactgtttcatcttgtctcaagtttcaacatacaacttccaatttttttgtcatcatgctggcatttacatccaaatgtaaagtatgttaattttcgtttccctgaggataggtattcacatcaacacacacaatatgctgttcctaaacttgtaccttggattggttgaagagcctttggtcatactgaacttcattggaagtccgaggattaggaacaccgagagcaataacttcactgatatcccgattttcatttctctgaagtttcgacctattttgaaatacgacatcactaactgaaaactctttatagacaagctgaatatgttcaatagaaatacaaccaatctcagaaacaaaggatgtgaatatgtcacattcacatcttgtgaacatatattccttgatgatacatcatcaagctggcagcccttataaagcatttcagattagagggagagttttacaattaggacgtcctgttagctcaaaagaacatctaacagattcgttgacatggaattctttaatataagcaatcaccttacaaccatgctgagatataaaattgctatggtctatatttactatcattatatgatggtttgggggttggggaagtggatacaatttagatgtagcacacgaaacattttaaataagctagaaacagctcttttatctaaccacatttagtaattttatcccactagaattttgaggaaaacatgtcaatgactgaattagtatgatttttgacattcagattaatttggtttcctggctgttgcattatatatgcaacctacatcccaatgaaaccatggtaactgtcattacttgttttactaaaaactcaggtcacaaaatgatttctataggctgtttgattttcatccagttacaatttcacagcttttctatgttgtcaattctgatagccactttactcgttttgagggcccaatttatccacagagccattgtaacttttacaacttaggaattactaaccaagactgtcattaattaaacactttcacactttgctcctccttctacatgtactttaccctcaactctcaagagtaagagtctttgcttctccatgacatcatttatccagggagatgaaatatgccaattaataccagcaggaatctttttcatgcttatttatttttatttttttattttttattttttatgacacggagtctcactctgtcgcccaggctggaatgcagtggcacgatcttggctccctgaaacctccgcctccagggttcaagtgattctcccacttcggcctctcgagtagctgggactaccggcatgtgccaccacacccagctaatttttgtatttttagtagagatggggtttcaccatgttggccaggctggtcttgaactcctgacctcaagtgattcgcgtgctttggcctgccaaagtgctgggattacaggtgtcagccactgtgcccggcctcttttttgtgtttaaaatatgacttgaaaaatgtattaggctcatgggatgatcagagcacagaaaactgttcatttgggaagaaaatattctatatttgcatttaaccctcactcagaattccaccttagtattgcagcgttccctctacttttcagaacttttagtcctcagcctttggtgagccataaacttccccaattcctactttactctatgccctcatatatatatttagtttgttctatacgtttatacttactaagagtgctttgcaaattttctcaaattattttatggatagctctgtctttctgaactgtaagttaaactactcctaaaaatgagctgattttctacttctttcaaaactgctcttctcctcaattgtactagatgcagtactatgcatataaaatgatctcaataaaagcatgaaagcttatttcctgtctaaagaggcacataatccatttatctcaccatttgaggtagaaaaagaacggactataacagtccaaatttactactacatccttttcaaaaatctgatctcgattccgttttctatattcccatcattctcaattctgacttaagtgatggaagattaattccaaagacagtcaactagagctaagacaaagtagttaagtacaagaaaattaagtgctaatttattaagttatcaaactaaagaagaaagggagagaagcaaaactgatcttagtggactaaaactctgctctaaaaggtacaaaaaggccactcttcatgattggtacatatctttttttttttttttttttttttgtgagatggagtctcgctctgtcgcccaggctggaatgcagtggcgtgatctcggctcactgcaagctccacctcccgggttcacgccattctcctgcctcagcctgccaagtagctgggactacaggcgcctgccacgaccatgcccggctaattttttgtacttttagtagacacagggtttcatcgtgttagccaggatggtctcgatctcctgacctcgtgatccgcccgcattggcctcccaaagtgctgggattacaggggtgaaccactgcgcccggccaccatgattggtacacatcttaaataacacctacctcttatcaggagctgccctggaaagattccggtcatgctgtctctcttttcgcctgtcatgccggatttcatccctctcacgtgcctccccatcctctgtgtgaacagttgaaaagtacttcactgtaatatgtattatatgtgtgcatacgtgtacacgtgtgtatatatataattttttaaaaagagacagcatctcactctgtcacccaggctggagtgtagtagcatgaacatggttcactgcagccactacctcctggattcaagtgatcctcctgcctcatcctcccgagtacctgggaccacagatgtgtgccaccatgcctggctaatttttaaattttttgtaaagatggggtcccacttatgttgtcgaggctggtctcaaactccaggctctagtg

SEQ ID NO: 97284 - DNA, 20500 bp, Homo sapiens
gtgaagggctattattccaggacccgcaagcctgagtcagaaagggccacacccacccctgtccatccttaaccattgcgacctctccccgacttcaaggtcctggaaatggaaacgtgagtggatgtgataaggtgtgtgtgaaggaagaaccagacgccgggagagggagcttcggatcgcagctgcccgctgaagcctcttctggggaaataacctgaggaccgatgacctccttacatccatgcccggtcccgctccctcactaccagaattccctgctactaactcccagaatcccctgctactaacattttagggctaatcgacctgagaagcacaccctgggggcccctggcggctcaccctccttgtcttccccaccggctgccaggatcactccgggaccaccacgccaacggctcaccaaggcgcgcaaacctccgcgcccggaagtttagtgtgtagctgctccttcgctgtcgctcatgcccatcacctccagctgaccaatcagagacggcgcctcggcccgggcccgcccagaaggtgggatttcaggacgcggttgtccggcaacccaaaagctttgggttggggatctgtccaggaactcggctgggcctccacaaacctagccctcatcgcatctcagtcaacaagcgcaaccctcttctcattttctcatgaggagaaaggcatagacgaagaagtacatggggatacattcaatcattcaattaaatactgactgacagctactgtgtgccaggcacctgttctaggtgaccaggcaaacatcagtgaacaaaacaggatccctgtcctgaggagcttaattctggaggtgagagacaaacagcacacattaaacatcataaatagcttgtaatctcagcactttgggaggccgacacgggcgaatcacttgaggtcaggagttcgagagcagcctggccaacatggtgaaaccccgtttctaccaaaaatacaaaaattggccgggcatggtggcgggcgcctgtaatcccagctactcgggaggctgaggcaggagaatcgcttgaacctgggaggtggaggctgcagtgagccgagattgccccactgcactccagcctgggcaacagagggagactctgactcaaataaataaattaataaataaataaataaacatcataaatatgttgagtaggatacatttaacctttctgtcctttttcattcagttctccttaaagtttgggtcataacaatctggaataggggattacggggcataagtgcacaggaggtcccaatggaggttatgtctgcttctgggcttctggaagctactcaccggtctcctttactaagaaaatgtcaaataatgcttgaacaaataaccagctaactacacaaataaagcaagagcacaagcaaaataactcatggctccagaattacagttgaatcagtcaatctaagccaaatggccaaactacacgaatttattttgggaacagggaattgtcaagggggatgtggatgaagatggttaaaattagagttgatgtgtaaacatttgaatccagctacccttatgattcatgtgtgtgaaggaaaactgtggtgtttattgatcctctgtggattgactgtatacattacacctcttcataacgtaaagactccttatgtgaatatgccaggttggcagacttgacaatgagatatgggtttgtgacagtaggcacggaaattcatcattctgctagttccccgctagagtgaggatccatatcctagagaatcatacaaccttagtgctgagaggtggggggttggtggtgaacaagctggattgaatgttgtacttggcaatatttgaaaataactctaaatagagtatcttgctaatggtatttctttctctaaaattcatttaaaaaatagtttatagaattcaaaacttactgagtgtctaatacgaatggggcactctaggatatacaaagatgaatgatataaaatctttgccctcaaagagtttttaatttagtgtaggggcacaaatgcatgcaaataatgacaataaaatatatggcatgataatttaattccatgaaaatccattgagagctcatcaggaaccagccctgtgctataacaaggacagaaaatattacaaaggagcaaacaaattaattctgattgggaagacagggaaagagttcttggaggaaacagcatttaatccaaggtcacacaaccagtaagtgatggagctgggatttggttccagagtcaatccccatgaatgctatgctctaccagctcccagtatgtggagcttagagtaatgtagtaccatggagatgaagaagtacaagtagccagttgtggctagaccaggggtttgctaccctgcttgtgcatcaggatctttggggaagctttaaaaatgttaatcctcaggcctcacccctagatattgctttccaagtagtcttaacacacagtcagggatgagactcactgggttgaactctgtggcttattaaggggaggcaaaactgaaaaggtaggctggacctaatctgggaggtagagatgccatgctaaattatgcatttcaactttattctataggtaaagaagaagccactggggagggaaatggtaggatcagaagcatttagtaattagcttgatttaatcactgcacaatgcatacattatcaaaacatcactttgtacactgcaaatatagatataatttttgcttgtcaattatattttaataaagctggggggggtggagaaatatttagactgattattttgcctgcagcatgaaggatgggtttgaagagcagatattgaaggcaagagcagaagttaggagggctatgccatcccaaggagaagtgaggaaaaactcacctggggcagcagaaatgtaaaggaagagtcatatatgagagacattgcagaagtaaactcaataggccaggcgtgatggctcacgtttgtaatcccagcactttgggaggctaaggcaggtggatcacctgaggtcaggagtttgagactgatgaaaccccatctctactaaaaatacagaaattagttgggcgtggtggtgcacacctgtacttccagctactagggaggccaaggcaggaggattgcttgaacctgagaggcagaggttgcagtgagctgagatcgcgccactccacccccatctggatgacagagcaagactgtctcaaagaaaaaaaggaagaaaactcaataaaacttgtgattagttagaaggaagaggcaacaaagagggaagcatggaagactgatgctgtgagcatgcaagggcacactggagaggcagatttgagaatgggagaggatcagagtttatgttgtcttacagaatttgaggttcctaaggaacaatcttgtggaggtgtcaaatgggcagtcctgaaatttgagtctgtaactaatgagaaagactaaagctaagctggctgtcatttaaacacaggtgaaacctgaaatttcagcatttggttgaaatcattaaagaagagaatgtctggaactacacacacacacacacacacacacacacacacacacacacatatatatgaaataagagggcttcagaaaacacttaaatttagggagtagatggggaaaagataaatgccagacttggaagaagatggagcaagaacatgaaagaagaaaccaagagggcacaggagaactgagaagagcattctaagtgggtggataatcagtaatgtcacatgagtaggctgaaaaaatgaagcttttgtctttggaaagtcactggtagctttgtagttaaataaagtggagaaagtagaagccaggccacaatgaactggacaatgacggggagatgaggatatgtgggcagcaaatgtggagatttccattaagaagtcttgtggagaagaggagaaatgaatgggactgtaatatgaaagttaggtcaagggaagtaaggtttgttttgcaggggaaagttgagtatatgttaaaaccaaagagacagagtttatggagaggtataacttgaagttaacaagatgcagacagggtgccgtctctcacgtctataatctcagtactttgtgagactgaggcgggaggatctcttttgactccaggggtttgagaccagcctgggtaacaaagggagaccctgtctctacagaaaaaaaaaaaagaagtaagctgggtgtggggggcacacacctgtagtcccagctactcgggaggctgaggtgggaggatcacttgagctgtggaagttgaggctccagtgagcagtgattgtgccactgcacttcagcctgggcaacagagtgaggccctgtctcaaaaacaaaggccaggcccggtggctcatgcttgtaatcccagcactttgggaggctgagacaggcggatcacctggggtcaggagttcaagaccagcctggccaacatggtgaaactctgtctctactaaaaatacaaaaaattagccaggtgtagtggcagacgcctgtaatctcagctactcgggaggctgaggcaggagaatcacttgaacccaggaggcagaggtggcagtgagctaagagtgcgccactgcacttcagcctgggcaacaaaacagggcgagattccgtctcaaaaaacaaaaaacaaacaactttaaaaaaccccaaaaaccaacaaaacagaaaacaaaacaaaacaaaaatgcaggggtaaagtgatggagtcaattcccggagggtactgaaaaggactaattcaagagaactcaatggaactcaatggaaagtcgcccttctttctcatagaggagagggaaggagagagagagaggagagagggagacagacagagacagaaacagaggagagagggagaggaggaagaagagagagagacagagagagagagaaagagaaaaagaaagccggtaaattctgctgagggaagctgtgggagttgataatcgggaccctgagtggagtgggaaacgtctggagctgcatatacggagaggcggtagagtcaactagggatgaaaacgaggaattaaaaaaaaaaaaaagactgatctggagggtccaccaaggaatttccttgtaacgggtaacagctgtaatatgacatgttgaagtattaacactgatgactgctgtctacattattttccatgtgcatgaattgagtagttacagggaaaaagcgaactgcctgttccaaacggcttacacagatgaactgaagcgaagaagaaaaatgaactttcttttgatgtcaacaagatagagtatcatttactgttgaagccaggttatactgattattttcgatctggtagttaactttatcatcattacatttggctgagtcattcctgggccctaagtagagacggctagaattaccacgtgagtaaaacattataatatcaaaataattagattggccacaaaaactaccacggaaagatactgcgtagcaaaaacgttggcagcaagttccaaagccttggcgaggacaagcaaggagcgcgcgcgtgcagccatacctggggcccgcccagcgcagccgagcgcgcggagaaaggccagcagcagccccgctcccgccaggcgggcggacgccggcatcctgcggcggaagcacgcggaggcacagccagggcctccgccctttgccagacaagggcacaccccaaggtctgggagcgtcgttctcagaaaagtacaagttcttctttgaaggagctccagaaaagcctctcccgcccctccccggctccccaagggcagggctggaccgagctgcagagttggccggacactgactgggtcaagtgaccttgggctgaccgcacccccacccccggtcgccccgggtcgctggtgcactgcgcctgcgcgcgtctccccgaggagttcgcggcgaggggcggagcttggcgcgccagtgcctcggtttccaggcaccgggaataacagaagccagctgagagcgcctgcgcrgctgtcggttgatggggaggtcaggtctgggaaactaggccctggggttttccctgagcaggagcggtgcccgagggcctcaggtacgcagaagggcggggagacatgggatcagcacctccacctcctaagggaccgaagggcaggagagcgagaggacttgtccccagaggtggagtccgaagtgggggcgccccagttgacccttcgggacaaaacgtgacttcagccttaaggatctaaaaccggccgcggtcaggtcaggtggccctcaacgctcaggttacaaaacttttacagtctgcgccacggggactcctgggatgagggtttgacagccaggcacctgctccaggccctagcagcttttgtgctctttggaatcaagcacggttccagcaggagggaagccctgagagttctttgtgccagtcactacctctgggccacagctttctcacctgtaaaatggtgaggctggactctgcgggaacccttcagtttacaggggaagaaacgggggccagcaagggagaagtcgcttgtcctgttacaggcctagaacctgactttctagtcaggtgctctttccacctactatagagtatactgtgcgtggcagaggctggtgctggaggaaaggaaagctaggtggcaggaacacctgtagcaccttcgtttttctaccctcagggcctaacacagtgtcttgtgcataatcactcaccaaatggtttttgaagggaagctttggcaggtccagcaacactgtccccagaaaagtttaagggaatgtgggcagggcaaatgtagaaatagtttgctttagcagccgagagtgaacctcagacaaactcttcccgtgtatctggtttaaatctcccgtaggcgtcagtccaggccctgaatggctggtctccagcggttggcgtcacatctgcctgtgggcgttatgctcccacataatacaacggaagctccagggccccactcagccaagcaagactcttaygaacaaggtgaytcttcccagcagtccttgaaggggcacctgaggaacaatttccagaagcagcttttgagcaacaaagagttgattctggataaagtctatactcaccccaaatggaacacccaaacaaaagcccggagctactcctatccccactgtactggaatcagccagcaagatccagaargtgattcccagggccaaggaaatggtttgttttactcgtcaggccctcaatcctggtatcccaaagccaataaccaggactttatcccctttacaaagaaacgagttggagtggaccgggcrttcccattgaaacccatggtccacaggaagtcgtgcagtacaggtgaggctggcactgatggggaccataatgtctacccaaggccccctgagccgagagagttttcatctaggaactttggtgtgaggaaccagggcaacttttctgtggttggtactgttcttgctgccacgcaggcggagaaggccgtggcaaactttgacaggacggagtgggtgcagatccgaagactagaagctgcaggggagagcttagaggaggaaatccgaagaaagcagattctcctgaggggaaagctgaagaagacagaggaggaactcagaaggatccagacgcaaaaggaacaggccaaggaaaatgaaaacggagagctacagaaaattatactccccaggagcagagttaaaggtaataaaagcaacaccatgtacaaacctatcttctccccagaatttgagtttgaggaagaatttagtagagacaggagagaggatgaaacttggggacggtctcaacaaaattcagktccattccagttctctgattatagaatccagaggctcaaaagggaaaggctggtagcaagcaataataaaattcgagacccagtctcagagccatcggtggagaaattctccccgccttcagaaacaccagtcggtgctttgcagggawccgccagaaattccagcctgtccatggcaccagactcctcaggttccagcggctccattgaagagccacagctgggtgagtgcagccactgtgggcgcaaattcctctcgttcaggctggagagacactccaacatctgcagcaggatgcggggttccaagaggaaagtgtttgactcctccagggcccgggctaagggcacagaactagagcagtacttgaactggaaggggccagcttcagccaaggtaacaagagccttatggatgtgacttggtgtggtgatcattgtaggggtctgttttgtcatcatcagttttctttagggaaaattcatgtgtcatgtaggaagaattgacgtctagaattaacatttcttgattactactgtatgccagcattgtgacgggagcttttcatgtgatctccacattatctctcattgtatcagttcaaaaatcaagacttggacaggctaagtaacttgcttgaggtcacaaacagctttaagtggcagagtcggcatataaatcttggttggaatgactaaaaaatctagacatagaatttgtgtcctttggattataaaagtaataaaagtttactgtagaaaatttaaaagacacaaaaaatctaaagaaaaaaatgcagccttttgtcacctggagagaactcctcactctttgcaatgtattctgccacttcccaagactaggatctgtgaccattcctttaactattcactcttttaaggttagctcagtgttaacatagcttcttagtaaatagatgaaacacaattaagtttggaattctttttctgcccatttagaatgtaaacaccttgaaggtaaaaaggactttctttctggttatcttacaaaccatgcccttgccaattatttctcactttagaaaaaccaggttggaaaaagtaagggtttcgtgacacttacatgataaatttaggtgaacttcataggcacatttggacatatctggagaagattgtctcataaatgaatgacatgtcaaggttgtgccacttggtttataaaatggttatttctcaaggtgtggcatgctgacaaactttattttagtagttttagtgtttagtgttgtattagaaaaattgattcgtcgtttagtgttatattaggaaaatataacaatatattaagcccctgatttccagggatcatgaatttacagaaaaatattaattagttgtaaggatgaagtgaaagtgcagatgattgaagtttgggaaagcgtagatcatatgatctcagaggccccatctagttctaatattccagaagaataagagagtgtcattctgttttcatttcttcccaaccctccctccgctgtgctggcacctcttgtccattggcactttacagtttctgtgtatttgctggagcctttaaaaactcacatttatatgatggttgttagaagaaattgtttacaattagagttctttcttttagtagtttggagaaatcacaaggaagtcccatccatgttcagagatcatctccctgaaatctagtttccaaagaagaaatcagcattttgctcttgcagataataatatgatcaccacttactgttttttcctgttttctttcagttcaacccagtaatccactgggaattcactctatgtcccactgtagcgatttatttttggccagagcctaaaagaatcttgtgtttcttaaattcgtaaatacagttacggtgaagcaaaataattaggttcctgagatcagatgctccagctttatggcaactagtttgtgggaatgtgtgacattgaggacaccaagacagaagggacctagactaagatgcacctgcaccaccctggtaatgtctcaaatcttattccacagtgctgtgcctttggaagctgagtggttgtaccttcctgtcattcctctagagtactcaagaacaggtgattttcctggtatcctttaatcttcacgtaactcccagcagacgtacaccctgtctctctcctggactgtaagcatttttgaggacagggaacatattttgtgctttgtgcttaataagtgttaactgaatagaatttcagtacaatgaggaataaaattataggaattagagtataagaagtaaattactaaaggatctcatatacttgaggaactttcccctgatcaaattctttgagaggaactttcccctgatcaaattctttttttgagaccgagtctcgccctgttgcccaggctggagtgcagtgacgcgatctcggctcactgcagcgatcttggctcactgcagcctccacctaccgggttcaagcaattctctgcctcagtctcctgagtagctgggattacaggtgcccgccaccacacccagctaatttttgtatgtttagtagagacggggtttcaccatcttgcccaggctggtcttgaactcctgaccttgtgatccacacgcctcagcctcccaaaatgttgggattacatgcatgagccaccgtgcctggtcttcgaattcttttaaaggttcctggataccatcgctaatactctcttgccttcttgtctgttttggcaagagactttctggaaggatcctttcttttcctttgatagtatctcttcctattattcatcattaacaatgccagatcaccaagagctagttgtcttttttctctttaaaaaatttaatagtgtttgcatgcatttaaaaaacatgtagtactgaatgacctataatggaacccctaattcagcccccggaggcagccttcagttctgttagatggttcttctggtctgcctttccatatttcyaaataatatgcttattttcttgatttatcaattttctacattacctgtttttttttgttttgttttgttttttttgagacggagtctctgtcgcccaggctggagtgcagtggcttgatcttggcttactgcaaccttcacctcccgtgttcaagcaattattgtgcctcagcctcctgagtagctgggcttacaggcgagtgccaccacgcccggctaatttttgtatttttagttaagacagggtttcaccaagttggccaagttggtcctgaactcctaacctcaagtcatctgcccacctcggcctcycagagtgctgggattacaggcgtgagccacggtgcctgttctacctggtaacttcttatggaagctgggagtgaagttctctttcatattccctctctcctactgttctctttctcttatccttccactgtagtcgaatcacaatttttggttaaaagtagttagctttcacattgtaatgatcaagtaaattttgttcattaatgagtgaacaaattctgtctctgcccacatgtacctaaaattaataatggacgtatgttttcatttccttcattttctacatacctgtctttttctcccccgcaacgatccatctgatatcagacatctgttaacgtttttgtaatgctcaaacacctctcataatctatcagtttgattttttaattctgaaaacctcccttcagccactctgataccttctgctccaacctggactgggtattctctaggcctggtgcaaactcattctcttggaacttctctttgcttctcttctttgttgggtcctctgtttccagcatcctgtgtcttcctttttcttgcattactccttcctttgctgaagcttactaagaagggtgcatagcaggtatattgtcttggaatgaatgacactatctatatgacaggctcccatttgatkatttggctaggtacagaattctaggaggaaaatgattatctgttagaacttttaaagtatttcccactagcttttagcatccagtgtattgttgtgaaatctaatgccattttgattcctgttccattacaagaaacctttttttttaaaaggctacgggattctctatttattttgaaattctgaaactttacaataattgtgctagatacttggtaagccatttcaatctcaaaatgtgtgacctttaattctaggaatgttaattgtattatttccttaataattttctcctcaccaggtgctgtggctcacgcctataatcccagtactttgggaggctgaggcaggtggatcacctgatctcatgtgttcaagaccagcctgaccaatatggtgaaaccccatctctactaaaaatacaaaaattagccgggcgtggtggcgcacgcctgtagtctcagctacttgggaggctgagataggagaatcgcttgaatctaggaggctgacgttgcagtcaaccaagattgcgccactgcactccagcctgggtgacaaagcaagactccatctcaaataacaacaacaacaaaaacaaaacaaaacaaaacaacaataattttctcctcgtgctttctctgttccttctgcaactcttattggtcacatgttggacttccaggattaactttctaattttctaatcttttctttttactttccatcttgatcttttttcccattctgagaaattttcttgacattagtttacaacatttctatttatttatttatttattttttgagacagggtcttgctctgtcgcccaggctggagtgcagtggcatgatcttggctcactgcaacctctgcctcctaggttcaagcaattctsctgcctcagcctcctgaatagctgggactacaggcgtgtgccaccacgcccagctaattttgtgtatttttagtagagatgggatttcaccgtcttagccaggatggtcttgatttcctgaccttgtgatctccccacgttggcctcccaaagtgctgggattacaggcgtgagccatcacacctggcctctatttaaataatttttatttttagctatcaaagttttaatttacaatagttctttctggttctctggttgtctttttttcacagtatactcttcttgttttatggacacaatctcttctaatactcattttgttgatatggtctcatgttaaaaaaaagttttcttctgccacctgccttgttgctgcctccdttttgtttgtggactttttggctctttttcttgttagagcttttagcaaatatctgatgattcctggctgtcctttcatatttaagcttaagtggggctcattgactaaggatcttcatattaaggttcccagatagtgagtcttttaattagcgtttcccaaggtcagtatctgaaggcttttctctggactgttctgtgtatccagagtacccctctttttcctatgaggatgccaatatgcttggtactctgggggctgagtgggggaaggaggctgacagttcgataatttggtatgtacacttgtacttaatccccattttcagccccaagattaacccagttccacgtgtctagatttcctgagtcagaaatctgtgtggttcaatttctccagagaataaatccttgctcttctgtgagtgtgcttgggtgttgaacacttggatgcataaggtgggaggagccgtggggtcctacttgttttcagtcctgtacctccttaccttccactatcgggtacttccaagcactgaacctctcaggttctgttgggaaagtggcttgcctctcagcagtacctcctttgcaggcccttggtttgcctcaacgctggcaagtcagttacygctgttgctcctttcctgttctctttgaccttgcagattagtacccttttcattttcttactgttattctacaagagactcaggaagragataggtgccaacttgaatgatcagtctcccttttacattacaggctgaacctcctcagaagagcaactggagatagaagcatgaatcttttatccatacgttccgccaggctcgagaggtccagcaggtaactgccaaaggtggaaactgttcacacttgcctcccatcctgcctgcagaaaacccagactgcattcagtgtcctcagtgtagccaccactttgctcccaaggtggctgagcaacacattcccaagtgtaagaccatcaagaactgtcwtccacctctaaggaagcattatagttgagcagacaacaatggaaacttttggatagttcagaaagctctgcttctcttcagcagtaaatgggagtagaatttgatgcaaagcagaaagaaatcaaacagctcccagatctgcctgcagagctaaaatctgtgaggagagagccactgctaagcagcaggaggcagaaggaagccccagcttcccactaaattacaaccttgggctggtatgctttatgttattgccctcagaaytgatgggtgaagacactgaagagtcatgagcaggctccattaaagctcttttcttgcatgcctgacttgtggtttgtgctagttaagtgcctgcatctggttctgccttcttgtcactgcatgtatgttcagagttcctgttaactcttgcttttgtagaagctggagttattaggatgtgttggtgtcagaggggcatgatcacccagatagtaactcttataaaagataatacaattttgctataaggcattattaatggaaatctatccttggtctccctggtgcatgagcctggccaaaacccaatacaagtatgtaaggttaaggcaccaatgtctcctaaaccttccctatggtgtactgtgtaataaaggaaagatctttatgtactttacagggtagggatgggtgttgggggggaaacacattatacttctctctacttgttcttttctaatgggtttcatatgttaagaaagaaacctccattttagctgttagtagcactctactttcaaatcggtttggctaaatgactgtttagaggcagcaaaatctaccatcaaagcaagctgagacaggctggtcatggtggctcattcctataatcccagcactttgggaggctgaagtgggaggattgcttgaggccaggagttcaagagcggcctcgacaacaaagcaagaccccatctcaaaacaaaacaaagctgggacactgcacagtgtcacatgcccttggcaattatagcatagtcaacttctatttcagagagtaaactttgaagggaaagggatcaaatctttttaattttctctgtgtagaatattgcctagcacaagttagaccttcaattagtgaggtctggagatttaaaattaaacaagaagatgagtgagtcctacactagtgaaatcagagaactgataagttaatgtctgcgagagtattatcagttcagataggagtgaagttagcacaacagatagaaatcttaggattactgttctgtattactcaaattgttagtttaaaatactggagaaaaactgctcaatttgagctagtcaacagggctagacagacaacaaaatcctattttactaagtaacaaatggccactcactcttgctccatttccactgcactccagcctggtgacctagtgagactccatctcaaaaaaaaaaaaaaaaaaagaaaaaaaaattgggctaacagatcagaccaatttgaaatgtgagttaaggctttagcggtgaagctgcaggacacaggctgggaaaaaatcctatatatttaaataggagcacacatttctttgcactctttttaattgttccaaaggaaaggaggtatcacataataaagctttatggttagccccttaaggaaacctcacacagagataatggatatttaacctaataggtacattccctaggcaagttcaatgaaatgtacactttaagtgggaatgtaaaccagtacattgcaatagatggcaagaataagctgtggccaaggtcacaaaatggcaacatgtggattgctttgctccacagatgttttatttcgctggcctagcattcataatatgatctgacatttaaaaactgggatatggaacatctcttgaaaaactggaagttctggaaacactgggccagcaacccgcatggcacaaattgggtggggtttagaatcagatgctcctccagatgggaatggtagcaccagaccactgcagtctcacttggcctgcttcacttctttaccttatctgcctggtaccacaggcacttggatttgggatcgctggatgttagtaaggtcatagatccgggccctccagagagaacaaattgttgttatatgtggggagtgctttctaaaaaggaagcagttgtttgctctcattttgctaaagaaataaaacaatagtcaatgccttaagtgttccctttaatctctacatgtttaggccttggttatattagaaatatctttcaaggccgagcatggtggctcatgcctgtaatcccagcactttgggaggccgaggtgggcggatcacaaagtcaagagatcgagaccatcctggccaacatggtgaaaccccgtctctactaaaaatacaaaaattagctgggcgtggtggcgcacacctgtagtcccaactactcgggaggctgaggcaggagaattgcttgaacccaggaggcagaggttgcagtgagctgagatcgcgccactgcactccagcctggtgacctagtaagaatccatctcaaaaaaaaaaaaagaaatatctttcatcttttaaatttatcttgatctggtctctgggaagagataagaacctttttttaaaaaaatctgaatttcttcctggatagctcagaggatgacagtaaatgcatgctgcttcttaatgtctgtattttatacaactttatccaagaaatgtttagtgcaagtaaacattataaagttcataaggttacaccataggagaaatttcacggggaaactcctcatgtggaaactcatttcattaaaaatgtatgcagatgtgccgagacagtatttctttttttttttttttgagacggagtctcgctcttgtcacccaggctggagtgcagtggagtgatcttggcccactgcaagctccgcctcccgggttcacgccattcttctgccccagcctcccgagtagctgggactacaggcgcccaccaccacgcccggctgattttttgtatttttagtagagatggggtttcactgtgttagccaggatggtcttgaactcctgacctgcccacctcggcctcccaaagtgctgggattacaggcgtgagccaccgcgcctgtcctgccaagacagtatttttttttttatttttgagatggagtctcactctgtcgcccaggctggagtaccgtggcgcaatctcagctcactgcaaactccgcctcctgggttcacgccattctcctgcctcagcctccagagtagctgggactacaggcacctgccacaacacccagctaatttttttgtatttttagtagagacgggatttcactgtgttagccaggatggtctcgatctcctgacctcgtgatccgcccgcctcggcctcccaaagtgctgggattacaggcgtgagccactgcgtctggcccgagacagtatttcttaacagcaatgtatgtaatgcagcacagcaccttctggccaatgtttgctttcattatcaatttatcactctccacagctacacaggtggtaacagagatgtgacatagtggagtttttctccctaatgttcatcattctgtgaggtttaatgatcagcgtgtttatttccacagttaatcattgaaacaataaatgatttttggctttgcagcagttaggaacatgttttatagtcctgattatagcccactctgccctgaccatcatgaatacttttttggaggtttagggatttcatgtgaatgaatttatttaaaatgtattcttgcccctgaattgttctattatgaatgtttgtgaacatatggcaagtgaaatgaaattttttagtgtacttttgctttaaacttcagtgaaatgctcagccaagagaagttgtaacttggctgtgctatgccagggagaccaaattcagttcaatctctttgaaggaaaagttttacaaaccataaactggcattatcacttggaaaggcccccactgagactgaggaggtaggtacaagaaaggatcatccttcttttagtggctcattttttccctccctctgcactttcggcacttttagacatttttgggaaaaaagctgtagcagcagcaatgattctgctggcaagaataagaaactggagagaagcaaagaatatttctgtgcagatgtcccttgcattgtttctgttccaagaacattatttatataaagactcacagaatcaaagattcacggaggcctagaatctggatgttttatccccagagactaaggtccatgcacaggcttactgaagcacagtactgattaagagcttaaatgtttatttaaaacagaaatgccaaaccactccactctcaacctttcaagcaacctggctaacaataaactagttcttctgcaacaatgttagagcagaggagtaactcaggttatactgtaactcaaaagcaatactactagaaaacttaaaacacctagcactgcataaagaaaaaaagcaggacaaaatttaaagagaattagctacagaaaaccattcaaaggcatttctactgcctcatcttttactccatccccctttgaactggtttctgtttgcatacttgtttggtgggaaaaaaaatcatatggctgtcccaggcacaatatgggaaagtgcaaactgtctctaaggcacagaacttagattctcagccagattaatagcaaatctagacttcccaagggaatatgctagagaaaatgaccacagcgttccactgctagggaaaggctcccctatgaacaagaccagggcactcacccacccccggcactcactttcaccccaccttctcagcaacctgcccatgtccatcagctccatggcagaagcaatcctcatgatgaacacccaaactgacccagcctctcaggcctgctgagatgatgagcatgaggatacagggacatgacaggtcaatcggtcctcaagaaaatcaaagttgcatttacatgctgaaccaaaacccactgttacagtttatgacaacccccgcaagtccccagaacttgcaactttaatcaaagtttggctgcttcccttatttcaagaaaaggtttcagtgattacattagtactaatgtactaggcttcccagaactgagaaaacaatgggaacatcaaaccaaagaagatcccattgaacagagttgcctgtcccgagcaatggggttctccccaagcatcagcctttatgccaccagttttggagaaatggcaaaatttccattgcacaagacctcccacaatgttgataagattatcaaacattttggtctggggaagatgaaacaaaattaatttagctgtttataggaaggtgggatgtgagactcatcaaaggtaggatgtgtgacacaaaataccacaggaacattttacaaggctaggtggaaatacaaagctcacatccttaaggaaaccatcaaatacttgcctagaactttctatatgaagttttgttcttctatgacactatttctctttggtaaagctagcttgtttctatctacaaagacacagtgagtacaggattagaagtgagctctcagccaaattccttttgcaagttctacctgttctgttaggcttcagggactcccagggtttggtgctggctttgggccactcaggtaggaaaaatgatacagattcattcgttaccacatggcttcataaaacaccaaaaggggaaaaatactgactagacattcagaaagaaagtggttggggctgctgatatcaagatcagaaccctaagagccatgaaggcagaggctcaaagaagtcttttcatgggcagaagactgagagccctctaagccctctctaagataccaagtagaggcagctaaaggaggacctcttctccttcatgattttctcttaaggctattctgactgccccatggactcaattctctgagacacctcatccctcagagacacctcatcccctcatccacagttaggaaatcccaccctgcattggtcacagcctgaaacaccagctgtgtgatgaggagggtcctgccctttctctattcctcactgaagaaatttcaatcaaccctcagaggaaaagcaacctaagcctacctttcctcctaaagcatttagctgcacagagtaactgaactttttcgaaacaagccctagattgactccatcagacatattttcctggactcagggctcccaagagggccagactacttcaccactctgcagaggacactgggcgggccacac

SEQ ID NO: 97285 - DNA, 103592 bp, Homo sapiens
aacctatgcctgaccatgtcactcttccgctctgaactctccaacagctgcccatttcattcagagtgaaagctgaaatttcttgcaatgcccacaagccctacattatttgtttccagccccggggttttcctgtcctccttctacttgacccctgcccatatccaaccacactggcatccttgctatttcttttctcagaaatccacaaggccattctcttaccaactccagatctttccttgattatcaccttctcaatgaagtttaccctgatcattatatttaacatttcaacccacaccctctcctgcactcccaactgcctttatcctccttttatttttcacagcatttataactttctaatagagaatttacttattttgtttatgtttattatttatcatctgcctctcccacattacaatattaactccaaaagggcaataaactttttctgtttcatatattgatgtatctcaagtacccagaatgagtagggactccagagatgtttattgactgaaggaataaatagctctccatcttgtcaatcttaatgatcccttttcataacaaatatgaaacaatatgctttttaccattgtgaagtagaagccataagctacctacctatgtaattttctaaaattaaagcaataccttaactataatataaagtacaaaataaagtaatttaccataaaatattgcatgatccaccaggcgcggtggctcacacctgtaatcccagcactttgggaggccaaggcaggtgatttgcctgaggtcaggagttcaagaccagcctggccaacatggtgaaaccccgtctctactcaaaatacaaaaattaggtgggcgtggtggcaggcacccataatcccagctactcgggaggctgaggcaggagaactgctgaactcaggaggcagaggttgcagtgagctgagatagcgttattgcactccagcctggatgacaagagtgagacttcgtctcaaaaaaaaaaaaaataataataataataataaaactgcatgatccaacatgcaactgctcaagcatccctaagctaaaagacacaataaagtagtcagatacttgttccatatgcagaatcaccatgaaagagacagccacaaaatgaactgtattggtgattcaaattccataaatgatattgccatccaatttacaacattccaggaaaatttgatataacttaaaactgtgtggaaaacaatttatgtttatatataaaatagattctaggctcagataattataaacagatttttcacctacataaatgagctgagcagtgggacaactaagtcacacaggatgcaggacaattcttcgctctgcgcgactgtcctggtcaatggaagatgtctagaatctttgaccccaccaactatattccagtagtgccccactccctcatatggtttggctctgtgtctccaaccaaatctcatctcaaattgtaatctccatgtgtcaagggaggcaggtgattggatcatgcaggcagtttcccccaggctcttctcatgatagtgagtgagttctcatgagatcttatggttttataactttggaagttcctccttcacagcacttctctctttcctgccatgttgtgaagagagtgcctgcttcccctacctccatgattgtaagtttcctgaggcctccccagccatgtggaactgtgagtcgattaaacctttttataaattactcagtcttgggtatttctttatagcagtgtgaaaacgcactaatacactccccaatcactgggacaagcaaaatcactctggtaaatttcaaaaaaaaaaccctggaagcagttcaatcccagtagtttcttgatctataaatccagaggcctcttttctgttgtcattggctacctctctagagcatttgacctgttaagaagctgctcctcatctctccatcctcccttgcaccccatgttactacacccctgcagctttcctttcctccttaaccaattcctgcctggtattattatctgacttcccacctccccatgcccatgcctgctgtcctccctttttcctcttcacatgctcttcaacttcctctcctaagtaattgactctcaaagtcccatttctacatgaaaaatacaaatccacatttccaacttccacttggtcattcacacagataaacccttaagttatgcatgtccaaaatcaaactgcaggcccctcgggaacattgtgggctcagttctagaccactgcaataaagcaagtcacacacatttttttgtttcccagtgcatataaatgtttacactatattgtagtatattcagtatgcaatggcattatatcttttaaaaagtgcatatcttaatttaaaaatactttattgcttaaaaaatgctaacgatcttaaagcctttagcaagttgtaatctgtttgctggtggagggtcttgcttcaatgttgatggctggtaactcattagggtagacggttgctgatggttggcgtggctgtggcaatttcttaagataacagtaaagtttgccacatcaattgactcttcccttaatgaaagatttccctgtagcatgtgatgctactgaacagcattttaaccacagtaaaacttctttcagaattgcagtcaatcctctaaaaccctgatgctgctttatcagctatgtttatgaaatattctaaattctctgttgtcacttgaacaatgttcatagcatactcaccaggaatagtttccatctcaagaaaccactttatttgctcaatcataagaagcacctcctcatccattcaagtttgatcatgagattgcagcaattcagtcatatcttcatgcaccacttccaattctatttctcttgttatttctatcacatctgcagggacttcatccactgaagtcttgaacccctcaaagttatccatgaggcttggaatcagcttcttccaaactcatgttaatgttatattttgacctcctctcatgaattatgaacgttcttaatggcatataagatgatgaatcctttccagaaggctttcaattatgatgcccagctccatcagagggatcattatctatggatgctatagacttataaaaaggatttcttaaataataagaattgagagtcagatttgctgcttgatccatgggctacagaatggatgttttactagctggcatgaaaacaacattcatcttcttgtacatctccatcagagttcttggctgaacaggtgcattgtcaatgagcactaatattttgaaaggaatctttttttgtgagtagtagttctcaacagtaggcttaaaattttcagaaaatcatgttgtaaacagatatgctgtcacccaggcctttttgtctcatctataaagcacaagtaaagtcaatttagcataattcttgagggccctagaattttcataatggtaaatgaaaattggcttcaacttaagatcactgggtgcattagcccctaataagcctgtcctttgaagctttgaagttaggctttgacttttctctggctagaaaaatcttacatggcatcttcttccaatagaaggctattaagtctacattgataaactgctgattattgtagccacctccatctacctttgctagatcttccggataacgtgttacagcttctccatcagcacttgcttcttcaccttgtacttcattgttatgcttcttttcttaaacctcgtttaagaaatcaaactctgctagcttcaaacttttctacagtttccttacctctccacccttgagttagggccttgctctggattaggctttggcttaaaggaatgttggggctggtttgatcctctatgcagaccgctaaaactttctccatatcaggaataagactgtttcactttcttatcattcaggtatgcgttagaacagcatttttaatttccttcaagaactttttgtttgcattcacaatttggctaactgtttggcaccagacgtctaacttttgcttatctggatttctgacatgccttcctcactaagtttatcatttctagcttttgatttgaagtgagagaagtatgactcttcctttcacttgaacacttagaggccatggtaaggatattaattggccgaatttcaatattgttgtgtctcagggaatagggaggagcaggagagggagagaggaggggaacagctggtaagtggagcagtcagaacacacacaacatttatagattaatgggcatggtctgtggcaccctaaaacaattacaatcgtaacatcaaagatcagtgatcacagatcaccacaacagatacaataaaaatgaaaaactttcaaatattatgagaatgcccaaaatgtgacacagagacatgaagtgagcacatactgctggaaaaattgcactaatagacttgttcaacacagggttaccaaaaactgtcaatttgtaaaataaacaacaacaacaacaacaaaaacacattgtctgtgaactgcaataaagcaaagcacaataaaatgaggaaagccagtggtcatcttcctccaaaacctgtttttccatcagttgtatctatttatgaaaatgacaacatcatctacttaatctagaaataacaaccaatttgattctttttcttccttccccacatccaattgattgtactctgttttccctatctcatatggcaacatagttgcctttctgtcaatgtagttcaagctatcattgccagtagcttagagtattgtcacagcctcctaactggtacttccactccaatttattttttgatactaacacaaagagaatttctgcagataataatagtagataacattaattgcctagcatatgcccagcactatactatgtgcttcctgtctctttttaataggcacagccacatgataaagtcagaacttttttttttttaattttacagatgaggcaaaagaggtttggggaggttaaagaacttacctaaggtaacagagatagctcagaagtgacaacaccaggaatccaaggtttatctggcttctaaaaaccctgtttgtttttgctttctttgctactagcctgtttgcaatcttcaatgtctatccctatcccatctgccttttccttctccttccattcttccaacccatgagtccttcttttggttttacttattcccttaaatatttacttgtttgtcatttcaaggaagtccgtcacagcaggctcctcttcttctgccgtgtccacatctgtcctgatccctctttctctccactctctcttcccagctgctaagagaggctggagaaagaaacgaatagacaggatggctccaacaacctctgcagatgcagatacacaaaaatccctgcattgagccgagatcgcgctactgcactccagcctgggcgacagagcaagaccccgtctcaaaaaacaaacaaacaaacaaacaaacaaaaaactccctgcatctttagcttttctctgactaactctcagagttgctttacggttcttatataatgaatcaatcaagtacaaagtgctttgtaaagagagctataaagcaccctgcatgtgtaaggtgcaactaactactcaccctccttttacatgctcagggcttcaactgagttattctgtgagcaagaatattctgtgtgcatccaagcagagaatggcacatctgtgttcaaggtgaaggaagaatagaaccctaaataatatgaagttggccgagaaaatctctacttaacattactgccagagtccagcttaaaacttcattggggttgtcataagcgagtaagacaggaagaaaatggcattaacctaaaaaaacctcactttaaaaatctctctaggagggttcccctccccccatcttcctggaagttttaagtttttgcaaatatcctcccttgtcctgcccagatcttgtcccttctagtactggccttccccattcctgggggcccccgcccctccgacccccgccgaccggcgctggactacaactcccggcgtgccgcgcgcgtccggccggctgcaccggggctttgcgcgtggcggccgccgagctccgcgcggggcaaacctcccggcgcggccatgcggggrggtaagtgatctgcctgtgcgcccagggcgtgggaaggcgcccgccctctcctctctccaggatgaaaggaaacgaagaatgccgcaatgaaaaccgctctgccctcccaaaaacacatcttggccgtgtgtccggtgctcctgcagctcgttgcacccacggacgtgggctctcactgtggagtggagtgggggcagaagcgtgccctgccccacggagagcccsggctcgcctggggctgctggcagtgctcggggagcgggacggggtggtggcacgactcggcggggaccccgagaacgccacacctccaccctccactttccaaagaccggcttccccggggagcccccacactaaacgccagcgaactgcctctccgtgaaagtcttagccagaaactttccccgctttgtcgccagtgccacagagagtcgtgtggctctgggccggcgctgctggtccaagaggcagcctggcgtcttctgcccctaccgtccccttctcaggccagttctcacttgcccctgagacgccattcccggctcggtgaggtcggccctgccctcgggcgacttcaggctggctgcaccgggggtcggatcccgggaggcagggccggcggctcctttgggaccgcgctggctccctaggcgagtcctttctgcctgggggacgaatgctgatctagaaaagaagccaatcaaagtcaacagcttcccgcccttcctaaccgcctcccctctccctatctgagcgcattcccaagtgggtcgacagttctgctccagaatactgacaccaaagttatttcagcatataatttggagatttcaggatctctaaagttatttcagcatatcccataatgtgctggatcggaaggtcttgtttggttgcctctccccctcacccccacacaccacatacacacacacccccacatacgtaccacacccacacacaaagtacaccacatagtgcacacatcacactcacatactttatgctacatactacacacacaactttttatcagcagaggattgatggcaaacagtttgttggagggagtgtgtgagtactagtgtatatatatatatatatatwtatwtttatttatttatttatwattcacaagtgtcagtttactaccaaagttagaaactagctggtaagtgaaacctgttgtcataatttagagtgtctttgtggctcactttttataaaacgggattaacttcctacaacactttctgaaactttactcttgtgtaacaggcaaacttttgatcacagcaggccagatgggaggggatgtccctttgtatatgcaggaagagatgcttggaaaaacttcacagaatcctttctcctgtggctgtgtctaaggaagagctgggtgtaactacagtttctttgccttttccccgtcaagagtggagagctgaacatgcttttgttctgagcagcactgtcaggacaaccccagctccccaagacacagaactcccagtccaactcgcttccaatttggatttactgggagaatagttcaggaatttcagatcaagtccaaaagcrttaaggaatctgttagtgaaagagctctttatctacataaaagtcyatcattttgagatcagcactggtgaaagatccacatgcctgacccatgctcaaaaaatactgctcaaaaatatttaattggttcctagattactattgtttgccttttcaagggagcaatggcaaatatttgaaatctttcttggcactgatcttcaaggaagtcaaaaatttctaatataattcctggaataagtaaagaacaaattttttgaccttgaaattcaggttccaaatttagatcaaaggtaatctcctaatgtcctaaaagattatttttaaaaagggaagcaggcagctttttcctcagattctacctgaattctacaggatattacagcaagtgataactttttccaggatctttctggggaacctgtgttctgtgccctgtcttgagtggttttgttgaccatcttgacctaaaagtgtccaaatgttgattgatgtttatttcaatgaagaggcaaccatgtatgttttctgtgtatgtgcagaacattaatgggatgagattattctcctggaaaagtggtttaagccaagcaagggaactgtgagaatgaccagggtaacttaaacaaaagatcttgcccagcctctctgctccacctcccagttttctgatttrgtatttaggatgatggcgggagagactatgaattttggggtgggcataatgtctttctattcatatgtaactaatatagtaccgggtactcatagattgtaagtgttggttaaatttcttgaattatgctttttgtccaactgggataaacagttaaaattaaacctcccagaactaattgttttcgttttgtagaataaggttttgtttgtttcagtttgaatttttgctggcttcatttggcaggataaatgccaaaataaaagaatgtgggcgttttcaggagatctggtcatctattttgcatcctttccgaaatatgttacttcctgcataatgaagtaaaaggatttgctgctgggcagtgctttccttattctcacaaagagattacttaaaagccagccctgggaactttgtccatgaatctctattaggaaaaaaagagtaacatgggactgcagcttccgagtgttctctggttatagcccataagcactggcttctcactcttatttttccctctggggagaaaaggaaatagtttgaaacatgacattcatgctcagaacaacagctaagacctatcatgcagcaacaatgaaggggagggagaaaataagaagctattgagacagcttgtttttctttgtacaagacaggtgcagggagaattctgcaggttttggactccttactcatttcttgcactaattgtgctgaaggtagttagcaaaagtgaacaggcacactgtagctttaaaaagtcagccatgaaccagaaggcagttggtgcagcttgtgtgtgattcctaacgtcatgttggctgagagccagcctggttttatttcactgtgtcaaattgtacctccttattgaattcctttgccagcctactttgtgaaagaaaacattggggtttctttggctgttcttgataagcctataaaaaatgatattttttagttgcttataggtaggttttctttttactcttccacagaaaagaaaataatagtaataataataagmcaatgtagtgtggtgttgcagagtatcattgtgagtgttttgttttgttttctgagatgcttagaaaatggtgaatgtgtaacagtttccaactgaagtgaaatcatattctgttagcatggagcagcagcactatcttcctgtctactctctaacggtgtgtgaatgtatgctaatatctatatatatatattaaatgttggatttctctatcaatgatctaagtggtttgcagctggaagtttgtgtgtatgtgtgtgtttcaggagtgaaaattatcccacacttacagtgttatttgttaatcatctacttctctaacagtgataaaatcttgcgaatatactaaatgatgcacttgccatgtcagagtaatccctagagaaggagtgccgaagtataaagtgatttgagtggaaatgtatttaatttatggcttcagctgaataagagcaaacacgtttcgggactgtttcttcctttttttttttttttttcttaaagcagttttgttcgtagctttttcattttgctaattgcatattaattgtggaaggcttttaattttccacagccctcatcctactaaacaaaaagacagagtgatggatgctacaatatctccttaaatgttttgatgatttttcataaatctaatgagttacctactctttcttacacatacacacacacacacacacacacacacacacacacaccagcaccacctttctgtgctaagggctatctggcattttttgtgagcttcctgctttaccacagcatggccatctcacagacgggtttttgaggctttcgttgagaatgtgaggtaggggaatacttgctgacaaaagctttaagtgtccttctgcattgcaatgaaaaaatctaggagcaagggggagtggacaaaaaaaaaaccaaacacaataagaaaaaacaaatcaaagcccataatgggaggggggcaggaaaagggggattgtttttctctactttgactcatttatgagttgcagtgtcttaagtgagagctaggcacccagaagaagctgtgccagttcacacagcacttgttttcaacgaggattcaatttcatttgcaaatgcttattgtcaaggcagggagtgccagtacagatgaaagcaccccaatccgtctcctccagttctttaggtttaatcacatctctccaatcgccgagggaactggagatttaaacaaacatacgtgaactggtgtgaagctgtaaaagggaccattatgtttccgattcagaatatatattcttctctcactttctaagaattaaacayaagcttttctcccttattgattagttgctgaagtaaaggaaccctgcagccttcccatgctatctgttgacatggaaaacaaggaaaatggctctgtcggtgtaaaaaagtaagtgaagctggcttctgagttctgcttctgcaaacaacagagggacttagtttctattttcgtacttcttgcttatctactacaatacacagtttgggggtcgccttggtttgtctacactggccagcagcctcccttctcccccctaccccagttacctttttctgtattgcatttctaagacagagatgactcagacatcaaaatatatatgaaaggtttgtgtatcaggctttggaacaaggatggttgaggatttcagccctgcattctgtatattgaaacaaaaactccaagcagagactcttccatagacaacacagaatgggggcagaaaatagagttcaaattttttttttgaaatacaatcacctctaactctgaaaactaagagctatagtgcaggaagggaaaaagcttcagtaagaatatagtttaacaactcctccgtcctaattttatgaactgtttaatgaatgtgaaacatttctgtgcatacatggtgtttattttaaagtctgttctcacatttgaaacttgtgtttatatgtgtcatgtaagagttatatatttgattattttaaatgggaaaattcaattgcacatgtaacataatattttgatatttatgagtatatgaaaaatgtatattctcacttaggagttatagcaaagcaataagtactttgattacaaggagaaagtgagttccaagagggagttatctgtttcatttctttccatatcatttagtttaaaattgccgtcaacttgagctttggaggaaactaattaaatataatccatagaagctgtgatatctaaatgaggaaacagtgtgctatatgtttatgaatagaaggtatattttgcttcacagcaaagttacattaaaactaacttaataaaatctgttttttaaagttctcgggtaatttatatatcagtgccatactgccatgctgattaccatccctaaagtttggggtaggtaggtggaggagaaatgaaagaaacagatgctgttttatgtgtgagttagatcagtgttatccaacagtactttcaacaatgatggaaatgttctgtatttgtgctgtctaaaatggtagccactagccacatgtggctacgaagaatatgaaatgtgactagtttaagtaagaaactgaacttttaattttacttaattgtaattagttttaaaattagcagctttactgaagtataatccttgcataataaattgcatgtgtgtaaagtaagttttgatatttttatcccctcttgaaactactgccacaattaagatgacaaatatttccatcacttccaaaatttccttacgaccttttgtaatctctccctcctgtccttttctscccccatatcccctggcaaccactgttatgctgtcattataaattagtttgcttcttctagarttttatataaatgaatgtgtatacatcccccgcccccacacacacacatrtagtttctgtcackcagcataattaatttgggatttatccatgttattgtgtatatcaatatatcattactttttaattactgagtaatatttcactgtttggatctacaacaatttgtttactaccatccaaatgatgatagacatttgaattgtttctgtttcttaggtattataaataaagctgctttgatcatttgcgtgcaggtctctgtgtggacatatgctttcatttctctttcataattacttaggaatggaattggttgggctctatggtgggtgtctgtttaactttttaagaaactgccaaactgttttctaaactggttgtcccattttcattttcactagcagtgtgtggcatgttccagttgttccacatgctcatgagcttagtgtgatcaatcactttcatattagacattatatcaggtgttttatgttttcagttttatttccctaatgactaatgatgttgagcatcttttcctgtgcttatttgccattcatgtatcttcctagatgaagtattgttcaaatcttttgcccatatttgtatcgggttttttcatatttattgtatagagagtttttatatattatgaatatgtcctttatcatatatattatttgaaaatattttctttaagtgtgtgacctatcatttcattctctccatagcatctttcaaagtatcaaagtttttaaattttaatgaagtctagtttatcaatttttttcttttatggatagtgcttttggtgtcatatttaagaaatcttggcctaatgcaaggttacaattattgtctcctctgttttcttttagaagtttcacaattttaggtttcagggtttaggactatggtttttgagttaatttttgtttgtagtgtgagataagggtttgaagggttgaagtgctttgtgtggtggtggtagtggtgctatggatatccaatctttccacctctgttcaaacacttctgcaactttgctgaaaaataattgatcacatatgtgcaggcttatttctgggctctctattgtattccattgatctttttgcatatatttatgccaatataacactgttttgataaatataacttgaaatcaggtagtgttagcaatccaactttgtttttttcaaggttgttttgcctctgtacatttccatatgaattttagaattagcttgtcagtttccaccaaatttttttttgaaaatctgttgacattttgactggcattgcattgaattatatatcaatttgaagagagttggtattttaacaatattgtgtcttccaacaaatgaacacagtatttttctccatttgcttatgtcttctttaatttctctcagcaatgttgtgtagttttcactgtgaagatcttgcacctttttgccagttgcatccctaatatttcatgttttggatgctattttaagtggtattgcttttttaatttgaattttcaattatcttaacatatacaaatacaattgattttttatatygatgttatatgccacaaccttgctaaactcacttattacttctagtagctttttagtagattacaccacattttgtaacatagacaattatgtcttgtgaataaagacagttttaattcttccttcccagtctgaatgccttgtatttctttctcctttattacactgagtagaaccttcagtgaaaagttgaaaaaagtggtgagctgggtatggtggctaacacctgtaatcccagtactttgggaggccaaagtgggcagatcacttgagatcaagagttcgagactagtctggccaacatgtgaaaccccatctctactaaaaatmccaaaaaaaaaaaaaaaaaaaagagagagagagagaaattagccaggtgtggtgttacatgcctgtaatcccagctactcaggaggctgaggcaggagaatcccttgaactggggaagcagaggttgaaatgagccaagattgtgccactgcactccagcctgggtgacagtgagactccgtctcaaaataataataataataataataataataaaayaaaataagaaaaagtaaagaaaaagtgaaaacaggcatctttttgttcctcatctttttcatatctatgttcttctgtatatatgtgtctttttttctgtatacttttagatattctctttatcattggtgtcttaagcaatttggttatgagacttggtgtggtttccttcatgtttctwgtgctttgtgtttgtttggtttctaagatctgtgcctgggcctagttttcatcaagtttggaaaattgtcaaccattcgttttcaaatacttttggtctctctccctttgtctttggggactccaattttatgtggatttgaccacttgatattgtcccataattcattgatgattggttcattttaaaagtcattttctctgtgtttcgtttttgatagcttctattgctttgcattcgtgttcactaatcttttcttttaaaatgttgaatctgctgtcaattccaccaatgcatttttcatttcagacaatgtagctttcatctctagcagttcaatgtggatctttttaagagtatcttccatggcacaacttaacatatccaatccttcctctagcttcttgaacatatagaatatggccttaataactctctcaatctccttgtcccatattatttgtattgtttctcagtcagtttcaattaactgaattttcttgcgtggtcatatttttctgcatctttggatgcctggtaatttttggttgaatgacagacattgtgaattttaccttgttgggtgctggctgtttttgtatttctgtaaatatgcttgatctttgccctgggatgctattaagtcactagaaatagtttgatccttttaagtcttgcctttaagttttattaggaacagagccgcatttagactgagggtattttttccccttttactgtgataagacccttttttatattttaagacccttttttatgctcctgaattgagattttcatctctggcaggtgaaaaaggcactatatccatccctgcatcgtctccaagactcattccctctaaaccttcaaggtttgttcccctgcctcaggtagtttcctcatatgcaggtgctgatcaggactctgccaaacacttgaagggaaccctctgcagacctccagagttctctttttttgtagctctctcctcttcaggactgacctttgcacagcctaaaagccttcttcaggcagtgagtggaatggcttacccatctctcaaggattactgtcccaatgaccaatgtcttgtgtaccattgcctcatatatttcatcttttttattaaattattgttttagttagaagagtaaatattgcccccattactccatcttgactggaagyagaagttccatttaatttatatagccacaggttcctagtggctagcactggacagggcagagttagattataatgcagactccagaaagggataacatgtagtcttaaggctatgttgtggagggggctgcccctatacattgtaggatgtttctcagcatccccaccttctaccaatgatatgccagcattacccctctccagccttgacaatcaaaaatgtctccagacattgccaartgttccctgaggggaaaaattttcctcaattgagaaccacaggctaactcttacctgagtaatgtgtgacagggttgcttctgggcatcagaaagaagtttacatatttgtactggttatttcttcttaaaactctttaaagatcatggaattttaaatattccaatttgaagcttctgctttctttctttatatatcatagaagagaagggcagagaagaagagaggtaaaatattaacattttggagaatctgggcaaaaagcatacgggatttttgtactattcttgcaacttttctgtaaatctgaaaattttttaattaaaaaaaagccagtttattaattgagaaagaaaatttttcttcctttaggaaagaagcaactcctaacccaaatttggagaccagggggaattaagcatgacattgcaatggcaagtctcaagttaagaacacttgggtttgaccttgcttttgtttcttaaatagtagaataatattgaataaataaatctcttaatttctctctgcgtcagttctcttaaatataaaatatagagttgttgtgaggaatcaaaaggaaacagttataaattrcagagtgaaacagcagtgataaactatatatattgcaaactttttttcaagtaagtaaacagaagctcagagaagtgaatacttaaaaatgacatgagaaagtggcaaacctgaagtttgaacctggctcttctgactccaagataactcttttttcttcatacaatttttgttttataactatcctcactcagtcccataaactggaatgagtttggttttaaggagtcttgaggcaggcttatttcaaggctggatcctggttcttgtgtcgttgctgcaagaggaggaaaaggataattgagacacatatgtcaggtcttctcatttcaaatttgttgacctaaatgactgtgataaatgctaccttgagmattttaaacaaatgtcatgctggactcctctcctcaaattcatttattccttctaaagtctcccagccttgacccacaaaattcttagatctctgatgtggacccttgttcagatctctgttattctgtatattatgggtcaatatgattttggcatgacaatcaccaaggcctagattctacttgaacacattctgaaatggaagagtaagtgaaccttatatttaattttatattcagagtcttcaatagtaataaccaataaataagaaaagcacaaacagaaaaataccagagaaaaatgtccaaaacatgagcaaacatttcacagaagaggaaatatatatggccaattaacatatgaagaggtgtgtagtaccattagtgaccaagaaaatgcaagtaaagattataatgacgtacccattcacttggcaaaaaatttaaaatgcggcaattctaatcattagtgagatatggataggatataatgctagtaggaatattaactgatagggcagctttgcagaagggtttggtattttttctagtgttaaacaatcaaatattttataaattaacaattcaatttctggatatatgtatcagtcagtgctgtccaacagaaataaaatctgagccgcatatgtaattttcagttttctagtggtcatatttaaataggtaaaataaattttaataatatattttatttaactcattatatcacttaaacatgtaatcaacatgacatcatcaatgaaatattttacatttttgtgctaaatttcctaaatctgttgtgtactttacacttatagtaggggggttcaaactttcagcttctctgggccacattggaagaagaattgtctttggccacagatgaaatacactacyactaacaatagctgatgagaaaaaaaaaaatctcataatgttttaagaaacttcaggaatttgtgttgggccacagtcaaagccatcctgggctgcatggaacccgtgagccacaggttggacaagcttgacttacaggatctctcattttggacataaaattttcattgggcatatttaatctgcatttgtatttcctaaaatctacagttcaaaaggtaggatcacatacccaaataattccaaacatatttaaaagttttccgataactgaattatgtaagaaattattttcttgtaatatttacatccacattgacaactgatttgtcttgattcaacttggaagcaaaagcatattgatttcaaaactatgtctgttcaagttaaatcaatttgctaacacatgtcaatattaccaacattgaattcaaagsggttttgcataaattgataagcaacaataagcttatcaatttcaataaatctgcaaattttcttgaagtttattcatgwtagaaaatgtatgaaattattattgtatattgtattgcactctgaaaagttgcaattttagcctaaaattttgttcctctttagctaggtcacaagtcagcttttcatttccttggaacttcaaatttagctgtttcatatgcagtgtgatatcaaagttattcagtcgtttttgtctttaatttttgaatatttggccaggcacagtggcccatgcctgtaatcccagcactttgggaggcygaggcaggcagatcacttgaggtcaggagttygagaaaagcctggccaacatggtgaaatcccatctctactaaaaatacaaaaattwtccaggcatggtagtgggcacctgcaatcccagctacttgggaggctgaggcaggagaatcgcttgaacccaggaggcagaggttacattgagctgagatcgtgccactgcactccagcctgggcaacagagtgagactgtctaaaaaaaaaaaaaaaaaagaaaagaaaagaaaagaaaaagaaaaaaaaattaatatttgacaagcattccttctgtttcagtaaaatcttgaacagtacagcaaatctttgtaaatcttttccattacttaatcaacgtgcattggcaaagaacacagattattacattcactgtcttctatttcttttaacagttccattaactgggattgatccatagcatttgcaaatatatgctgaacaattcaacagtagtatctgtaacacttttcaagagtctgcttcagaaaacggaacatagataccatacagtggaatgaagcagtaagaaaacactggtctttttgttttaaaattacaacaaattccaattcttaaaattcagatctttttaaaaactagcattgctgaagcaccatccatctggatagaatttaatttttgtatatctagctaaaattctttgacagagataaaagatttgaaaatatctaaaccatgaatttagtttttcaaattgtaaatagacatttctttatgaattaggaagtcttttgagatacaacatacctcaggcattgattaggcagtatctttatgttgtactttcatctataaataaagttttaatggcttttacattttgaatcagttggtcttaggttttgttagaaagaccttgtattcttcaggcaattgtttggtggcttgataggaaaatcttttactttttgtgacatacctctctagtcttttctgataatattctagcaaaacttctataactgaaacaaccatatgtccattgaaaaattgtttttttgtctatgtaaagatccaagccatttatagctaagcaaaattataagctcagattctgttttaaatcatattatctttacctttttttacacaacaaacagcatttttttctcttgctatgttccaacaaattgcaattgctattcatcatgaaatttccaacawaccttctttcggtcccttttttctttattgtgtgttactagtttctgcatctcctctcaattctgctctttttagattttaaaatttttctatgcttatttttaactaaaaatatttaattatataataattaagataataacaaaaatgtcaatttaatttccaattacaatatacaaagggatcctcataactcctgctgtccataagcgttcaacaaacatattacagtgttacctgggtgaataggaaaaaattaatttgaactgaatcaatctctgacacaaatcaaacgggggatgtactaccagagaggacacatgaacctgccatgagaacttcaacaatagtaccctataggatggaacagttcaagtaaaatgtaggcaaaacaaaacaatggaattgtgtttaacataaacatattttataccacttcaagtttttacattgaaactaaattaaatttaaaacttagttcctcaatcaaacttcaaatgctcagtggacacatggtactagctgctaccatattgaaaagcacagttatgtacccaaaataaattcttgcatcaggggaaatgttatatgaacataagattgaggttgatgattaactcaggtggggagagcatgaatggggagctctgaatcatatagatagacatgattattattaagattccagattttattttacctagtaggttcatgagtatttatttcattattaaaaatagctacctaaataactaagatggagccatctgaatagttgatatatcctttttgacagtttttgtgcacatactctatgtatccacatgtatacataacacaagaatatatacatatattcacatgcaytaaagaatgtacatatatatgggagcatacacaaaaatgtatacatatattcaaagcacacatacaaataagcttttattgaacaaatgggatcatagtattctcttttttgtggatttcagatgcacagatttgggatgaattataaactttggtacgtgacacactcttatcattgatctgtgtttggccatgttagattcatgttagaattttgactaaatttttttaaatccatgtatttaagatgtatgtgcatatatattcaaatcatgagaattcaattttttttccccatttgcttagtctttctcactccctttttcagatgaaaaatgtctttttccccctatttcattttatcctgggatgggagaaggaactgatgttcccacatgacagatgcatgtagtaagttccttttcaacaggaagcagtttatttccctaccaccaccatgcccccgagcccctcagtggagaactactgcagtagaaagttcccagtgatgaagtttagcaaggactttcaaagcaagccatttcttattaatgccacttcttttcttgcacatgtgtcttcaccatattcctctgcctttgtgttcagtgtgttgtttcattttgaagcaaaggcataaaaaaaattttggaactaacattcctttcataattagtaatgtgatgcttttttttcttggtaatgaatgttgtaaggttttgaactaactaaaataattacttttgaaatagccctctctgaaacctaactgtatacctgttaagctatgtattatgttaaagaaattactatttttgctcatgtgaattagaggattagaaagtgaatgacagaagtaaaatattaaggtagacttagaaattattatggtattgctagagtttcaaaactctgactttattgtagaattaaaagaacttgtataaaacattgtagaaaagagaacttttcatataacaataataaaacaatggctactattacttagctcattaaaaaaagtccaaccgtgcatacatgtacagcaatctacagatcagtcaggtctccatctccttgggaagcagtcacatctagaaatgaataaaaaacctcacagggtacttgattgtttgcctggaagcctggtctggcttctcatgaaaaaaaggaatgggaaaccgattgaagtaactatgtgcatgatcactgacttcagcatttgtttatttactcctaagcctgtcctcttgtagtatagagcataaataattatcaagcctcagatgtatcttctttgaaaacaatgaggggattttatttagcttgctaggtagtttctgggtgatctctccatcaggcccagtcttgtctgttctgtccactcttccctgtccccacagcctcactgccctcaccctacctgaatgcagtgatgtgtgtgatggttcctggaatgctcttcttcccaaaaaaacagcaatgtggaaaggggtgggagggggcgtggcagtgatcatgatggtaagatgttgtatcctaaaagccagggaaactattagctcccaagacattgtaagtggctaattattaaatatctcttaacagtctgtcagaaaatgaaaagaaagaaacaaactgagccaataattcaaacctgaaaagtgacctttctagccaggatctgatgttgtaaaccgttttccagatacgtatgataagttagagtgtgctatggttcttcttttccttccttccttccttccctccctccgtccctccttctgtccctccctccctccctctctctctttctctccttctctctttctttctctttctttctctctctttgtttttctttccttccttctttctttttcttctctttcttttttaatgtggtaagaacatttactatgagttctacactcaacagattttttaagtgtacgatacagtattattatctgtaggcacaatgttgtacagcatatcgctaaaacgtatccatcttccaggcagaaattttatacctgttgattatcaactccccctttcccccttcctttagactctgccaaccaccattctattctttgcttctatgagtttattttagatacctcatataagtggaatcatgcaatatttgtccttctttgacttggttatttcacttagcacaatgttctcaaggttcatccattttgttgaaaatgtcaggatttctttcttttttaaggttaaataatatctcattgtatgtatatacagcatgtcttttttgcggtgggtctccctatgttgcctaggctggtctcaaattcctggttcaagggatcctcccatttcagcctcccaagtagttggaattattggcatgagccaccaagcccatctagtacattttatttttaaaattcattaatctgtcaacggacatttcagttgtttccatatcttggtgaatagcattgctgtgaatatgggagtactaatatctctttgagttcctgatttcaattcctttggataaatactctgaagtgggattgctatrtcacatagtagttctatctttaatttcttgaggaatctacagttccatagcagcttccccattctgcatttctaccatttctaccatagtatacaaaggttatgatttattcacatccttgccaacatttgtcattgttgttttggtaatagtatcctaagaggtatgagatgatatctcattgtggcattgatttgcatttccttgatgattggtgattttgaacctcttttcatatatatacatattggctatttgtgtgtcttcttttcagagatatctattatgtccttcgaccattttttcaattgagttattagtttttttgctatagaattgtaagcattccttatatattttagaaagtaacctcttatcagatatatagtttgcragtattttctctcattccataggtttcctttttactctattgaatatttccctggctgtatagaagctttttagttttatttagccctgcttgtttatttttgcttttgttgcctatgctttttggtgtcatatccatgaaactattgccaaaactaatgtcttgaagctttccctctgtgatttcttctagaaattttacagtttcaagtcttatgtttaagtctttaatccatcttgagttgatattttgtgtatggtaaaagataatccagttttattcttttgcatgtggatatccagttttcccaacaccattagttgaagagactcatctttctccattttgtgttcttggcattccagtcaaagatcatttgaccacatatccatggatgtatttctgggctctctcttctgttccattgatctatatgtcagtctttatgccattgccatactgtttaaattactgttactttgtaatatattttgaaatcaggaagtgtgttgcctccaacactgttctttttcaaattgttttggctattcaagatcttttctggttcaatatgaatattagaattttttttctatttctataaaaatatcattaggattttgatggggattgcattgaatctgtggattgctttgggtcatatggaaattataacaatattaaatcttccatccatgaacttgagatgtctttgcatttgtttgtgtcttctttaattactttcatcaatgtttcatagtttttagtatgtatgtctttcacttccttagttaagactattcctaagtatgacgttattgtaaatgggattgttttcctaatttcctttgcagatagttcattatcattgtatagaaatgcaactgatttttctatgttgatttttgtatcctgcaactttgctgaatttgtttattcattctcacaggtttttttgtggaatctttagggttttctctatataagatcatatcatctgtaaatgtaaggacagttttactttttccttttcaatttggaggctatttatttctttgtcttgcctaattgctctggctaggatttccagtcctgtgttgaatagaagtggcaagaatgggcatccttgcctcgttcctgatcttaatggaaaagttttcagtttttcacctttgagtatgatgttagctatggtcttttcatagatagcctttattaggttaaggtaatttccctctatccctactttgttgagattttttttttatcatgaaaggattttgaattttatcaaacactttttttatcttagacgatcgtgtgatttttatccttcattctgtaaatgtgatatgtcacattaattgattttcrtatgttgaaccgtcctaggaataaatcccactaggtcatggtgaatgatctttttaacatactgttgaattcggtttgctggtattttgttgaggatttttacatctatgttcaatcagggatattggcctataattttcttttcttgtgtgtctttatctggcttggtatgagggtaatactgacctcataaaaaaagttcagaaatgttccctcctcttcaattatttggaaaagtttgaggattggcattaattcttccttaaatgtttggtaaaattctccatgaagccatctaatcctgggcttttcttgtatggaagattttatactactgatttaatctccttacwagacaggtctgcttggattttctatttcttcataattcagtctggtgggttgtatgcttctagggacctatttcttctagactatccagttggtagacctgtaactatttatggtagtctgtatgaccttttttacttctgtagcatcagttgtaatgtctttttcatttctgcttttatttatttgagtcttcactctcttttctcttagcctagctaaaggtttgtcagttttgtttatcttttcaaaagcccaagtctgagttgattttatcttactgtttttctattctctattttactcctttgtccaatttcttaaggtagaaagttaggttgttttatatctttctttttttaatgtaggtatttgtgactataaacttccctcttaatactgcttctgtttcatttcataagttttgatatgttgtgtttttgtttttatttgtctcaagatactttccactttcacttttgatttatttgacctattggttattcaaaaatgtgttgtttaatttctatgtatttgtgaatttttcagttttcctgctgccattgatttctagtttcattcaatcaaaaaagatatttggtataatttcattatttttatatttgttaaaaattgttttgtaacctaatatgtgatctatcctggataatgttccatgtatgcttgaaaagaaatgtatattctgcagttgttaggttgaatgttccttatatgtctgttaggttcacttggtctacagtgttgttcaagttcactgtttctttgttgaatggtttcttgaatattgataatatacgggaattaatagtgatacttgtaaatggcactattttatttttcttactgaaactaaaattcattccttgatatgttatagttatctgttcattctgatatatggtctcatgataaataagtctttgattattcccttcaattaaatgataatggattaagaattgagtctgtttattattttgagttatactgatttttccattgcaaataactgccttgaagtgtacatttcaagagtaaagtgtataaaactatacagtcagttaaacatattaaaacatcgtattttaaatatgaaaacaaaaggagtttcaatcattgccagcagaattcacagacattgactatatatcttttatacattgtcagccctcaaggactgctgtttcttatatagtttctttcttgctattgagatccctacagaaggaaaaccaagtttctctaagcagtgaagccatacccaaatcctttggaacagagaccattgtgctgtggctcagagcagggaggaaaagttcttcaggtagtctttagactgttgtgtttagtattaatgattaggataagaaatgtttatgtttgtgtttggcatgaattgtatctgatagtaaacaaaaagtattcattgagtctgcttgaaaggagtgttcttggccaggtgcagtggctcacacctgtaatcccagcactttgggaggccacggcaggtggatctgaggtcagaagtcaagaccaccctggccaacatggcgaaaccccatctctactaaaaatacaaaaaatacaaaaaattagtcaggcatggtggcatgctgtagctgtagtcccagctacttgggagactgaggcaggagaatcgcttgaacccaggaggcagaggctgcaatgagctgagatccctccacttcgctccagcctgggtgacaggaaaagaaaaaaaaaaaaaaaaaggagcattgttatttacactagaggattttatttgtactagaatgtacagatagaaagaggaaaaggaaaggaggctgtttrtaagatcctttgttttcagaaagatgggttgggaagacattccaggcagaggtatgccaaggacagaatgctgtatgatttcagaggaaaaccatttgcctgagggaagatacctatacggaggaaagaaattttgcaggaagatgttccatctgtctggagtgcctgctcctagtcttactggtgacccagggctccaaagcctttcatccacacacctagcacagcctgactcacattgccatgttgactttccatccttctttcaaccatctatttccccctttccttaaccactttttggaatagagcaggaaacaaacatcatgaccttcttcatcccacaactgacccgagattatcgtcttcattagactatgagtttccaatgcttattaagtgcctggctcatagtagacaggttaaaattaattaaggagaaattaaactggtttctttataatgagcaggactaatccctggaagttgaacagaaagggtttgactgacataagcaaagccacgggtatgggaaagtctaggatgttgcccagttaggtttgaatcaagcatctgaactctaagctaaagaatttggaatatatagaaggtttgatgaattatttgccttttcaatgctttcatcattttgatgtgatgcagctaagtcagtcaactcttatttatctgaatatttaaaaatgaaaaatgttctgtccagaatctttgaatcatcctttctctttttgggcctgccatttagccagatccctgcttgttagcatgaagggagagggagaaaggaacggaaataacgctaatgctcatttagttgcttcatcctcaggtttgtcataggcaaagagatcaatattaatttattagaatcagaattaaattgcttttagccagaggctgttttaagacatgagcaaagaataggttaatttcattttgaaaataagttataaatatctaggcagcacaaagttagagtgcactgctcagtgtaaaaataagtaacagaattagccttataaaaaaagtaatgtggcaaatatatcatcataatatgttaaccagtgtctaaagtaacttgctctgaactttgaagtggaaatacaattgatgaatataatggagttgtgatattacatgtggattgcatttacccagagtatccttttggcctgaacaactctcagcatccataatgtcataaataccataaaatgtacagatgctagatttagaaaaacagtttcaactattttctgcctgccttcttacaaagggaaatggagacttttgctgccagaacttaaaattatgatgtgccaacatgaaaacctcatcataaaggctcaattgatctgcttgtatctgccaaatttgttattattgcatttctgtccccgtggttgtgtctctttaacgctcattaaaaatcaggtgattgtttaattagggtataatcatttcctagtgtgaattattcacccatgatataatttttatcaatacttgatgtacctaaccatatgcacaaggactaaaaggtgactgggctaaatggaaacattgataatttgattaagtgctgagatttcttgctaatttttaataataaagctatatataaatatatatattaaagattctgtgcctggaaaatgctcatacatttatcatattaacatgtattatattctaagaaacattttgctatgacgttagtgaataataaatatcaaatgaaaggggcacttttgtatttgccatttcattttatcaatgcaaaattagcagccacaatggaaccaccacctgtcaggtattttaaacagtgacatttaaattccctctggaatttgatatgcataggtcataagaaaagatgtggcgmgaatggaccatttataaggaaataactaaagctaagtgtctcaatttggacaaaatatcagtccttggggagacatattgtattcctagcagagaatggtgctgcttaaatctatcctccagtatcttcccatgtcaaatgttatctggctttggccctctggctcctgccccgcacacccttccacttggcttacgcttgttatgttattttggatcatcaccagctttctccttaaaactgttgctgaaaccactggaagagcccagtgaaatcatccatcgtgcattaacacgagcaacctagaagtgatggtttatgcccgtggagacgtgcctctgcaagccatccccactctggggccccgctcagagagtgttgagggcaataaatgcctttttaaactgccattgaaaatcttcaagtgttctaggcaggckgaactaaccagccctcccttacgtaaatacgtcctcaacagcactttgttcacccctcgattcgaatattcctcagagctagctgtttccacatctggtttccctcaccagattgccggctccttgagggcagggactatgcattccctgtccttgtaaccctgcatctagcataatactgagaagacaggcttttaataaatatctgttgtgtcaatgaataagtatagtggaaaaaaagcagagacttggaggcaagcatatccggaatccaatcctagctttatctaccatgctatttggggtgtgtttcttaacctttctgagccttcgtttcccaaaagcaggttacagtagccagttcacaaagaggtgggaggctgatactgagtaacgtgtgaaaaacagattttaagttgtaagtgctctctggttgttagtccattgtaatactttgctgtgtatcaactgtgcaccagtcagactgtgctaggtgctggtgctacaaagatgaagataggtttttcttctcaggatatcgatagtctaatgtgatttttttcctggttattttggctttggggggatatcaggcttttaaacttaggtagatcaatcattaaatgtattggttggtttctaaccccttgtttcttctgggtgaattcccttaccctccatatgaaagagtgccccgttccacgttgctgctattcatggtacactgccagcagttttacaagtctttcttctctgtggcattgctatactcaagaatatttcaaaattatggaagtcatgatgttatatcccactagaataaaaatcaggaaagcctcccatcttaaaattacaatgtagcttattttgttattacaattgaatattctttttaaaatgttttattttaggtttgggggtacatgtgaaggtctgataactattcttggtgaggaaaggcractaactgaagtcaaccacagggagattgaattcagatgttttctgggggcacttaaaagtgtgttcgatgggactctgtgttcactaccagaagtgagctaattagaaaactgaaaagatttgttggaacaatgaactcctttctgaacattcttcaaggacaccttaagagagagggaaggaaaatggtagcttgaagagggtcctcagtgccagttgctgattgcttatgttgctagtgtatggaaaattccagcacatagataattttttttaaaatttactattgatttaaaaacacatagttaatatttagtaacattagggtgaaaaatagttttcttctcgatgtatattgcctgttaaatggtaggaagattgtgtgtgtgcatgtgtgcatatgggtatgtgtgtatacaggcatgcagtggttatagattcaccatctttaagcccaaaagagaagacatttagagtattggctttaggtgtttttaaattaggtgctgttgagaaattaacgatcacatgtgccatcgatcagtgactccctttaactagtacagaagttggtttggttttcttaaatcaaatattttaggttcctgctatgggcaaaacattatgctgggggatgaggtggctggatccttgactcttagacctttaaagaccttcagaaatctctccaaatctagccaattttgtttccactaaaagtaacctggatgttttcaacttccactaaatattgaacctctcaagcttagttctaggcccagctctcttctcctcctctctcaagatttcagttactgtctaaatgcctctgtctcccacaggtgtacctagcccactcttctgctttgtgctgtagacttatagcccacattaaatctccacttggatatagacagtacaccaaatttagcatgtttagctggatggatgttaccaccatccatccaattccatgacacttctactccctccattctctatgtctggtctagcactaagttacactgattttattcattaactctcttttaaatccacacactcctcttgtttttcacatacaccaccctagtctacgcatgatctctgggttgcatgactgcaatagacttctcactggcttcttccccactggctcctctccagcatcctctttttcaaaatgtgaatctgatcaggtcaccccctttacataggaccattcaacagctcctcattgctcttagcaaaaatccagaatcctcagtgtggcctccaagacctgcatggctcccttggctgtatgtgtttctgtcacagggcctggaatattcttcatgtgacttcttcatacagttaatttctggctgtcttttagatcgtacctgaaaagaaactcccacgggaaagcttcccctatccctttaactatcatagtaaatgatgcttgtccttcttagcatttagcataacttgccgctgtacatttacttgtatgattattgatcagtgtctactccccacaggactgtaaggcccktaagaataagggtggtgtctgttttgctctccagtgtattcctagttggagagaggagaggctttgtcctgagggacctccaaagcaaagttaggctatgtgattggatgtacactctgggaaaatcatcttggatgaggtatagagaaagccagacaaatactcccaacgcagaaatgaggcagagtcccagtaactgcaggtcattaccagtctttctttattctacttctcctttccctcctctctgaatccaatgaggagcattacccatagacccactcagacaaatgcttgattgttatcttgtcatctgtttatttatttgaacaatatgggttaagttcctaagtacacacttgatactaggaataataaaatgagaagtggtccgggctcaaatgcatttctccaacctgcatctcccactctagtgggagagactgttcaataaacagagggtataattcagtgtggaaggtgctacaatgggagtttgaatgaagttctagaagtcaaaggaggttatgactaaaacacacccttggaagagccagaaaaaatgcttcaaagaggaggtagttttgtattggtagaaatggtagagttttgtccaatagagacaggtgtgggggcattgtaagtggctgggacagaatgtgcagaggctcagatctatgaaaggacttggcctattgtggaagggctttatccctagatgtgtggggatggggctagggaaggtgttaggaagacaggaagagagagyggtatgttgaggtcatatcgtaaaaggccaggtgttctgaactcagaagtatgaatatcatactctgggctgccagcagtcactggaccactctcaatgtctctggattaaaaaccagaggaaataatttacattaaatgtcaaatggtttattagcagtgactaagccagtgagagtaatcatcatctgaacccaaaaaacatgaaaggcctgycccagaagacccatttgtgagcctggccacacccttgtgcaggcactgccatgacaactgtctggatttgtgttttgcagttccatggaaaatgggagaccacctgatcctgcagactgggccgtgatggatgtygtcaattatttccgaaccgtgggatttgaggagcaagctagtgcttttcaggaacaggtaacttggtctagagaaacacgtgatgaacatgtgatgaacccacagttacctcccttcccaacagtgggcagaagggagtgaggaggaagaggaccaaagagcagggaggaatcagtgaggctctgagaaactgaggggaaggagaatggatgtaccaggtgaattatccctttgtgcaaggggaaaactcaaagccggagacagtggcagctgtggagaagaaggctaaagctcatttacatctgtgtcctctgaaagactgatcatactcaagggtggagtgaatcagccctaccttcaatgaaaacacactagaaagcaggaaacagaaaagaaaggaaaagcagggacaaacctgactgagagacatacaccacctcctactactggcctcagcacccaatggactattaagccctttgcagtttgctttctgggtgcttagcaaggtagagtggaaaaagcacaggattgatagtcgaatcctggttcttctatctctatgtgaccctaggcacgttactatgtctctctgagtcttggtttcatatctataacatcagactgtcaataactttatagggatgttgttgtgaggattagtggacaatatacacacagtgcctatgataggttctggcatagtgttgatactcaaaaaatgggatttccttttcctcaggtccagggatggtattagaaagagggagaaagtggcaggagtccatcccaattgtctaggtgattcatagctccatgttgcaggctgtgctaggtttgcagggttggtcttcaaggggctttgacctgaggaggcaagtgggggcaacacagtgtggttcacaccaggccagttctgtgggtaaacacagagttcctatttctctaccaacgaaggctgcagttttctaagcattacattttcttttctaatatcataatattgtagggagaattaaaaactgaaaaatgtgtctggctgcttgttccatatcccttcagccattgttcattctctcaaactattagctgtatggcctgagtttggataaggtaaacttttctaaaattgcacacgccaatttctagatttccttcaacctatatttacttcagacttgatctttgtacataagtatttttttcctaatttggaaaacttgctaaaatagcagcttaaatttcttcatacctaccagaagagctaaaatgagaaaggttgataatattaaacattcacgaggatgtggagcaactggaactcttttgttgttggtgagactgtgaaatcaacattcagacatctaccccttgatgcagcagttttactcctgggtatttacccaagggaaatgaaaacacrtgtctgtaaaaagatttgtacaaaattgttcttactagctttatcacaatggtcaaaaatttgaagcctaggtgtacatcaataggagaatgaatacacaaaccgtgatatattcatacagtggaatactccacagtaataaaaaggaatgaactactgttatgtgcagccatttkcatgagtytcaaaaacatattactgattgagagaaaccttacataactgagttcatactgaatggttccatttagataaggtttcagaacaggaaaatcaatcagtggtaaaaaaacaatcagaacaggggttgcctctggctgcgtgggggtggaaaacgactgggaaggagtatgagggaaatttctgggtgatggtaacattctgtatcttgatacaggcttgggttacaggtatgcatgggtcactgcttgctaatacacaggcatatgcaaatgattcaggtttgtgcattacagaacatacacattttacttcaaaaagaaaagaactatgaaaaacacctaaacagtggtataaaaacagaagtgtttagggtaaagtatactgatatatacaagtcaatttaaaatgcatcaaacatatgcattggcaattaaatagaagggtgactatgtggacatatatgtggtaaagcaagtacaggaaatgttaattgtagcatctaggtgttcagaatatgggtatttactataaaactctgatgagttttctttatgtttgaaaaacttttatgaattgtgatggaaaaaactgctcaggttggaaagtggaaggccgctgatcagctggaacatattttattttgtttttcactggtacaatgtccatttgtgtcacagcaattgaatagcactcttctaaaattaaatgtagataatattgtaaatggttaacaaaaaaatacttagctaaaaggtctcttggccagattcccagctgaccaaaagccctttgcaggttgagcttttgctcagactccttggaggcagacatcccagactgggggcacacgatggtctctggaccttccaggttctgtgacttacctcagaaatgggactgccagctctgagcctggcccacgagcaggcactttctcccatggatgatctcattctgtcccaatggacactgggaaccataatgggaataaactcttctaaagcatttcattcagaaatccttcaagggagaagtgagcatcgtcttgctactatgttcaacctgccaactcggaagcctgagaaatgaattctcaaaggatcagagttttgcaagcatggtccagaagcttgagtttcttcattctcatggaagggtgattgggtcagggaagagtctgccttgaatttgtctctggcagtgattcaaatatcgtttctccttttcccattaaaggactggagggcagggagggaatcactggccaggcttaggatggtaagataagtcgctgctgtgatattcatgaggactgaggattggatcctctaccatgttaacctgcctcttccatcatcacactacagagggcatcagcattttacctctggagtcttcctggcaatgaacctagttggttagcacccactcatcatcctgattagaaaatgcaggccttctccagcccaagcacatggcccttccaaggtacatgcaggtacatgcaaggtcacagcgctgagaaacaattagaacaactgcctccttaaactctcctcaggaaagctttgcccttccacttgacagaagcaggacagggatggagagcatcccctaaaccacttttgaaaagggcaagtccagaaagggcagcacggttgccagtgatgtggggagcttattgtttcatggctattatgagctgaatgtttatgtgcccccaaaactcttatgttgaaaacctaacccacagtgaggatattaggaggtgggatctttgggaggtaattaggtttagatgaggtcatgaggatggaacccccatgatgagatcaatgctcttataagaagagaacaagacaccagagagcttactctcaggtgtaaggatacagcaagaagacagccttctacaagccagcaggagagccctcaccaagaacccaaccatgctggcaccctggtcttggacctccagcttctagaactgtgagaaatatctgttgtttatgctgcccaatctatggtatcttgtcctagcagcctgaactgactaaaatactggtattgatggcaaacatgtccaccatcagatggcctgacttccaggacagtatctatctttgtggtgtggtctcatagcacagtattggaaactgtatggctgtggcaactagacttggatgtggctttctagcagcgtgamctcttggaagatgtcaggccattgagcaagatttatcagagggcaagatttgtcctgtgttcctgtggtatggagaagcagctggattaaggtggtkgtgtttgcctaacctccttttccctgtgcaggcaccccactgccacagaacaatgatctccattaagttttcatctgctgcaattatcttcatcaaattctcttctggcaatcctcttttgagtcttctgtgttagtagcaattacaagtcaaaagaatcatcaagaatgaaggcctaagtccctgcctagcccatcacaaataacccagtgtcaatagcacgtatgttttggacagtgatgtcgctactccttgggttggcatgtggtctgtgtcatcagggttgcagttgctcaccatgtagggagtctggcgtactgcactcattcagctagcaatccaaagggttcactggcctatgagagcaggaggcagtgggagccctggagaaggtagtgattacagccttgtcagtaccacctctctttcccacagacactgtggtgtgggggctattttcccaagcaccttctagcagacaaacattttaggctgtggtgaagggaatgagtgaaagtcatgacttctgatatgttttcttccagttttctcatggttagtggatggtcctggagaatttgcctttctaggactcagatttctataaagttaatactgagttaaacaaacagaatactgctcaagctcctgctttaagagtcaaaatatgtaatcttaaaactggtcctcaagaagtatgctttcagtgcacaacacggcacaaaaccacttgagacgcagttgaacttttgtgaatagatwttttgtttttaatggcacttgtccatgggtatggcctgcttagctttcaagagtcaaaggtacctcaagaattttactttgctaagagctttggtttttaagacactattttgactaatcttgttcaaaagcatccttcccttcctcacagagaacatttaggataaagtttgctttgtcagactctgaaggctaaatgagcagcattctctgttgtaaagccaactgtgggcagtgcttttagttgccatttaaggaactgtggcaatctagtacagtaacttcaccactcaaattggaccctaattgcaagtcacaaagacagctctgcctgttgtggtgtagtcacttcatttctatgtctttgtctgtttgactcacatacttagaatatataagaagaagatggaagacagatctgccattcaatcaatgtcatatagttcatatttttcagatttctcaaacttacaagcaacattcatggttttatttctagaacaatatgtatctctgagataatcatgacaaaataatatgcaactcaaggtgacaaattaattttactctcttatctcttcatttttctcaaaccacatgaataagaatagtatctttactctgaaatgcccaactggttgcttaagtcattcatttgaaatgcaaagattgacatctctttacagatgacttattgctaactttggataagtttctgaagtcactggcttaataaaaaataaataaaatttcttatggctacatattgccaagtaatactaactacctcaaaatggaattgtagggtggggatgccaatcagagcaaccctgagcatagtgttctaatcacggccaaatcgaattcacttgtagtgattctagatggagatttctaattagaacagggacaaatccaggttctgtggagcctaaagtttatgcaattctaacagccctccttggtaaaaaaaaaaaaaaaaaaaaaaawaaaaaawtcwaaawttatggatacaaacttgttaaggkgaaacttaaacatcattagctttcatggcaaatctggctttgaattagaccawttaaaacctcacaaattgaraataacttgatttacttcatcagcatctaataataccaagtattgaaaatatttgaggkgctttgatgcctgataatttttaacaattgaaggttactgaaatgcttaaaatattttgtagcataatgaacaggggaagtggcaactcaatctctgctgatgtgtcctttcaacccatgaaaatttagaaaagaggtgaaatctcaaataagtgggtaatgctagcaataagaaagcagccaagaaaattgaaaactgataaggaaaaaacttgttgaagtttttaaacttttattttagattcatgggtacaggtgcaggtttgttatataggtaaattgtgtgtcacgggggtttgaggtacagattatttcatcacccaagtaataagcatagtatccaataggcagtttttcagtctaccctcctcccaccctccaccctcaagtaggccccagtgtctattgttcctttcttcatgtccgtatgtgctcaatgattagctcccacttatgagaacataaggtatttggttttctgttcctgcattagttcgcataggataatgacctccagctccatccatgttgctgcacaggacatgatcttattcttttttaatggctatgtagtattccatggtgtatatgtgccatattttctttatccagtctactgttgataggcacttaggttgatttcatatctttcctattgcaaatagtactgcagtgaacatacaggtgcatgtgtctttatggtagaacaacttacattcttttgggaatatacccagtaatgggattgccaggttgaatggtagttctgtattaagttctttgagaaatcaccaaacttctctccacaatggctgaactaatttacattcccaccactactgctgtataagtattcccttttctaagcaacctcaccagcatctgtttttattattttttaataaaagccattctaactagtgcaagatggtgtctcgttgttttgatttgcatttctctaatgatcaacgatgttgagcattttttcatatgcttattagacatatttatgacttcttttgtgacgtgtctgttcatgtcctttgcccaatatgtaatgggttgtttgttttcttgcttgttgatttaagtttcttatagattctgaatattaaacctttgttggactcatagtttacaaatattttctcccattttgtaggttgtttgtttgccctgttgatagttattttgctatgcagaaactctttagtttaattaggtcctatctgtcaatttttgtttttgttgcaattgcttttggcgtctttatcatgaaatctttgccagggcgtatgtccagaatggtatttcctagtttatcttccaggatttttatacttttaggctttacatttaagtctctaaactatcttgaattgatttttatatatggtgtaagtaatgggtccagtttcartcttctgcatatggctagccagttctcccagcaccatttgttgaataggaagtcctttccccatcacttgtttttgtcaactttgtcaaagctcagatggttatagatgtacagctttatttctgtactctctagtctgttacattggtctatgtgtaccatgctattttggttactgtagccttgtagtgcagtttgaagtcaggcaatgtgattcctccagcttctttttgcttaggattcccttsgctgtttgggctcttttttggttccatatgaatgttagaatagttttctccagttctgtgaagaatgtcattggtggttttatagaaatagcattgaatctgtaaattgttttgggcagtatggccattttaatgatatcgattatttttatccaagagcatggaatgttgttccatttgtttgtgtcatctctgatttctttcagtagtgttttgtagttctcattgtaaagatctttcacctccccggttagctgtatctctaggtattttattctttttgtggcaattgtgaatgggattgcattcctgatttggctgtcagcttaggtgctatcagtgtatgggtgttgttaggaatgctactgatttttgcacattgattttgtatactgaaactttgttgaagttgtttatcagctcaaggcagcttctggtcagagactatggggttttctaggtatagaatcatatcatctgcaaacaagaatagtttgagttcctttcttcttatttggattcttattattttgaggtatttaactttgatgcctagtttgttaaggatttttaacatgaagggatgttgaattttattgaaagccttctctgcatctattgagatgaccttgtggcttggggttttgggtccgtttatgtgatgaatcacatatattgatctgcatatgttgaaccaaccttgcttcccggggataaagcctacttgattgtgggagattagctttttgatatgctgctggattcagtttgctagtattttgttgaggatttttgcatcaatgttcatcaaggatattggcctgaagttttctttttttgttgtatctctgccaggttctggtatcaaaatgattttggcctcatagaatgagttaaggaggagtccctcctcctaaatttttgggaatagtttcagtaggaatggtaccagctcttctttatamatctggtagaattcagctgtaaatccatctggtcctgggctgcttctggttggtaggctttttattcctgattcaatttcagaactcattattggtttgtttagggcttcagtttcttccttgttcaatcttgggaggctgtgtttccaggaatttatccayttcaactaggttttctagtttgtatgcatacaggtgtttgtaatagtctctgagggttttttaaaaaatatttctatggggttgatggtaatgtcccctttgtcatttctgatcgtatttatttggatattcattcctttcttctttattagtctagctaatggtctatatatgtcatttattctttcaaaggaccaacccctcgatttgttcatcttttatatggtttttcatgtctcagtttcattcggttcagctcagattttagttatttcttgtcttctggtagccttggggttggtttgctcttgtttttctagttcctctatgtgtaatgttaggttggttaatttgagatctttataactttttgatgtgggcacttagcagtataaactttcctcttaacactgctttagctgtgtcccagagattctggtatgttgtatttttgttctcagtagtttcacataatttcttgatttctcctttaatctctttgtttacccaaaactcattcaggagcaggttaatttcctgtacagttttgagtgaccttcctcttactgatayatatttttattgtgctgtggtttgagagtacagttggtataatttcccttttttttaattttctgagaattgttttatgctaattgtgtggtcgattttagagtatatcgcatgtgcagatgagaagaatatatattctgccatcttagaggtggagagttctgtagatgtcttttagatccatttagtcaagtgttaagttcaagtcccgaatatcttagttgtctgccttgatggtctgtctaaactggtagtaggatgttgaagtctcccactattattttgtagtcatctaagtcacttcttaggtctctaagaactcatcttatgaatctgggtgctcctgttttgggtgcatatatacttaggatagttacatcttcttgttgaattgagccctttaccattgtgtaatgcacttgtcttttttttaaaatcgttgttggtttaaagtctkttttgtctgaaattagaatagcaaaccctgctttttttctgttttccatttgttaggttgatttttcatcatccctttactttgagcctgtgcgtgtcattacatgtaagatgggcctcttgagggcagcatacagttgggtcttgcttctttatccaacttgccactctgtgacttttaattgagacatttactctgtttccattcaaggttactattgatatgtatggatttgattctgtcattgtattgttagggggttattaggcagacttgattgtgtagttgacttatagtgtcagtgggtctatgtacttaagtgtgtttttgtggcagtcagtaatggcctttcctctccttatttagcactcccttaaggacttctcgaaaggcaggtctagtggtaactaattcccttagcatttgcttgtctgaaaaggatcttatttctccttcacttaggaaacttagtttggctggatatgaaattcttagttgtaatttcttttctttaagaatgctgagtgtaggcccccaatatcttctggcttgcagggtttctgctgaaaagtctgctgttagcctgatggggttccatttgtaggtgacttgccccttgtctttatctgccttttacatttttaatttcatttcaaccttggtgaatctgatgactatgtgtctaggggatggtcattttgtatagtatctcacaagggctgtctgcatgtcctgaatttcactgttgccctctctagcaaggttggggaaactttcacggacaatatcctcaaatgtattttcgaagttgcttgctttcttgccctctctttcagggacaccagtgagttgtagatttggtctctttacataatcccatatttcttaacagttttgttcattctttttaaatttttttctttatttttgtctgactgagttatttgagagagccagtgtattggtccattttcacgctgctgataaagacatgtaaattgctaagactgggcagtttacaaaagaaaaggtttaactggacttacagtcccacatggctggggagggaggcctcacaatcatggcagaaggcaaccaggagcaagtcacatcttatgtggatggcagcaggcaaaaagagagagagcttttgaggggaactcctctttttaaaaccatcagatctcctgagacttattcactatcatgagaagagcatgakaaagacctgccctcatgattcaattacctcccaccgggtccctccaacaacatgtgggaattcaagatgagatttgggtggggacacagccaaaccatatcactgcacccctggcccctcccaaatctcacatcctcacatttcaaaaccattcatgccttcccaacagtaccccaaagtcttaactcatttcagcattaactcaaaagtccacagtccaaagtctcatccaagacaaggcaagtctcttctacctatgcgcctgtaaaatcaaaagcagttagttacttcctagatacagtgggggtacaggcattatgtaaatacagccattccaaatgggagaaattggccaaaacaaaggggctacaggcccccaagcaagttcaaaatccagcagggcagtcaaatctttaagctccaaaatgatctcctttgactccatgtctcaaatccaggtcatgctgatgcaagaagtgggttcccatggtcttggacagctctgcccctgtggctatgcagggtacagcctccctcctggctgctttcatgggctggtattgagtgtctgcggcttttctgggtgcacggtgcaagctgtcagtggatctaccattctggggtctggaggatggtggccctcttctctcagctccactaggtggtgcctcagtagggactctatatgggagctcccaccccacatttccctccacactgccctagcagagattctccatgaaagccccacccttgcagcaaacttctgcctggacatccaggcatttccatacatcttctgaaatctaggcagagattcccaaacctcaattcttgacttctctgcactcgcaggttcaacaccacatggaagctgccaaagcttgaggcttgcaccctctgaagccacgacccaagctctacattggtccctttcagccatggctggagtggctgggacacagggcaccagtccctatgctgcacatagcatgaggaccctgggtctggcccacaaaaccatcttttcctcctaggccctcctgtgatggcaggagctgccatgaagacctctgacatgccctggagacattttccccattgtcttagggattaacatttggctgttcattacttatgcagatttctgcaactggcttgagtctgtcctcagaaaatgggattttcatttctatcacattgtcagggtgcaaattttctgaacttttttgctctgtttcccttataaaactgaatgcctttaacaacacccaartcacctcttgaaggctttgctrcttagaaatttcttttaccagataccctaaatcatctctctcaagttcaaagttccacaaatctctagggmaggggcaaaatgccaccagtctctttgctaaaatataacaagagtcacctttgctctagttcccaacaagttcctcatctccatctgagaccacctcagcctataccttattgttcatatcactatcagcatttttgtcaaagtcattcaacaagtctctaggaagtttcaaactttcccacattttcctgtcttcttctgagccctccaacctctgcctgttacccagtttcaaagtcacttccacatttttgtgtatcttttcagcaatgccccactctactggtaccaacttactgtagtagtctatttcacactgctgataaagacatatccaagactgggcaatgtaccaaagaaaagaggtttaattggacttacagttccacatggctggggaggcctcacaaccatggaggaaggcaaggaggagcaagtcacatcttatgtggatggcagcaggcaaaaagagagagagctggtacaggggaactcatctctctttttttttttttttttttttttaagatggagtctcactctgtcacccaggctggagtgcaatggcgtgctctcagctcactccaacctctgcctcccgggttcaagtgattcccctgcctcagcttcctcagtaactaggattacatgtgccttccatcatacccagctaatttttgtatttttagtagagacagggtttcaccacattagccaggctggtctcaaactcctgacctcaggtgagccacctgcctcggcctcccaaagtgctgggattacaggcatgagtcaccgtgcccggctgggaactcctctttttaaaaccattagatctcctgagacttattcactatcctgagaacagcatgggaaagacctgcccccatgattagattacctcccactgggcccctcccacaacatgtgggaattcaagacgagatctgggtgggatcacagccaaaccatatcagccagtcttcaagctctgagaatctttcctcagcttgatctattctgctgagattgtattatgaaactcttgaagtaagtttttcagctctgccagatcagtttgattcttcttaaaatgaccatttcatctttcagctcccatatataccttagattccttggattttgctttaactttctcttgaacctcaatgatcttcatgcctatctatattctgacttatatgtctgtcatttcagccatttcagtctggttaagaacaattattggggaactagtacagtcatttggagataagaagacactctgactttttgagttgccagagttattgcactaggtttttttgttttgttttgttttttgttttttgtgttttttatttttttattttttcatctctgtgggctcattcttcttcagtctttgaaattgctgtcctttggatgtgttttttttgcctttatcttctttaatgcccttcaggctttgattgtggtataaggtgattggcttcatttctgcaagattttagggggacaaggctcagcttggcacttctgggctgcatgctgtaactctagggggttggtaccgggccacagctttgttctctggccccttgtggttagcaacctgctttactggaggggtcgaggtattccctgtctgctggccacaacactccaatgggggttgctggccacagagtttcaytggggcagtggcaacgggatctgtgcttgctcatgcatgccagcagccacagcagcatgtcagggtgcacacacatcagctggggaggaactttctctccaagttgaggagtgagtgggaggcaggccagtaagggagaagcagcaactggagagtcatgtaggcaagagagttctcttctaagagaggagacatccagacttactcacatccaggaaagtagctaaaagaattggatagattaaaattgaaataaattgaggaaagttaagtgaagcaaactccctgaggttatagaaagggatgagatcaaaagaatacggaggagcaaggatgtggagaaatttctttgtacattgctggtagaactataaaatggtgcatctgttgtggaaaataatttggtagattctcaaaaacttaagcatagctttactgtaggacccagcaattccacccaaaagaattgaaaagagggaattaaacagatacttgtacttgtgctgtggttattacagcattgttcacaataaccaaaggtggaaatawcccgagtgtccatgaacagatgaattgatttttaaaatgtgctgtatacatataatggaatattattcaaccataaaaaggaatgaagttctgatatgtgctacgacatggataaacattgaaaacatgttaaatgaaataagccagacaaatattgcataattccacttacatgaaatatctaaaataggcaaattcatagagatacaacatagattaaaagttaccagaggtttgggggagtagggagttattaagtaatgtgtggataatttctttttgagatggtggaagtgtttttaaaatagatagtggcaataattgcataacactataaatgtaatcaatgtgaccatatacttaaaaatggtcaaaatggcatatttcatgttatatgaattttatcccaataaagtttttaaaatgtaatgccagccataatatatgtcatgattcaatttggtaaataaaatattcaagtattttattttaaaaaatattaagtaattagcaccaagcaagacagggttctcttcctctgagttgggagcataggtgaagttgtgtacagatataaataagattgtccttatgtgatggttaatgtatcatcttgactgggctaagagatgcccagatggctggtaaagcattatttctgggggtgtctgtgggagtgttggtgaaggagagtagtatttgaatcagtaggctggataaagaagatggccctaactgatgtgggtgaacatcacctcatcccatgatggccctaatagaacaaaaatatggagaaacggtaaatcactctgtttgacctgagacagccatcatctcctgcccttggaaatcagagcttctggttctcaggccttcagactctgactggacttatatcatcagccccacctcaccctcccattctcagtctttcagacttggactgaattataccactagctttcctgttttcccagcatgcaggttggtcatatctaaccagtatctcattggttctgtttctctggagaaccctaactaatacactttgtcttcatggacattaagggagttccttacagcctctatttcctttgctaaacaagagtcaagctcctctgcttggggtagatggggattggtagagatttaataaggaactggaggacagcagtgaaggttaagaatggccaccaaggggaatgggagagggcaatgaccaaggataacaaaagaacagttgaggtattctactggccagctgagattggtacastgcaaatgtgatgtgtttcatcttcatggttccttgatttttttccccagctgcactaggtagaggagttagagaagctgrattgctggactcatcctggatggggggtttgtgggatggacactgcaaaaagctaatggcttaagagggctactttatagagggctaataaaagaatagctccctggtcaatcattgggttcagacttggtatgaaagaggagtcagaaagggactgataaccctggagaaagtggagttgacataaaaaaaatgggtttaatgagartgaggagtgagagacagatcaggatattgggctttcagtgttgcagagataggactcttttggttgatgacatgataagaagaggttgtaaaaggaaggggaaattgtagaaatggttggtgtattaaagtagaccaacagatattaccagtagtatataatggcttaattatagtagaattttatttcttgctcatacagatagtccaaggtagctggtggggattttctgcttcactgtcattcaaagacccaggtgaaggaggccttgttatcagttaaatagctttcaagataatctgggcattgacataagttagcataaggaaaaagaataagaagactgtgcaggtagttttatgggcctgagagacgcatgcatcatcccttcccatctcattggccagagcttagtcacatggccacactaagtttcaaagaagcctgggaaatctgtagttgcgtatcctgcaaaaagagcaaccagcacctccctttttaaaagcatttgttgttttgatgctgctgcttagtttagttcttaagtccaaagataaattttgaaaaggctaacattgaaagacccttcacagaattacaagaaactattttaaaattcagatggaagaacaacatcaaaaaaagctcatatagccaaaacaatcctaagcaaaaagaacaaagttggaggcatcatgctaccagacttaaaactatactgtaaggccacagtaaccaaaacagcatggtattggtataaaaacagacacctagaccaatagaacagaatggagaactcagaaataagaccacacatctacaatcatctgatctttgacaaacctgacaaaaacaagcaatggggaaaagattctctatttaataaatggtgctgggagaactggctagccacatgcagaaaactgaaactagaccccttccttacaccttatacaaaattaactcaagatggattaaaaccttaaatgtaaaaccccaaastataaaaaccctagaagaaaatctaggcaatactattcaggacataggcatggacaaagatttcatgacgaaaacatcaaaagcaattgcaacaaaagcaaaaattgacaaatgggatctaattaaacaaaagagcttctgtaccgcaaaagaaactatcatcagagtgaacaggtaacctatagcgtgggagaaaaattttgcaatctctccatctgacaaaggtctaatatccagaatctacaaggaatttaaacaaatttacaagaaaaaaacaaacaaccccattaaaaactgggcaaaggacatgaaaaaacacttctcagaagaagacattagtgcagccaagaaacatgaaaaaaactcaacatcacagattattaggtaaatgcaaatcaaaaccacaatgagataccatcttacaccagtcasaatggcaattattaaacagtcaagaaacaacagatgctggcaaggttgtggagaaataggaatgcttttacactgttggtgtgaatgtaaattagttcaaccattttggaagacagtgtggcaattcctcaaagatctagaatcaggaataccatttgattcagcagtcccattactgggtatatacccaaaggaatataaatcattctatcatgaagatacatgcacatgtctgttcattgcagcactattcacaatagcaaagacatggaattaacccaaatgcccatcaatgatagactggataaagaaaacgtggtacatagacaccatggaatgctgtgaagccctgaaaaggaatgagaccatgtcatttgcagggacatggatggagctggaagccattatcctcagcaaactaatgcaagaacagaaaaccaaacactgcatgttcttacttgtaagtgggagctgaagaatgagaacacatcgacacagggaggggaacaacacacactggggcctgtcaggggtgggttggggagaaggagagcattakgaaaaatagctaatgcatgctgggcttaatacctaggtgataggttgatagtgcaacaaaccaccatggcacacatttacctatgtaacaaacctgcacatcctgcacatgtacttaaaataaaatttaaatttaaattaaaaaaaatttttaatcagctgaagaagacttatttgacaatatatgggaggtcttcaattctagttatattttgtaaatctactattttgaaaagcctgcctagtttcatctctatgacccagttttctcatttgataaaatgggccttatgtattttccttcatcagaaatgtgtttcaggtttttgttttttgtttttttggcttttttttttttgtaatacagaccctttatcacctaccttgtgccagcagaaaatattaaatagcactaggaaatactcatgaagtcactgaaagcattagcccttacagtgagccaaaatggattttgtgtccgatttaagtgcaaaagccattttgcttgtgactgttacttcaacaaatgaaatacttttgagccacacaaacagcttctctctgaataagctgctcagtgttgatttttaaataaggtgaagcctccccacagtgtatattatccactctaaatttcccaccaataggaaggcaaggcaagcacagccatcagctgagagtcattggctgagaatgttgagctcatagtcactccacccacaaggagctgctgacagaaggtgggcgggagtggaggcatgtgaaggatccatacaacaaagaggaacttctctccagaagatacttcatcccaagagccttgtgatagtattcaaaagggcttggtgtaaacttgaatagttcaccatcttcctttccaaccttatatggaaattcttccaaaaataaaccctgtcttggtggggaaargctgtttaaagaaacatggtgaattactacaaagtactaggtgtgcctcamaatgcttcctcccctgatattaagaaggcttatcaccagttggctctgcaggtacacccagacaagaacccagggaacaaagaggcatctgaggagaaattcaaacaagtagcaagaggcctatgaggtcttgtctgatgccaggaaatgaaatgagtatgacaagtccagaaggaaccgaaccaaaagggaaacagaggagatggcagagacaaaaaacatttggaggaggaactatgcattctcaggattctcaggtgatgatttttcccttggccttgtgggtaaagccaggagattccactcctccatctttgatgtggctcccatattggacacaggattttccacttttttatctctgggctccagagcaagtacctctacctctgagacatttgaaccctttgtaagcagcrgactgagaaacttcagactggtcaccatttgtagccagacagtaaatggcaagagagttgttacaaagaaagtgctagaagatgtgagggggaagaatgaagcagaaaaagactgtttcatgagattcctccacatcattggtaagaagttgctgctgtgttctttaacagggagattttcatatgaggctggggtgttctgatgcttatgaaagactgaattggtgtttgagaatgttttgaactaggatggacagaggtcagcttagttcaaacctctcatttcacagaggaggggaatgtgccagatgttgtgtaagaacctagtaagtagcaggcagagcatccatccccagtcttctgattctaaattgagccttctttcccttatgcaccatctgggacagtagaggccaccaccacaaatatggccttcccagtcagcgcagagcccgaccttcataaattccattgacttctcttcaatgtgtttttcctgccctaccttgcaattgcctagttgcctgtcttgatggctactctttgtctcttcctaggctcttttctctttgctacttctgttcccacctattctttcttcctatacatttcccatggaccatatcacaaatagcttcaattcagagttacctagtatagattaatgctggcagagagaatgagtgaaaagtaaatgggttgagatctttatatgcttttaaaatttatacatattttttaatttaaattttttagagatagggtctcactatgttgcccaggctggccttgaattcctgggctcaagcaatcctcccacctcagcctctcaagtagctgggactacaggcatgtaccaccatactcagcttttatatgcttttttcaataactagcatttattgagtgatcagtgcatgtcaggaattctacttcacaaaagttacctcaataatacttgcagcagtgaaacacagtagttactttcccccatcacatagataagaaaatgaggcttagaaaaattcagtaatgtgccccaggccccactaataagcaataaagtagtgtcttagtctaaagcacatgcttagctagtgagctataatatctatgaatcctactcatttatttttaaatctagattcttgccctcattggaaatttaaacctatcatctcggaactttacttccatgcatgagtacttgctggaacttaataagtatgtaaacattgtttattgcccaacgggaacctgaaggttaattttacataaagacacaawcaatgtcaaagttttactgacactaacaaatgattatcagttaacacacaattcccaagatgtgaaatatctttttgttttggacttcatcatgatgtacatgcaaaatcttggttttgttttgtttagctggaattggtcacactccaatcacttcatttatattaatacacagactgggatccagaggagttgttccttacggaaagttactgatagagtctgcaagaacctgtcttccagtttccagtcccaagctcattgtagcacagcatgctgttggtagaatttggatttcacttgcatcccatggacgttatgtatcaaattattagctttcttaatcaaggaactttcctgtgtgtacaatttttatgaaacgaatgttttatgtagtctttgaactctttaatctcagtaaattttctgagcctaaataggaacatgcctacatcttcctggcaaaggggagcacactggcagaaaggaagcagaaggtggatttggaatcagaacacatcccatttctttcgaagcctatccatttccacttagtagtcattgagaacctcctacatgtcaggcactgtgtgcggtgctttgcatccagcatttctaatccctaaagtcctttactggtttatttccatcttaaggtgaggaaattgagactcagggcagttaagtcccctacccagggtcacatagcagtttgkggagacaggattcagattgcggtttgcctgactgtaagcttcatttccattattctctattccactgtcattcctttgagctgctctagtcagggtttaagaggaatgtttggttgtatgtatgaattaactatatttatttcaacatttctaaaatgaggatttccagatggagctttcttttaccaaccctggtctgaggtgaactgcagtgtgtctactgaacaaagggaaaatcagattggagcatgaaacatgatttttccattttgtcttaagtaaaatccaaatttcagcatttttcacaggcatacttggcttttgacagaaatgctgagttgtcaaaggactttttgccagcaaagattttttaaaaattcactttgagttagtcgaggaagttttcttggtgtatagaaatgaaagcagtgtcatctcttcctgatgcctgtttaaaacatgtagtaagtgaagtgtgagcacacaacagccgaggaaagatggagggtaggagggctttaccgttcagtaaaacattccgagcctgtgtgcaagacacagcgtgagctttaaggttacatctaatttggtctctgacctcacagtgtcttcagcacggctactgtggtttccaggggccagaggctcctctcccaactctcagacatgcaggtttcactaatcagcaatctctaggattactacttgcctaaatargaagcaaagtactttaggattattgagtcaattcctgtgtccttaaggaattttctgctctttgtactatgaatcagctgctttttaatgttatagtctctcacaaattaatatgagacattttgtgttctggtagctgacagaataaagatttcccaaactcaaaaccaccatagaccaggtagaagtaattccttgttctgctctggttcatattaggtggttgacaagtaaaatgaggacctggtcctgtcgagaatgatggaagggataatgacaagtgattgtataactcatagctcagggagcatttgcaagagcggtttctcacagaatcttgtcagaaaccccgccaaggaggaaagagaagagaagggacttgcctaaggtcacaaagtgggtgtttcttcagccgcctagcctgctgctawttctcccacactctcaggaactcaaagcacatttccttcccagcctggcaagcaaggcacatgagagttggaggagccgccctggggatggtgtgggagggagtccgttttacgtagttgcagctacacacggtgtccccatgtctgtcggtcagtggaggaggtaggtacagaagtatgtggttataaccatgcacagaaatgtcgtgactcaccgaccatgcacagctggtttaactcttgaatccaagtcacctaggaaccagctcaggttcttaagagacgtaaggtccccatagcaaacaataacaaaaataatgtggcattcagcattcttctcagtgcttcctttccaaaagtttcaaaccactttgtatatttgggatccccatctcttttgtgagaagcctgtttttatttcaccccaaagctttgtagtctctccagaatacctggagtgcagtgtacctgactctgtgcctaagggtgcagggaatggactctgagcagaacagggaagggattttcagctggcagggccctacccctcactaccttatttggaagtttgaggatccattgagagggagtgtggtaggggaacttatcttggagaggttgatttttgggttgaggcaggatggttccccctttaaagggcaggaaagtctcccagaggttgagtcatttttctaatgcccaatgttgcaattgtgaggactccaggaaacctaagactctagtccccatcggaccatctaaaaaacatatatttaagtatcaggagaagcagagggggattataaaaagaacattggctttggctgcaggtatatgagagttcaaattctatgcacccctttcctaacttcttgatcttagagggtgaacttcttgcttgatccttcgcttgcctgtaaaatagaaatgatcatctctgcctgttctaatttacagagttgttttagaaattaagttcatggaaaattctgcataaactttaatagactttataaatggaaagtgtcattattcttttcagaagcagcatctttgatccttaagggtacatgcagtaagcttgcgatctgttttttaagatgtgatgtttgtgataggatcttgaaagcaagatcagctatagattgtgtttaatgccaaagtatagctaaaagctgtaagataaaaatagaggattgcattttttccattttggcactactacaaatgtaatgtttttagcttgggcacaagtggtgtgacttttacctctgaacttccttttgtcttcattatccttgagcttttggactcacatgttggctttaccttctgcttccattataggaaattgatggaaaatccctgctattgatgacaagaaatgatgtgttgacaggacttcagttaaaattggggcctgctctgaaaatctacgaatatcatgtaaaacctctgcagacaaagcatttaaagaacaactcttcatagtacagtcaaaytggggtcttcgacctcaaaaaatacataatgacataatttagtttcatgtaatgaaactttgtaaacagaatacatacatgtgtatatgtaaagaatttcaatcaaatgaaacrttatcctattggatagactaggcaattcatcagctcacctgaaatcagccaggaggagcaaggacaagatgcgcacagggtggttttcctcatggattttgtcaaatagatgatctttgacacgattagacactcctccccacaaaggctttgaaatcataaggattttcctcatctctttatagctttcccaaaatcttttaaaaaagaatttaattaaatgacagtcttttggttacagacttaggatgagtaaaaacaagaaaatttggggagggggagaaagaagaaagggattgctgtctcccttgaattcctctgttccttagagcttgtgttacttggacggaattgccaacacccttttttatagagggttctccacttgaccttattaaggttttattgggatatgctgcagtgtttgaaatgaacatgcatcatggccccttcaggagcagaatcatagctctgaaaagagaagctccgttgtgtactgaggatatccatccatattcagctagctttcaaatggggtaaygatattttctgcatagattttcttttaaattggttctttgtttctgaagaaagaattttttttaacttcatggttttatttataataatttgtttctgaagaaatttgccgagagttacaggtcaaaaagccttgttactagtacagaatatttttatatatattccttcatgatggtgtaattttttttaattgtcctatgctttgttcggttcctgggttaagtacttgtttttaagagcttggaaaaagtgggcttgctacatctctgttcaaagagacatttgttcaatctctgtgtgtcaacgccttgttgaattggtgctttgtggttgcaataaagcattgcttcagtttattgccagtgtatctttgatcttttctgtttggttgcttcttcagttgggattaaggattaaggtctcctggaaaccagggaaagaaaattaagcattttttggggmaaaaactttagaggtagaaattatacaaatctatgtgtggatttatcttctttttaaagtgaatcattcgagtagatctcatttcttctctcatccccaattttaggtattattttagccaaagatttttttgtttgctgtaggccagtgggggtcatgatttttttgaaattctaawaaaagctattgactttctctgcagacaaaagctcacatttccacatacaaaacttgcagagagttggtggactcataatttccctcttcctcctcctcaagttaagagttcctattttagagaatatcataattcagtcccctgtggagataatttcttgaaagaacagaaagtctgaagatgacagtgaaaaaaaacacaggaagtggtatagatagtaggtgggtttaaaaatgcattccaaattaattcaattatagagcgtacggagtatctgaaatttaagtaatgctttgttttcactgtaactgggaaaagtggttacaaaagagacttttttttaaatctccaagttcccacagtctacctaagacagaaaacgcaagtaaaaggcaaaatatrtagttaagtgttgtgaggagtgatggagacaaaaggtgacaactgcagctgctggagacctggataggaaagaagggattcctggatcaagcagaaggaagatggaatgaggatcttgatgaaaacctctgtgaaggagtgtcctgctgtaaaatctgatgatgtttgacccgtctctacctcaaagggatagtatgaggtatttctgagccctaacttttgtgcacccacctgataccttctgtagtcgtttggaataggtttggttgtgagtgatggaaactgtctctcccacccccaccaattaataaactagatagacacctacttccctctcatggaaatgtccagatagggggaccagaggtggtgtggccctacatgatggtaggaacacagtttccgcctatgttttttttccaccatgcatgacatccattcccagaatcatttcataaatagatgctgcttctttgccatcatcatttgaattccaaccagtggggagaagaaaggggaaaggaacagaccttcctttaaggatacttccaagaagttgttcatactacttcctttcatatcttgtggactggaagtcaatcacattacttgaaatatttcatgtttttattggaaaccatgagcccartcaaaactcaaagttccattattctgtagataaaggaaagtggatattgagggacaacttgctgttaccgatgtcagctgaccactaaacactcatagcaaatgacactaaaagggtttctttggtggtatttttcttgagatttgaactcgcgttcaactaagtcaactaaacctcagatttggactgctctaggagtacttgggggtgaggggaattgaaaagcaaacagaaaagtataaaatcatccctcagtctctgataagagctttcaggcaaaattagcaatttaaagataatctgcctctcctacagtcagcataaaggcctaggacaggcaggcctgcacaccttggcaatagctcaaggtgatttcatcttcctctgtttaggggaaaaccaatstgatcaaaataggccaaaaagagaggctggaagtacttgaaattcagcaggtaggcagcctttgtctccagacagctgtaaaaaccagaaacgtctgatttcttttcagatcacactggatttctattcatgtgatctagatctgcaatgagtagcagacacatgtgctgtgaggggaagcacttcatggctgtgatgtgcccataatggtgaaggtttatatgagaattggctaatgttgaatttgattattctcaaccagagaagcagacaggatatcagaatcagaaggaatttaagaaagtaattgctactccccgccgcccccacatttgaacctctgattcagactctgcagaggagattgawtgaattgatttaaaggtgaggtcacaaactggccacttttcagtggaatctaagccaacatgttttactttggccaatgcagtatgtgtgtgttttaaaaaccacatttacacacttctagtgaggctgaaaactccaatttgttactcttccattccctaatttcttaaaaccagcaacttcacacttaagttaatgggcctctgaaggcaattgagacatcagttttagacacccccccgccaaacacacacccaacccgatctaaaacaaaaaacagaaaaacagtgagttcattcaggaattgaaaattgcaaatagattcaactgaaaagaaaacaagctagcatatcacattagaatgtgcagcagatttgagcatcattttttatacctagtgggcctgatgaatatgaggaaaaaaaggccaattggtagcagtcttttctttctgtcctcaacaaatatcctacgtgaatacagggtggtttttttgtttgtttgtttttgttgttgtttgtttgtttgagacggaatctccctctgttgcccaggctggagtgcagtggcacgatctcagctcactgtaacctccgcctcccgggttcaagcaattctctgcctcagcctcccgagtagctgggattacaggcacccgctaccacacccggctgatttttgtatttttattagagacagggttttaccatgttggccaggctggtcttgaattcctgacctcgtgatccacctgcctcggcctcccaaagtgctgggattataggcgtgagccaccgcaccggccaaatacaggtttttgtccctctgagattagcatctgcagtcagggacacacactgtccttcagttgcattagtgaaatatatctttgggggaatttaatttgcaaaagtctaatgacccacagttgcccagccactcccatatttggaagccaaatgcaaaaaggacttactggtggtgattcatctgtctttgacagtccttgtaaatgggatctgcaggggtcaggtctgggcccagagccattaagtgttttttggaatgatttggaagatgaagttaaatgttcaaagagctgactgctgcaggacagatatgcctcttaggagaaaacttgttaattctgcttctaaaccaggaacagaagccacaggaaggagagagcgagcaatggatgcattaatgaacagctcgttagtttcatgctgtagctccatgggaaattaaggagtctgggtaccatttctagccagtcatggcagtactatacagcaagaagattaaaatgatcrcatccaagttcatttggtgagtgtggctgtcttacatcttagaatcccttggaggtggtgaaccccaaggaagaattgtgtctagcctagcactggagcataataatggaggatcttgtggctaaagcaagttgatgtccctgcacttcagttaagtcagagtgttcctgtccacaactgtcttcagggagaaatcaagaaagctggggatgccaggccatttccaaatagaaactgtgcccctcttccacaggacaagtacacgagccaaactaccaccttttttaaagaagtgggaaaagggtaagtaaaggtgtaaataatactgaacatactcgttacctgcagaggatgcctcactcaaccagataaagggaaatatgctgcaaaatgtttgatgttattacccaggcaccatccatggggcatctttggtcagaggggttagaggccttaagcttccagcaaagtgagataaagcaaccaaggaaagttttgcyatgagggcctccagctctgtcactggatatctgtggcaaagttttccaaattaaatgtcttctttctgaatcaaaggcagcagaagcattcagcagaagcattcagcaaattgtgtttcatagcctttttcaatgattacattctatttttatgtgctggggaatatgtgatttgggaataatactatagaattcatcagattataagcacattttgagtgaaagtcagtaaaactccaagccaccagcagtttctgcctataataattagtgtttgggatagtattctgtctgctatacctgaacccaaygacaccagttgagatacacagtaggtagtgggtgaagtcactgaggttgcaccagatagacttgagcttgaatccagtcccgacatttacttgacatgggaacttgggtaagtcctatggctcctcttagcctcaggaacttcatctattctctagtgcagatgcagaaacagagtggagcagcaccagcctagcagtgcccaaaagaaacagaatgtgagccatttatataaattaaaattttccagtagtcacatttggaaaggtgacccaggaaaaaataatttaaataatataattttaagccaatttatccaaatattatagttttaatatataatcaatgcaaaaattattgatcatatattttataaaatcttttcatttgcctttgaaatccagtgtgtatttcatacttactgcacacctcaattaggacaatgtagctcaagtgtatcattcagggttagttttagttgataaaaacaacagtgacttaagatagaaattctctatgatgcatatgagttgaaggtgagcagttcagggatggcagggctgctacataatgattgggtctcattcctcttgtgtggctccaccatcctcaacacatagttccctatgtagtccaacgtggctgcttgggcttcagytatcacaactgcattccagccaagaaaaagagataaagaaggacacctcatatgagaaactgtgcttatctctttccctgacatccctttaacaagaacttagtcatttggtgatacctagctgtagcggaggttggaactgtagtctttatttcaggaagccaagtatccagataaacaaggacaggagggtggatactttggagaagccggcagttcttctatagtaccagtctcataaggtgatggaggactgaatgagagtacactgtacagttgtttgtattacattaaaagtgcattaaaatatagttttattactatgatctcattccatttcaagctcagtactgtcacagaattaatgtatgctgaacctaaatactgctgattggatgcatcctaataccgctaaaaaacaaaattatttttataggtggatgaaaatggatattgggtggttctagatgctttgttttcaaaaggccacataaacaaaaaaacaaaaacaaaaaaaaaaaaacaaaaaacttgcatcatttaagctccctgaaaaattgttatgttgagttaagggaaatgtgctaagcaaaatgcatatwcatttttattggtccccaaagacttagagaagttggtttgaggcattggtgaattccaaatggatcctgtccccaatccaaaatgagtgttcaatgacattcaaaatggttttgtgagactaatgaaagggaggtcctgatactgttgtgatttaaatgaaggtatatgtgggtcataaacaaacagaaaaaaattttaataaaattgaaaaaacctgagtggagctgcattcattaatttgagccaattaggttgacactagtctgctaaattgtctatttgggcaaatttctattaagaatttttaatactaaggtgacttcttgccaccagaatgtctacaggttattaatcagccttccgtatggtgtgtatacagaatgcaaagtaagttaacattggcctaatccacacatagttaaaaaggaaaactgtggagctatgcatccacagtggtggatgcagggaatcctggactaggggtcagaagacctgggttctggtcccagatctcccgttaacatatccacaagactttgtacaagtcttaacctctcttgcttcagttgctactaaaataaacatgtccaattagaggtttatttcagcactcaatttctatgattttctaaaaatgcaatgatctgagttatatgtgtcactggccccctccaccattcaattaaaactcacagcactgtcacattctacaacgtcatttccctttcataaatgttctaaagttttggtctgattatggttctctctgtgaagtaagctggaacagctgttttatcttgagaattgtcaagttggctgattgcataaccctatagctttaagtttaaatcactctcactgtgttccatggtagaagcatcccccaggaatakgccctctacacaatcagatcttagagttcagggggtaggggaagcacagatttccttggtagatcactgggagtgatagcaagtgggaccattcttatttctacatcttggttaccagatccacatgttctacctattggggacataacacaatacaagagccaagtatttagggaatgcactgcatcctggaggacagtaacccatcatcacagggtattatctccaagctgacatctcagttgtgcctttaagagattattccatcgctctctcaggccagcagctttgggatagtaaagtatgtgataggactatatgatcacttacagcttgcctttactttaaagagggtctctttgtcccttggtctgagtgacgttatgtggaattctgtaagcccttggatagtggtgctgactgagaccctgcgggcaggaaagacaaagccgtatccaaaatatgtatccattttagtcaggattaatcactaaccttttcaaagtaaaaggggcccaatgtgtttaacttgctgccaagtaggtgccatatcaaggtctccctcattattggtctctactgctggaagtttggatatttgttagcaaccgttawtattagtaatggaaagccagatccctggcttttgggcccgtgtatgtcctctacctctgccaccatggctattcatgagttccttgtaccagcgctgggattgccaatgacaaaggccgactgacatccactggcaaaatcaatctgtctgcttgattgtttagtgtctcatccatggttgatgctcttcggtggacattaagatgcaaagcaaaaatcttcacatttcatgtccacccacacaggtccctttacaagctcctttcctctgaccaatctcctaatctttctcattccaagtgtctaaccaaccaaccaagccaattgccactgcccacaagtttgtatatattattacctagaaacacattacacacaaagtagatgattctttggtgtatttcctaaaactgtattcattgggaggattttccttcaccactgtcataagaaccaccttctccttaatggccatagtgtgagaggcactggagaaacagcagtgggtaacatggggatctgggccacctgctcatgtgcctttcttgtgccctctagccctacctctacctactcctggctctctcatttccatattgctatggattgctgctgggcctgccagaccctaatacttggtgggtttgatagaaaccagcttatgatgagcagctctggccacaaaatctgttgaagttccatggtcagactttagtgtttactaaaacccagtaacacaccaggagctatttttcaaatggtgaatgattccctgctaccgatagcacagccttactccagaaccctgggagtttatgttgtaaatttcccattgggtcttggcagatatatgtaaaacatatatttggtcttcacccaacttcctggcatacaactcctcaaatccttagaatctctaaaacgatgtctttttgtatgctaataattgactgatggcaagcagtccctaggtagcttcaggatgaggtctggtcactggaaagacygaggyttgattagagggttkggactttcagtccactctcaaccactgggaaagagaaagggactgaaggttaagttgatcaccaatggccaatgacgtaatcaatcaatcctatgtagtggggcctccataaaaacccaaaagggcatggttcgaaaagctttcaaatagctgaacctatggaggctcttagaggatggtgcacctgggggttggagggagcatggaaactctgtgcctcttcccccatacctaaccgtatgcatcttttcatctgaaccctttgtaatatcctttataatagattgctgaatgtaagtaggtgtttccctgagtttcaggagctgctctagcaaattaatctaacccaaggaggggtgtgtgtgggatccctgatttatagccagttggtcagaagcacaggtaaaacaacctggagcttgagattggtgtctgaaagctgcatggagtggggcggtggtggcagtcttgggcattaattccttaacctgtgggatctgatgctatctctaggtagatagagtaagaatagaatggaattagaggatacttaaagggtgcctgctgcagaattgattgcttgcttgttggtggagagaaatccccaaacatttggtcacagaagtgttctatgttgattgttattgttgactgagagaataaatacttgtgagtgtgtttttgtccattcacggacccacacagcatcttccccaatcagagacatctctaatagcatagaatttgctgattcacgtggttcaagcagaaggaatatttgtatccagtctggacctactccagtgccttttacttctctgggccccacacaaagttggaagccttccttgccacccagtaaatgtgttggagcagtattaccatgtgtggaatatgagtcttccaaaaccaaagagaataccaagcactgtgctttcttcctagtggtagaaaacttgagatgcaataatgtgtcctttatttgggaagggatgtcctataataccctcatcaaacttttcctataaagggtcaaagggtaaaaaattttaggctttgtgtaccaaatagtctttgtttcaactactaactttgccattataacatgaaaacagtcataggcaatatataagcaaatgtgcatggctgtattccaataaaactttatttacaaaaacaagtggtgggacagatttcaccaatccttgtcctagaccaccagactgctaaaaatgtcactaatgtggtgggcctttgatgggtttatctaccattctccagagtacaagtgtcacttcttggtcattcagtccaattaacatagtctcatgggtataatggaccaatttaatgtcccagggaatgtcctgatgatcgtggtcccatatacaaaggctagaaaatttaatgtcatcctggggcaagaccataaatgtatgcaactgtccatccatgtgaatggaaactgcttctcttctygcttcttgatttgaaaattagatgggctttatccagcacccatgtataatcttccagcttttatatatattagctgggcctttgccactcttttggcctgtggtctccttctttccttaacaagcccagcatatgtctagctggtgtacgatgtgacttaccctatttatagatctggtggtcaggaggtggggatatatcacaaggaggcatgtgtttccttgtaggcagaagcttctgcattgtcttcaagcaagaggggcagtgctagcttttaacaaggagaaataggccagttctgcaggcacagagaattcaggtaaagctgaggattcaagatttcaagtgcatcaatctggaccctgaccttagtgtgacagacctgtcaagggtggagaattcaattttccttggagctctgctattctaataattaagacctgggtctcctaagctttttctgccatctagatgtatactgtctttatatgttgccaaggaggccctcttgctttcatgctcactttatattagttattaatcatcctcaatttttcattgcctttctttactaatggtccccagtgacacccattcaaattccatagtgcttataataaccgtttccccsacacctctcaagcatttgagattttgcccctgccaatgtattcctttctccagtatcttatcccaattcacctctgcagacggttttaacaattgtgtgattacagtattacaaaggctcattgctagtgagccagcgggtgatccagctccaaaatcccattttcgagtctccttcctggaactcttagtatcacaggtcagcatccccatgaaaaatacagtaagaccctgagattgtcatgcagaaggcaccagagcatctttaacaggagctttatcccccattttgtggccatagagaaaacattaccatatactgaggatagcagggcaaagggtggaatgagcctgagtcctgatgccatgactgaattagcmatyccatcctgggatagcctacttcttaaacttctgaagcaagcatgatgtcctttctgtttaagacactcttaggtattcagttacttgcagccaaaggcattctagctctaatctcagttaatgcttcactaccctgtgctgtgaggtaggggttattattattcccatttcataaacaagagagcttaagcttagagattacttgctcgagatcacacaactagaaattggtggagcccagtctaaaccttagtactatctgcatccaaagtccgtgctctttacccttttataaaaatctatgtgacaagtgatcaaaccaggaggggtatggcaccatcccccagatctgaagggaagagkagcttatgtatagctaagatccacatacaccagaagagctgcccttaaacagctcactgacctcttacttkgtgtattgggttgaatgggtctcaaaacagagaccatgccttcactgtcagaacctgcaaatgtgaccttacgtggaaaaaagatctttgcagatgtcattaaggatcttgaggatcttgtcttaaggttatccaggtgggccccaaatctagtgaccagtgtccttataagagtcatacagggaaaacctgccagacagaaaaaggaggaagcaatgcggccatggaggcagagactagagtgatgcagctgtgagtcaaggaacccctgaaggcatgagaggctggaagaggcagaaacagaatctcccctggagtctttggaagtagcacccggcccacaccttgattttggactctggcctccagaactatgagggaataaatctctattgttttacaccaccaagtttatggtaatttgttatggcagcctcaggaaactaatactacgtttatttctttcttatgtaaaggtgagcagtatactttctaagtttgattgaatatattcctcatgtggcaaatttctgttggaatcctttatactttaaagataatgtgtgaactacttccttagcagaggtagaggcacctgtagagacatgaatgagcatttttctgggaagaaggtccatagccatcatattctcaatagggtcttgataggctccacaaaactaagaatttctgagagggagcctgggcaaatggaagaatgacaggtagctaagctctaagagaaacaagtgctaagactgtgaaacatacagagaataagtttcaagtatgcggaagccggaaggtcctgtgtgtgtctggttagaaggcttcaagtcaatctctttgggaaagaagctttgccttcctcatgagttcagacaagaaagcagaactcgtaaaggtctagcaaaggcgactgcaaagggccaactccacacagctcagagtccggaggaaaggaaacgctccttctggacaaagtataaagaggttaggaaaatttcaaatttctctagttaaaatctgccggtattgaagaaggtaaattctgttacaatgacaaatcaataaaatgctgcctcaaaagacttattacgcttctatattggggtagaaaaaagaaagggaaaacattggtgtctaaaaataaggaatggtatgaacttaagtctgactctaaaaaggaaaaggaaaaggaaggagatatattttctgagtctatcactatgaaaattatgagatgaaatttaaagaatatgaaacaaacctcaggcagaatcttggctaccaaaaccacaagccccacatgacagcctgctccattgaatgccatggaaactgcctccccggcagcacgtgggcttggaactacttgcacgattcctccatgaaagtacttgagatagggttggggtaagcagagagagtgagtgaggagacagaagagtgttgtaagggcagctctgcttcccagagaactggaactgaatccctggaggcttcctagcaaaatcatgaagtgtttttaaaacaaattgcctcacaagtgtttacagttcagttctgcctgcctgtctgccgaactgaaaggaacaggtgaaacccaaagctggttttcagccccatcgttcacaattctaagaaggaaacatccttcacaaaacaggaactttgtccttgaaaatttcacatactacaggctttcctgccacatacctgggatataacatccaatagctcatttgcaatctattgcagtaaatgtgctaagagctaaggagaagcaaaatgcacatatgtataaatgggccacaatttctaaggattctgctctaacatgggtttcttctctgaagcaaatacagtgtttctaaaacttacaagaataagagaacatcaagtaagaaaggcctaattaagtcggggtttttgttttgttttgtcttgttttgtttttgaaaagtcatgttagactctttcctcttggaacagaattgacaaattagcacaggaataaaatgtaccagtcatttgaccatgtaagttacataatgtagaagcacattttgtgacgtgagtattcaatgtagcacaacactttcctcatcaaattatttcattgttcttatcccacgttattttccaagcaggcgcttgcttgtgaatggcctccaacatcttgtagggtttgctgctctgaacacctcccatctcttgcctgacccggaggccaatgacagcttttctatgtgggcctaataacaaacgaaaagaagacaggacatttattacattcaacacacacgtatatwgaaatttctgtgtcaggccaaatactaccatagcactttacaagcattaacccatttaatcctcaaaagacctataaggtaggttctcttttcacctccattttacagatgaagaaacttgtcttatatttactgagaggtggagccaggatttaaatgagtgtgcaattaaccactataccatgcaaccttaagtagcagtatcataaaggtgaatgaagccgtattaacaaataatactaagggctcatatgaaagcaattcttaaaaatggagatttgattttattttttaaatgaagattttttaaaatggaaaaggttacccagaatgttaacgtggacaagttttcatcatgggtttctaaagctgtaatttgtgaagctttattacatgtatacaatggtagtgttagtcaattgatataatcagccctcaaatctgtaaacatctttaaatcatcaactatatttgtttctctggctataaaaggaataattgttcatatttggaagattcagaaaagtacatggtgaaaaatgaaaatcactcataatctcatcatccagaaattgtcattgctgatattttcacatctatactctctagtcttctttctaaatgtacatccacccatctgtatattggcttaacatttattaaatgtgacgttttgtgcacataagggatgcattattcaaagaaaaacaatttctactctttttcagtaccctcatatgtactaaatattctctaaggattgaaaaagtttaaaatcaaacattaagatcacagaagtactatcagagtggaaataaataatcaatgatacatatgctagagcattcttaaaatcaaatattcagtcaaatgaagtaacaatggtgatatttttcaatataattttatttcattttctgcattacttagaagcatcagtaggatgaaaacaatatttgtttcttaaacctgtgcacaaattaattgatgtgacacactcattaattcatgattattttcttaatgaattgattctaaagcttctccaagataggaaggcataagataaccaaaaagaaatattgatttataactgttctaatactgctcagcatttttaaagtaaattatagccataaagcctgttataattactaataaggtaatccacagaatgccttgctgagctaggtgtagaagaaataaactgtttcatattggaggaaagtgaacactataaatcaatatactagtgtgaaattttgcatggctacatgctatcatctccagcatcacaaatgacttaaggaattcctcagctgagagtggactcctattggtggccacaatgtcacagtcttgaagacaacttcctcttgactgtaccagtaatttttccatatggattgtctaatggcagcaagacctgtagaaaaaccacatggtaatttaaaggacattaaaatagccctctcctcctttctatgactcaatattaaaaacaaaaacaacaacttactaaacaggaaaatgtgtatgtcctccactaaagttacttcaagcatggtaatgccttattattctggcaatagttgagagatgagtcaatttcctagaaaatttaaaagcttttgaaaaatgttaatcattgagatataaatgtttctaagatgcattccatatccctgctttgtaaatgcagtgtattgaacacaattgacctttccttggtgactcacctcatccatgagtcattgtccaatgctgtaagatcaccatggcctcagaagtgtctgaggtctgcagggctgttcactcaattctaaatggctccagatagcggtgcttttagagttcttccaccctcccaccctgtcatttgtcacttctctgctagtgttaatgtgtccaacttcctgtttctcatgtgttatgttcactttgtacacatctgctgggtgagagtccaagagtggctccagacatcctcaaagtacagacrcaaggacagcttgttcagccactcaggtgcctttaygtagagccctgacccaaaggaacttaggccttcctgactccaagtccccagctgggctccatgagggagctgcragtctgacttcctagagggaagaaccctgtgggcgcagccccccagcatgctgggattagtgcagacctgaggtgtcgggggccctcaggagccctcctctctctgcctggggtcctgagctaagcactgcttgagccatgacacctgatccttttttctatgtagggtccatttgttttgcctctggtggacttggccaggattactttcaggtcgctctcctgcccgttagaaggctttaaaaaggcttcagattctaattaatggcattctggtagccatgtcctttccttcctctaaagtaaatactgctgcctctccttgtggctggatgtacagcatgtgggaccaaggtaagggcagctctgcttcccagagaactggaactgaatccctggaggttttcagaatctagatcacctttgccaggcacctaagcatgacctttgtttccagatgcgactcccgagcctccacctgcagctgatggtggtcaaagcctgctagaggccactcacattacttgcaaaacagaaaggaggtacctggcccgaaggattgtgaggcttctgggccatcaggtgcagaatgtgggacctttaaccccttcattatcccttatccgccaaaggatatgagtctatgggagcagagccatgctaatagatggctccttccctatcttactccccaacacatactaaaagaagttactcgaaacaatgttttctagttaataggaatgtgtggggagctggagcaaattgagaaatcttattttgaatgtggtccaagagggaagaatggttctgatctcccaagaactgaccacaccaacccaccagtcagtacttcaggctgtctagtcagacacactgagtggtttaacattctgccatggcttaaaaaaaaaaaacaaaaaaacaaaaaaacaggagaartgtttctccaagacaaagggttgttttcaaaaaattaatttccacatcttacctctgtaattgcaattagaaacataaatactcttccatgttttcctgtgtgtattttatgccactgaattgactagttaatcaaaaggtaggaatgatggaagaaagtgaaaatagaatctttttttctcctcattgcctcatgatggaagaataatgaagctgtgtccttgcatggcactttcagagaagcagatctcaaagctgtttccttgggcacactctgttccttctctgtctttctctcttggacttccaaccttctataatcactcatccacttcgaaggcactccaacctcaggcattgaaaggcccagaattgaagagggctgtaatcactggcaactataaatattccccaaagcaacagttgcttaagagttttattcagtgacattatcatcccaggctcataaaggggcaaaagggggtgggacagagatgtgctttaaatatatttaaagttctcttacctcttacctcttccttgttgatcagacccattttggacatgtctatgttgaagtagtgaatgtttggcaggctgatttccatatcttctatctggaaaccacagtggtatgcatcacattaggagctgcgagcctccatctccgtcactccagctaccctcacctcccctaacctcgcacccattactcaggttctctctctgacttggagacaccctctgatgttcctccactgcccgacactgttctctcctgctagttctgtgattagatggtgggtctgctcttctcccctcagtgtacaaaatctgtttctctgaaaagaaagggctcctcgggtcagaaacctgggagacctcttcaacatccaactggcctccaggtactggtcagtcaaccttctaaattcctcctcattccactccttcctttccaggcctgtatctaacatttataggccctgcagtaagagtataattggagacccacataccaaaggtataaaaactttaaagttctattaatcaagccaaaatttttttaagtgaaatatgttctactcttctaacttgacaaatatacccttcataacaacctggaaggccaagcattaatttaaaattctctaactgtgattgcaattagaaacataaatactctttcatgttttcctgtgtgtattttatgccactgaattgactagttaatcaaaaggtaggaatgatggaagaaagtgaaaatagaatctttttttctcctcattgcctggcatggagtaccatgccagggcatggcagcatgggaagagccagcccctcgcccctggcccatcccaccttctctcttggactcacaggggtagacactccagcttgcatgtcaagtgccatccatacctcctgcaaacatctgcccctttgcctactctcaggcctaagggtgaacaccaatagcatgattcgccctctggaagacagatctcgagaagagatttgcccacgttcccgaagtagtctcagggctatttggacaggaaattctggggaatgcatgggcstctgcagagtatgttgctgtggccccactgattcttcacctagtggagggaggcacagccagaggaaggcctgaagggggcctgtagaatgctgagccatggccagagtccctcttgtccaggtctaagagtgatactcctcctctccagccccaccatggcccagactctctttacaagattctgaaatagatcccaacatgtctccttgcctatggtccatcaaccttttcattcatcacatttctgtcagcgtgttttttctagagtacaaatctgaaacaaaacatccagcttaaaccccttggtggctcccagaagccttcaggataaggtacagactctataaataagcctaaaaaggccctcttgactggctcctgtggttcctgcctcatttccaggcacatggaatgactataattcattcatatatattcagtcacacgtggtagaccctcaacagtaaacgactgtatcatgctatctcttgtctccatacctaccctgctccctcacccttgagagtaaactcagataacctctagactcaaacacccttccctctagaaaacctggcggaacccatctcctttacctgagttaggtgctttgctctgtactttcataatactcttttctctattgtattgttcatttacttattttgttcattcactgaatgatgagctctttgagggtagtgactatctaatttatctttgtatccttcgtatgctgccagagacataatcaccattcaatgaatgaatgaatgaatgaatgggtggggacgtgggtagatggacagatggatggatggatggatggatgaaatctctctacatctatctttcattgtctggttcttctgaaacacagaacctttgtctaattacccctctccctcaaggcattcaagtgtcctgactatgaggcttaaatcagtggcaggttgaagggactcaaagaattttcaacaaaactcaaggactacaacaggggcctgtgttttcaggttagacagatttttccatttttgctctcttttcacttgctataacaagcttttgaacaacaacagatgtcatttttcatgtgtcttccactttcttattttaactctcaactctttctcagagctgacagaagacacacgttctcccagtcctcagaatggcaactgacagaacttaccgcaggaactcggctcagggagagcacctggatatcacagagggtcttctgcacagaggtcaagtattcacctttgtcatagggcccagcagatttctccatgacaaggtccygaatggtgtccctaaaacacaaagaaggtcactgaggatactgaaaggaattttagtaatgtgttaggaagctaagaagcagtgacctgtctgtcccccagaaaacaatgttattgatgtttttagaagatattagtatcttgcaatgccaaaaacaaaacacctcacttccmattcccctacacacacacacacacacacacacacacacacacacacatacaccattcaacaaacatattgagcatcactagactgtcttcatagtttggcaccagggcccagtgggcattttagggtaaatttcccgtcatgtttgaagaacctaagaagaagactcccaagtattctcaccatcttgctgctctgcttggctggctcattgaattgttacatttgggggtttgctctgtgccagactctgtgttttttaggttagacagatttttctgtgctaagcattttatgtgatgatgtcattgaattctctcaatatagctgaagtaggtactattattatccccaattagagaagaagaacctgagcttaaaagttacatgatatgctctaagtccctctctttagaaggaggcccagcctacagtactatcctgcctctggcatgttcaatttcaagctcttttcaacataaatacatcaggctgctgcccatggagagcacttgaaataaaagggaaagaagactgaggtaacgttctcatcatgcatttaaaaacctatcacataataaaagaagcagagaaaaactacactagtgggagggacagctgtgggagtgggtggtgggggaagggtatgcatgcagattctagcttatggtagggtagaaatttctaaaagagctttagcaaaggaatgagatacctaatcaaaaagcaagttctgaaagttcagaggcctaattactccctgtcaggatataacaataatcatacctttatattgtgagttgtcagaatcaaaatggagtcacttgtgtcagatgctaatgaaataaataaataaagccaggaagctgagggagggccctcaggcacagatgcctgtaagaactattgcaaagactctctgaagggctcttatgtacatatgcctgtaacaacaattttgcaaaggacttttcaaacagtggctcgtgacgtgagtcacaaggacagctagccagatgtacaagaacatttgcctgccacagtcttcactaatgagctggcgtcaattcctgcgatagccactataaccagtgttctctttgtctgaaaacaaattacatacactttttccttttgcttttaaaagcttccccttgcttcaacctcttaggatatgcctatggttcctgcagcccacaaatttgcagattccctgtgttttcctaaataaattcattatctttgtagaatctctctctgttatttcagttaacaatatttttaaggcatttataacttataaaatgcttttgtgaacatcatatcattttgagtttagcctagattgaccaattatcccagtttgcctggaaccaagaggtttcctgagacatgggactttcagtgttaaaaccaggaagtccgtgacaaactacaacaagttggtcaccctcgtttagccctctctgcatcactatgaggtagtaaggccagatattctcttcatttgatgccgtgtttcttcaactgtggtccctggtccagtggcatcatctgcatcccctgggagtttgcaagaaatgcatgttcttgggccccacctcagtcctacagaatcagaatctctggggatgggcccagcaagcttcattttctggttctgtgtgattctgatgcacatgcatgtttgagaaccaccaatttaataaattgaataaacagaagggatttctgaatagtgggaagttgagttgaatggcctctaagtttctcttttacatctaagattctatgaagtctgggcccctgggacaagagtagacactacatgcacgtgttcataccaggtagccttgaagtccacatccctgcactggtggtagcgccacttgcagtacacttgggtggcaaagcatcagtccttcacctcagggagggtagtgaactggtccttgatgaaaccttcaaatccagactgtgttgttttcaagaccttgaggtctttgattccagaatgaatgacttggggtcctgtttcaagtagaaagtcaagagtggctgaggtcataaacagtgtcttgttgctgatacctagcacagaggatcctggtcattaaaacatgacacattctgtacaaaaactacatcaccgcccgtgttttctgtcatcctatttcctctgaagtccaagtgaagaggatggtgtgcctttgcttccatctggattccawgactccctgccctgtcttgccctcgaaaatctgaaggtctaagaataacctccattccgtattgaaggccacagaaatgaatacattcctctcaactacaagcgggagtgtcttcttggccaactcaccttatgtattttgagctccatctcctccaacaggtgatcatgctgaaatgtgttaatacggcccttaagagccattcctctacctgctactgtgacccctttactgggggtagtcctcatgctgatcatctacagtagctgatgatcccaatctccagtaagccctgatggcatcccagcatcccagttcccttacggttatcagctcagcaaaaccaggcaacttcataaatgggtagcagcgtgggcctggctgagcctaaataagacagggaagatggagttggtgactcacaagggatagatctgcctaagttgatatctataaaggcttttgttttttctgctgaaggagaagggacgaacttggttcatgggtacctggggggagagaagggagagttgaaaacaatggagggaatgatatggctctccttctgtctctgctgtgctttcataaggtaatggggcaggtggaagggtgacaggcatcatctaaaaaagaacaatattaacatcactatgactttatttgtctgcacaggctggcaaggattggggacattccgggagcacttggcaaaccctaatagcaaagtgccatggcacgattattaagatcacctcttttcagtctctttgttagttccaaccaatatctatgcttcttggactgttcagtctaaaaatcaagggccagagatgtcaggtatcaccacacacatggtcttagttgaagaacaagaatataactcatgatcctcaattaaaatccaaggaagctcttaaaaatccaatggtttacatcacctatgtggtttctattgctacagttaactcaggagctgtggagtttcaaaagtaggtaaataaagtctgtatttctgtttttccatgcttcagtatactcctatcagagagaacaatagccagtggttagtggtagatctgctgattraatatgtcctgattaaagaagatattctgtgcagagtgtcccaggataatgcrgtgaaactggaaatgatccttgtttaactttccgaagtacttactggaagctacatctgaagaaggagcaagagaaagataccaacaatgccttaaagccttcagctggctgggtttatcagattctaaatgtatgaagtcatgatctcacaaaatcagcattgctacatgcagtgagtggaagcctcaaacccagcagaactacagaaacaatcaataagtatctgttgaatgaatgaatgaatgagtttagcaagattgattcatgtcaaggaataagcattgcacaatttagtatctttcttttctagacagttcagccccatcagtctttaccatttccctttctggtcccctccaactcacacatagtgtggcagggggtgaaaggaagggtgttaaccttggctaagaacctcctctctgtagacatgactttggttgctgcagttttcagtctttatcttacttagttctcaamactctataaagcagttattttaatgtaggtgacttttaatcatttgcccatagtcacatggctagaaactgtcacaggtggaatttaaactcagcaccacattatgagatcccatgcttttcttcctgctttttggatcacttcccatctatgcaatggttcctccttcctttgaccctttccccatttgtgttctatacgtggcctttccaggagacaaggttgccaccttctattcacagcgtgctttaaggacctcagatagagccccctgcctgaaaaataccatctccattggtcagaaacagagattgaataatcatttttagagttggctcctatgtatctaaaaacctttgtattcmttaaacatttcctattgaaatgcaaataaatatcccttaaagaagtgactccttaagcctttgtaaggtactatgataatctacttcccatggtaagcctttctagaaaacaaaatcctatagaaatgaaacatgggtttgcaatcaggagtggggttaaaatgagtagcagaaacccttgcaggagaatgaaaagaaggtgaaaaagaaccaaagacaaactttatctacattgttttcttcctattcatctggccttgactgctggcatccatgtaagccagtcaaactttggctcctccaaaggtgttaaccataaaaggattcctggatgcaatgttgcatagtggttgaatctacagctttgagactcagattcctagaactcaaatcccagtgctctccctgcatcctcaacccccatttttatgagctctatgctcctgagggaattatttaacccctctctaccttgattttgtcatctgtaaaatggagacgataatcatacatatttcctagagttgccacatgtctaagaggatgcacataaaraacttagtagaattgctgacctacgaaagtgctctacaaatgtgatgatgatgattttgccataattgactttttcccaatgacttcaacaacttataaatatttcccatgtttcacaaagtcttactgggttctgaaaactacttctaatgtgccgtcctatccatctccagccctgggataagatttattgaccttaagcgaatgtcagtcctactaggccactttgaaatgatctgctttctcactggaatctaaaaacggagacagcagttgtatttttaaaatgtgtcttggcatcagtttcacacagaataaaatgtctcatgttccccaagacaattaactattgccacagttttggcagaacacacaccatctactctggtgctctcatcattctattaaaaacaacaacaacaacaacaaaaactattctctgaatgttaaaagaatttttccctggcacacattagacatgctggatgaaatcagagagcttattttatcttctctgttggcggtgccccagctttctgaacattggtaagaacctgaggctttcaaaatcatgggcccatcaactaaaaatatgatgcctaacacactctaaaaaagattcccatttagaccaacaagaagtaattcaaaaactgtccttttctaggttacaccccatgaaatcacttaatcagctttgttttgttttgtttttctgccttggttatggagtaatgcaaaagaaagatttttcacatttcactttgctagaacataatcttttccagcttttagtgtcctcctacacacttagcagattgtggcttatctctcaragaatcatacatcctaccctttagctatctaagggaaagaaactcactgcgaattaatagaaaataagcccaattccttacctacgcatcaggtgtcacaaagcacaaagctttattgagccaagaaaaagatcttgtcataagaggataattgcttccacatttaacacctccaaaaaggacacaaatagctgaaaggcagatattttaaaaccatattaaatcattctagtagaaaatctcaaacttgtaaagtgccagaaaaagtaaagatcaattaaatatttgccttggagagtccatttagctcatgcaggaagagcgaaagctccctctgcgcaactgtggatggaaagagatgacatcatccagatggtaggaaattaactgggcttttgtacaaccaggtgatgaccaagaacattttaaaagaccacgaatctgccaagaacttttcttacagaggaaccgaagagcactttagtcttgatatcaaaacgacataaacagacttcttggcagtagccatctctgtcctggatctcccacttctcccatttcacttcttccatctgcccatcttgtcacctcttaaatctgttctcctccaggtcggatttcatcagttgccttccttacaaccatccccctaccctcactacccttcatgtcaatagaaatataggaagtatttttcactatcagaagacacaatctagtatttgaggcctcttctccatcttccattcctctatttagctatgctttagctgaatttcataattagtgtcaaatgggagaaatttgatgctgaagaaattgtgagttataattcaaatagtgcagaggtttgggggtcagtttagttcaaattagwgactcaatcataccaatgacttacagctccgttaagcttgtagtttctcactgatacttgatagaaagagttctgaagattcaatgccatatgatacctaaaccaacagcctgcttcatacacatagggcctagttctcctctcagggcttgagaagtcacaaacataaaaccagccctcattcctttgggcaaacaaatttctttctctcttccagattctcctgtggaatcagtaggctttgaaacaactaaaatacagcctagtgatgtagctgtaaaagatccactaggaagaaacagtgtaatgggagttttagagcaattcccaggggttaaagtggtgcttgaggttcagcagcatttctagaaatgtttgttcatttgctaagtaagaatgmatatagtccatcgggagaaactcagtcacacctcctcctgggaagagtccttttgggagtggcgtgactgaacgtgtgaataagcacatgtgtttgagggggcaaaagtcttaccattctagccggtcccccaccaaaggcactactcaggtgtttgtaacaatagccttccccatgtgaatttgtgagtggtgtgtgtataatataattactattttctttagttaagcctttacaagggcatttcttatgacaatgattgtaacattctctcacattacgattcctacagtttcagctcttggataataagcaaataaagaattaaactttgctaccaaaagagcatacatccctactctccaaagagggacagagtagaaatgtcatcttcatatacacaacactgaaagatacacacacccataaacatgtgcacacacatacctgtatacacttaaggcaacagatatctcttctgctaccccaatccctgccagccctgcatgaaatcagagggggagttgggggctggactctagatragtcaagctggagcttctgggaacactgccacaatgatctcaataccctgaagctttgcagctttctgcagaaagaaaaagttttaacctgattatggtggctagtttttccactcagctgcagccaggtgattagaattcaagctgatagcaacycttggtcattcctggaaagaacaggatataaagagaagtccgttttcttttcatgatcagcacagccctatacttggccacttgacttccacctccctggctctgctaaaagtattctgggaagtcaccaatgaygcctatttactgactacatagtttctcatcagtcctctcggaaccccaacttcttaactctcctatggcagaggctaaatctacttgctcttcctcctggcactcagctagatgacatttcacagtgtcccttgcagtgaggtgtgactatgtgactgagctctctccagaagaaatgatccatgctgtttccaggccgggagcttacgcttcaaggactttgcccctctaagctctttctttggttgtctggtatgagggtctactttcaaggtgacaccaaaaagtaaggattacaaatataaagttgccatcaacctgggttcctgaagaacttcatggagcacagcatccccctgacccccctagccccccacacagacactgaactggacttctgcaaaaagaagtaaacttctagtgctgagccactgcacatgggcctattttttatgcatctttgttccccagtaattcagaaatccctaatttcttgaaatgtctttttcttctgcttccatgacactatcatccctygtcttccttctatctctctaaacattcttctgtctcagtttttaaactgcccaacccttacagtggggaatttttcccaggccatctcctctttcaaactcttctcactttgtrtgtttttctggaatggtccttcttccctgtggctttacctaacaccaatctgctgtagcttcacctaccaccaatctgctgatgggccccaaatctatctccatcacatagtcccacattcaccagcttcccacctgaaaacttccccttgtgtgtaatctccttagtcagttgcccagtcctcccagattagggtcaattttaactcctctttctctccaatcttccatctctaatcaaccactaagacctattgattacacttcaaaaatgtctcacataatgcttcccacaacctctcagtctctccagctctatttctactgctttagtttagaccccatcacttcatctttgcaagtctccaaatgtctcactactgcctgtttctttaatctgtcaccataccttgttcagagtttctgaacaaaaacatgcacatagtaatctgaccattagaggctttctctgrttctctgttgtcattctaaacaataactatagctattagttaaggagagcttagtgtgccaagtactatgctaagtactatgctaaatgccttaataaaataaattagcatttatctcctttgtttctctggatagttgttgaagtgggcactggtatccttgttttacaaattaaaacccaccagtgtagtataagtaaccttgctcttaatcacaaagttattaagtagtggagctcaaattcaaatgattcattctgacctcaaggcctcttgcttaaccactgtgcaaaactgccttcatcttatactaaacttgtgtataacacatgaggcccttcagattccagcccaaaccaccaacttatttatcttcatctcccttcttacattctagaaatcagacccactgaatttgttactgtcccccaaatgctttgccctttccacagttaaataaattacttccccggcatagtcttcagcatgaagcaagtgctcaaaatattttacttcccctctttcactcctcatggactgtactcatatgtatcctgtttcttctgcgtgtaattccctttcctcctttaatgcgcagcatattctgaatcatttttcaaaagtcaaatggaatattttttcctyctttgtcaagccttccagacagactgctctggaaagagtttcttcacttctcagttcccatagcatgccttttatcccttcatcatagtctctagcctctcatactgcagtcaatctgtctcactagggtcagggagcatcttattcccctctttacctacagccctttgcatacataatagggcctcgaaatctagttgttgaatgaatagtatatgaatgaatgacataagcacttttcataaatgctctcattgttaattagctctcttgaggcctaatcctagctgctgttgttattttacattattgaaaaatgtaaaaaatgtaaaaaagcatcccaaacgtcactgaaaagcagttttaagttatgctgatctatacagtagccactaagccacatgtggctattaagcacttgaattatggctagcataacttgagataagctacacatataaaatacagaattttaaagacaattttgtaaaaagaatgtaaaatacttcattagtaatttttatacttattacatactgaaatatttttgatgttatttaaataaaatatattattaaaattaatttccctaatttctttttgcttttctaatgtggttatgaaaaaaattttaaattatatatatggcttgcatyatatttcagttgggcagagctgatttcgagtttctagttttatgagggtagttaatgaggcttgggtaggataacattgagtcaggaaacttttctttctcctccaaagccacatatctaagacaagaaggaaggaagaaagaaaagaaggaagaagggagggagggaggaagagaaaggagagggaaagaaggaaggaaccagagagacagaaaggaaggaaggaagggctaaggaaaggagggaaggaaagaaagaagttagttccaatttaacttaacaaatagctcagaaagctaatatagcatatgactacacatctgggtgataaagatcatctttttaaccaaatacaacagctatttagtctcttttatataacattaactttataactgtttatcaaacgttgagaaggccctagttatgtatagactttaattcacatagtggaaaatatttaaaaatagctaatacactagaactttctaaggagggcattatccaaaagaactcagaatgagaagggatcttatattttattaaccttataataaatctgatattcrttagatgccacttcaaattcctactaaggaggaagggaagggaagggaagggaagggaaggcaacagcaaagaagaaaagggaagagtaaaggaggggagggaaagaaaatagaaaaattttagagtccaccctttcattttataacaatcagtaaagtttatttttttactgggataaagacattattaccagctttgtctccatggttcttagaggtcctctagcctaactcttagccaattattgaactctgctctgacaagctcaacaaatctgtggaatacaagctgtggaaattttaatatttgctaagttcagttatcagtactaataacacctatgatataatwatgtttcataattaatttggaaatttcttaggaaatagaattatataattgccattgctatcttaaatgagatgcattttataggaattacaatattagtggttttattacacaaaataaaatttcaggaaaacttgactattatttagtaaatatttcctatgaaggttactataattgtaacatgatgtggcacaaaaaatattggtcagaaaatccagagatttgcgttcttttcaggctgggcctttttttattttgccttacctcaaaatctggtaataaaaatgatttgcctgactcaatccccagggttgttgcaaaatgaattatttcatttttatatttttaagacaaaaagtagataattctttaatataattcaaagtcacaatattcatttctatctcagatttaaaagccttaaaaagtctctacagttttcctccatgttagtaaacagcattgtttagaagaaatgaagaaaaaagaaaacaaagccaccctgaagttgctactatataatcaaagcatgaaaaatagtttcttaccacttctcagctgttcaacttcacagaagtgtgttccagtgggagtgtgaataaatgcatggacatgcttaactccattctgaaaattagggaaacaaattatttccaggaaaatttcagttcatgccataaagccaatttctttaattaaactgagagcacaaataagtgagttaacctttccaagatgcttccaagggatttcttccatgtagacttgagctcggattacatggttaaaagaagaaagaaaatgctcacaaatattcacaccaaaggcttctatgcttttgatttgtaaaaagaaacaaaatgcttcaaagcagaaataattgtcccatttaaaaataatttataaatactgttaaatgaaacgatgggaggtcattgctttggactaagctcctgcattagaccccaacagaccagaccaaaatggagtcacttatgctaaattccacataatcaaattgaagctttaaggaagcagatagataccaaaacagaccagtttttcctgaaaacaggagaytccagtctatctgagtcagtgcgataaggaagtcccctctgctttaactcttactaaaaaagtaatctgaaacccgatgttaaccaatcagtttttttttccattgttctgtttcttgttcccaccttacaaaacccaatgcccagtggaagctcttactcttttttgtagaacagaagctgccccaatggtaaataaaaaccaattcactctataactaaacttgttgtaattttgtcttttgatattactcatgatgttctctttcctgatgaattgctttttagaactagacaagcagagaatagagtctacctcaagagaaaaaggtgtttatctcacttttttaytagagctcccaaatgaagttaataatcaccatcaccaggtgagactctcgtttttaaaagaaacccattttgcaggagaggatgtgtcagtggatgagcaaaaaataacttaacattcagattcttctcacagtgcgttcagtcatcacttgtatcaaccacagcacaccacaacactctaaactctatgaggcttcccattttcccaaggaaaaatgttaatgaagggccacctcactccttaccttgcatacagtccttctattgatcccagctctccacccccataatgcagcttccatattaatccctaggtaatattttatggtcttagcacagtctggaaattattaatggctttgcctataattaaagtgaagtatttgtacaggcttccccagtatagttctgttttatacctgttggcccagaataattacgaatagcatcctattttgagctcaaaagtgtcctggtttggataagaagctatacaatcactctatccataatgaatgactttaagtagtttttaacattcaggtccattcttcacttttctgcaaactcctacacagtacaggaaatacaagaatctgttgtacctggcccttgtccatatcacagcacaggtctactttcaaacgatttttttaaagaatgcagtacctttttccatagccccatctatgtttgctgggtcattctgattagcaagagaaaggttcagggtaaaawtaggagttgcagaaattatattgcaatgtttgttcatttaatgaattatgggtatggatttcatgagaaaacatgagaaaagaagctttccagtctacatttcttgtctttttagacttcatggcaagtaaaaaaaaaaaaaaatcagcttgaattgcccagaaatctgggtgacccagcatagcttcactcacacttaaagaaaccataagtggggtcgggcacggtggctcatgcctgtaatcccagcactttgggacgccgaggcaggtggatcacaaggtcaggagattgagaccatcttggccaacatggtgaaaccccatctctactaaaaatgcaaaaaaaaaaaaaaattagctgggcatggtggcaggcgcctgtagtcccagttacttgggaggctgagacaggagaatcacttgaacccaggaggcggaggttgcagtgagccgagatcacgccactgcactccagcctagtgacagagcgagactctgtctcaaaaaaaaaaagaaaaaagaaaccagagctggaaatgctaaaatatcagttctatcagatctaagtctctcttgaaaagtcctaataaccactgtatatgaacagtaagtggtaatagagttgggaaagttagaatggcattaaaatttggaaaatagatttcaacaataaaaataaatgtatctcatactcaagatattcttctgtattaataacaagaagtgaaatgatattttcttctataaatgcacaccattctaaaaaaataaaaactaaatggtaagactcaaagaaatgcatgacaaaaatgtgtaaaattctattctgaaattctttcaggaccttgattttcctttgattctaattagagataacatgtattttgtccaataagattctctgcctaaaagattgcagtgagataagagccaaggaaacaaagatgtgaggtttgtgtgtttgtttgcttttctgcaaagttttcttcaatcctgagacctttaggctagaaaagaacatttttttaaaaaatggcttaaatgtaaaaatagattaaaatgcaaagggaactggaaataagcaagtaacacttcatgctgttttatggcaaattctgcatcaagataggcggcatctaagaagaatgacacatacttctttaaactttgccaagacatgaactgtgttcttgatggtgtctgtagggatgatgtctgaattatctccatgcaggtaatcttttttggaacttagagtaagttgcactgaagttgccacctctttaatgctgtgatattttccatctcactgaatatggagaacttttaccatttccttcccatagccagttcggacaaactccacctcatcattctgcaatgaaaacacaggcatcttattgaagaaggctcaatgaaagccaaaagttaggtgaaatttacttaaaccttcattatatcatacaattgtaaaagatgagattcagagtatatatggaagcaatatcacattctacttttgaagaagaatgagaacttgtataggaaaaagagaatcccatgcagcaaatgaaaatatatcagattgttctgaagactgacaggtacagggcttttttgataataataataaatacattaataggacctcctgggtcaaaactgtactgttttatttaatccccactaacctaatccttgtaatagcactgtaaaatctttataatcccagtgtaaaatgggaattaatattcccatttatggagggaggaggtgagtttcaaagatattaagtgatttgccctagttcatacggctagtaaaggacagagccaggatttgcactcaagtctattgactctaaattgtagaatggccagtaggtgaactgcttttcttctataaaatatcttcactatgttacctggaaataattgcatgccctttttatagagagtgacattctggagaaaatgccctgtgatcaatagaaacaatttgaaaattgccttttctacttgctgccgggaagaacagtaattagtgacagggtccagattaccttcaggagtgcagagccaaggctgtctggctgcaggaagagctatgcttttagtgaagagacacttaataaaagcctagtgattgattcattactacccttgtctgaagctggagccttggctagtgaacacattcatctccactggtagaatccataagatttgtccctgggctttactggtgtttgaggaaagaggcaggagggagcagaagaacagaaaaaccttattttatttagcacagaaattgaacattaaaatgataatgaaagaaggtgacaaaaataaaagtaaatgaaaaacagcatgcagtgagagtctgggtaggagacaaagaaggaacctcatctgcaaatcacacttaggatgttcaggtgtactaagggctgcctaaatatctatttgaataaaaaatcaccagaccctctgaggggaatttaagaatactagccaaagtcagaaagtactgctgttcttaaagtagggggtgggaggctgcctccaatcttggagatagagctgggcagggcaggctattgttggtcattgaacatgccctcgggggttgagatatctgaattcagttctttcttgtgagaggttaaggaaaactcttggagaggcctctgaaaagcctctggcccaacatttggggactcatgctgaagaaaagggtcaataagaaaaccaaaggagcagactcaagggatctcagtaagaactacaagactgtcggggaaagagaaactgttgtgtggtagtggctttgggattaaacgaagttcaaattcaaccctgccacttaaagctttgtggcttgcaacaagtaatttaatgtttctgagcctcagtttccccatttgtgcaaatggaaagaagcacctctaccttgtagggctgctggtgaatgtcaaaggcctggcttagttcccagcagctagtggtacactgaggttaatcccagcaatagaggccaggcctggctgtggaagcagcagcagcagaggtagcagaggggactgtgattaagggcgccagttttcagagtgaacagcactgggagcagtaacaggtggaagactctggtgtatattgagccacaagggactctacctgaaggaggaaggcatttggctgggttggggcccttgagtggtatgggctggagtctggaatgaaaggtctctgagatcatccatcatccccaacatgtaccaggactcgacaaatgttactccttagcttcatccctgcccctatatattcaagaaacagtagtttagcctatgaagacaagtggtacctacatggtacatagaaagattaaatgatagccacccttcttatccccattcctgttcagctcaccagcataatatctggccacacgtcattgcaaactctgctttagctatgctgatctaatcayggctgcccaggtgttacatgctttttctgtgtgttggcctttggatttgctattccgtctttcttgaacactttctcctccttactacccaactaccaacctctttgcctgcctagcttcttctagatacccttcaggtctcagatgccacttctcccagggtccaccccagcccttcaagtctggaatagctkccccttttaggtgctctcaaaatatttgttattgccytatcagaatatttatcaaattgtattgcacctgcctctttatgtgtctgattcattcaaaaacagtaaactatgaaagcaggaacaagtttgatcttggtcaccatggcaacctcagcactcagcacaatgcctggaacataagtaggtgcttaataaatgtgtcatgaatgaatggatggtgccaccaccacctccactgcttgtgtgatgacacagcatagttaatgaaaacacacaaaggatttcaatacaggaagagccacttcagctcagaccccaattaggaagtccttttccggggaaagtggggcaaggaatttatgcccaatgatcaccacagcctggagatcacaggyacagctgaccaaagaacaaaaagccgaggaagggcagaattgagtatagagtcggyaaggcagcacaaagtgttcaymtggctaataagacagccttccagtgcagcacagccatcccagactggagatcatgcaagacatgtgcgggacaggtcrgcgctcctttgcaggaccctgactggactaagcagagttggcccttgagcaaagtttgagtaatcaagtttactggcaatgagtctgtatgaagggaaccaatcatctgatcctggagcaggtggaacaagcctggcrtgggacacccraaagcrtccctgcacccaaagagcagataatggcctggaccataaccgaggctgttctcccccagttctctaatcagataaatcagaagtaggtgtcagagccccmttgtgtagaatgtagggaatggtgcagagatctcatacggtaaaatacaaagggtgctctcttctggagagtgggcaggtggcygaaaggacaggctttgggctctgcagtcaggcagcccaggcggaatccttgttctgccacatattagctctgaacagaggcaaatttctccatctataaaatgggaataatagtagtgtccatytctgaggattgatgtgaggatgagaaaaaatataaagaacttagaaaagtgttttaccaataatcagcactcgattaatcagcacttattagccataattatcattgataaataataatcactcgtcaaattttgcawtaaaggataaagttactgacagagataaatacctagaatgcacaccaatcgagagctggagtggtcaaatcaaagggctgctgctatgataaggcctacttctgcctgcctaccctcaggtacattggccttctttaaaygttcatgattactgacactcacccctttggttgtccttcctcaggcttgtatggtttgagaagttataaaagtgaatcgatttcttagaataatactctggaaaaaatattagcaggaataatttcattctttctctttgtttctttgttgtttctttccctttctttctttcttttttcttttytttctttctttctttcttttttttcagggtcttgctctgtcacccaagccagagtgcagtagcataatcacagctcactgcagcctcaacctccaggacttgagtgatcctctcacatcagcctcccaagaagctggaactacaggtgtacaccaccrtatctggctaacttttgtagtttttttttagagatgggatttcactatgttgcttaggctggtctcaaactcctgggctcaagcgatcctcccaccttggcctcccaaagtgctggaattataggcgtgagccaccatgcccagccaggaataaatctttacctggctctacayaagaaaaatcccctttctacacatgtcttaaaatgtaaagggattacttgtctgcaagtaatgttggggagagctctcagggattttaaatgactcatgtattttcacttctgcaataagatagtaagtgttctcttattttcaggccataatgaaagtgatatagatgtcactacaggtctaggggttcttaccttagagtcttttagcctccagaagtctcagtggatggatttgggttggaactgtgtactccatgaagttgtaactaaaagtttatttgtttaggggaggggagaggtgaatctttctggggagagcattcgtagaatttcattagattccaaaaggcctcatgacttataaaagtttaagaaccattgctctgtgtaattggtgtccaaattgttaggatcactttgatcaaactgactttgccayggtctgacaactagccacgaggcggcaggagggagaagacttggtcatttcagtgtacaactgcaatggaacagtattgtaaaagtgaaggctctaatgtctgattgcctgagtttaatttctgcctccaccacctgctagctgtatggccctaggcaagttacttaattttttttgttccctcccctttggatctgtaaaatatggtaatgacagcagctgtttcccacaattgtcatgaggttgaaagtgacttgcacatggtgtcagtaaatgttagctcttattattatctgacctgccaatttgaccaaaaaaaaaaaaaaaaargatacttcaaatcagttccatcagtaagtggtagggagacatccttgtttatctctttctttttttcatttttagaaacaggatctcactatgttgcccaggctggagcatagtggttattcacaggcgtgatcccactactgatcagtacaggagtttcatctctttttgataaagaagactgaggatcccacacaggtgcacactgttttgtgctayagatgtacaactaataaaacaaatccttgtcaatactaattgtattttaaatgaatcctagctgcttatacacattgagggcaaatcgctatataaagctaatattcttctccacccatgggccatactttttagctctgtgcgtatttatgcatgcttccttttaataatagcactcacatatttgtacttacatgcaccaggtaccaaatgaatttctccattttctagttaaacactgaggcagaaagaagtacatttctctggccaaactaccaagatttgacttcaagtctctgtgattttaaccaccaatcaacactcttaccctcagcctagaatgccctctctccacagagcatggttcattccacattggaccttctccataaaactttcccaatgcccccaagaggaaatgacacctcttgcctttgaacttccagtgcactttaggtgaagagttactagctgctgaggtcactctttattattctcatgtgtgtacatgtcttagtattcccaatatcaatgtcttgaaggccagattgagtcatctttatatttgcccatagcacttgacagtgctttgaaaattgtcataaattatttgtccaagaaacaagcttcctcattttgcagattagttcagaaaatttaggtcatttttattttggcaggaaaaacatagttttcagctctaagtcactcatcaatggagcctcaggttcatattttcaagttacaggatgaggtggaggggtataaggagattcagcctatatcagtacatattttcctacaagaactcttatagggaaaagaaataaggttgatttttgtggcttgtgagctcaaaatcattctcagaaaataaaaatccttgtgaaactacccatgggcctctatattattaaatattagcagaggtagtaatattataacacagtttccaactacctaaacctttggcacatattcatttattttttacacagaactgcctcattttagaggcttcttttagctatagtcttatgtttttgattctagcatgtcattcttcaacatcaaatttctctactctgctggcaaaggcaggtattaaaggttattgttgtgtttaattttagcttttcccaatacttacatatgaattttcatttggtgtatgtgtatgttcaccaaatgtgtgtttatgtatgtagttttaattagagaaaaatgactggaaaatattaggaaagataaggggaaacttataaatataaattttaaaatgactagaattttctctcaagtcttagaagagcttctaaagcatcatctctcttctatataatagagagaaatacaaaaatactagctatgtaggacccatcacatatagataaatatcaattcagttgcagtgtgccatgatagaaggaaaaattattcatggtgacagcctcttttgtctttggaatgtggtagagaagttcttccaattattttcccaggtttctcctttgcctgctattttttgggcattcacgaacaaaaagacttcagagaaaaatgctgagctaacatgagaaaaatgagcactcatgtggacaatcttaatatcactttggtagattttaacaatacacaataatgataagaacaataatggtggctaatcttagtgacagctggtatctttttgattgcctaggatctactaaatgttgatgggaaaatactgatatccagtagggaaaggcatgttgctttaacctgcagagtggcctattattgctatcatgggggaagatatatgttatgttcaaagagtgactctaaagggatttgtcaagcagatgtttcaaaaacagtataacaactcatctgcataactatggcagaaacggtaacctgttacctaacaaagactccatttacaggagtcttcttttcattctttcacctactaccaagaaagagaaactcatcgctaattgccaggagaaatactaattttcttgccagcctttccacagcatcaacaggcttagggcactgaacctggaacaaggcccacaggagcttctaggattaggggcagaagatcccacaataaagaattgatggagaccaccaaaaacgcagctgaaagaacattttgctgaaattcatacattgaaagatgtctgtttcctaatgtatgtcttgaaaataaaatagcaacaaccatttattaagagtttgatatgtcaagaaattagcatatattatttcctctacttcttgacaagccctgtaaaatatgtattattatccaactttgaccaaaaaagacagtagggttaggtaatatcccaaggtcacatagttactaggtgacagagacaggatgagagctcagcccatgtgcccctagacgacatgttctttcccactacatcataggccctacacccactttgatggctggctcctgcgttcattagggaaagaaaggaagcatttattctgattccagcaaagcagggaattggccatgctgctgtagaaagttgcatttctataccacttaaccatttttaaaatttccaccctctgggatcgatattaccttatctacctcacaagcaccctgtgatttggtagagagactctatttgaaaataaactagcccagagaggtcaggcacagtggttcactcctgtaatcccagcactttgggaggccaaggcgggtagatcacttgaggccaggagaccagcctggccaacgtggcaaaaccccgtctctactaaaaacacaaaaattggctgggcatggtggcacacacctgtagtcccaactactcaggaggctgaggcaggagaatcgcttgaacccaggagctggaggttgcagtgggccgagattgcgccactgcactccagcctggcaacaaaacgagactgtctcaaataaaaaaaaaaaaaaaaattagccagatgtggtggcgcatgcctgtaatcccagctacttgggaggctgaggcaggagaatcacttgaacccaggaggtggatgttgcagtgagccgagatagcaccattgctctccagcctggccaacagagagagactctatctccaaaaaaaaaaaaaaaggaagaaagaaactagcccagagatgttaagtgagctacccaaagtcacacagatgacaggcagactgatacagtggaaaaagtcctgctgagatggaaaagacactgtgctaggcagaacttaccccacaccaagagctgcccctgcacaaaccatccctttttctagcacttcagtcatttttttttttttagttacagaggatcctgaactcagatgaattctgtgtttatggtgggaaggtttaagctgtgaaacaggaggaaaatcttagggtggttgcccctttggcttcatgccttcaacaacatggcactcatttgagtggaacacagacttttatctgataaagagcattgaaaacacaaataacatgggcttgaggtcatttaaaacctcaccaaaggactgattccagtctatctgcaaggaaaagaaagttactttgtcatggaaggaaaggaaacaagtgagaaggaaccagcatttatgagagtcagttatgtgacagggactgtgcacatagcctctcactgaatcctgagagcactctatgaaggtagaaatcataagccccacccttagaaaaggaagctgaagctcaacatggttgattatttgatggaaaccacgtggcgagtgagaggcagccatggaccccaggtctggctgattcttcttactatgcttagctgcctctctgacttataaacattgtattaaaattctttctaatgggatttttacctactatatacccacttttatatatcttctgattaaattcattctaagttccatataaccccaaaatagatgtctctgaaaactttttcttgtttttttccccaactcaattacagcaggatctgaaaactttttcattcaatcaatatattcacttgtatttatttagctccttctaggtgacaagcactgtggtatgtgctggagatgcaacagtaaacaagccaagcactgttttgccttcatagactagaataaacttcttctgtaaagaatcagaagttaatttgtatgctttttaggttgtggggtctctgttgcaactaaactctgccattgtagcataaaagcatctataagtaatacataaatgaatgggtgtggatgtattccaataaaactttacaaaaataggcacaggagttttctgacccctgctctctagaggaagactcagaaaggtaagcaagtaattaacaacacattgtgataattactctaattgagaaaatagtgagatctgggaatatattggagggacacctaagtcagattgggagagatcaaggatggcttccaggaagaattggcatcctcaaagcaacctgaaggatgagtaggaattaaccaaacgtaattttctggtcctcttccacttactgtatttatgttttcctttaactgcatttctcggtaacaattcttttaatcttcaaattctttaatctataaatacttgaatcatttgcttgtctcattccttttcatcaaaataattcaagtcctctccccatcctcccacaacaagtacatcagctttttccttcagtatgtcaacttctagattttactcaatccatcaacagtcttctaaaaatctgaacaaaaataagctgaactttaacagataaattttatggtgtgtaaataatacttcaaaaagctattggaaataaataaataaagccagcatcctgactcccaggagtcctcaaaggacaactgaactttgatgaagccagtagagaccaggttcttgagaaacccaactttatctcaaccctcaaaaatcctcacagaatgtgaactcatagccaaaaatcaaaagtacatacaatagcaaggtattataacaaagagcttcagaaataacaaatagcaaagtctgacctgcaaagacttcaggtatttgaataagatacaaaaatataaaataatatatttaatatttttacagaaataaaagaaaagattgggtgtacgagcaagaaacaagaccataagaaagaccaagcgaatttgaaaaaaaaaaatagaacttgtaaaaatgcattaataagtggattaagaaacacattaaacataactcaaaaaaagaattaaaatatatgtaagtatagtttgtcaatgtacaaataaaaagtaagatttttcaagaaaatattttttaaaagaattagttatttggaagagatagattaggtaacagattaatgctgccaaagagcgaattagagaactggaagacagatctaaataaataatcataaggattaatgcagacatacaaggagctagaatatatgaacaacacataaaatgtactagaaagatataataaagagaatgtggaaaaggcactatttgaagagctcaagactgagattttccagaataattgggtgactacaaaacttcaatcatgaaattaaaagcccattacctagaaagaattcttacttgtacactatatagtacttggccaagttacaatgaaggcgttttctactgtttttagaggcaatcaggttatgaaggaactatggcacttacataacattatatttcttgggcttcaaaagcagataatattatgaaaaacattctgcacagtttgcattttcctcactcaccaaatccataggtttttttccaaattacttcactgtttttagtaaaaactgaaacagactggactctaggttttaggtaatgttgaaatccctggagatcttcagtgtctggtacaatattagacacagtagtgatggcataagaaaggttgttgactgacaaccagcatgatcaggttagcaataatgggagataaggaagtttattgaaagtgacatctgaaagaaaccaacctaacagtg

SEQ ID NO: 97286 - DNA, 15580 bp, Homo sapiens
tatatcttatagctcttatacctcatgcttttccaagtgtttttgcattcattacctcatttgagacatttagaaccctaacaagtatctccagagcctagcttataatatttaactttagttttaaatttatattgtagctcataaagtattacattttatatttgaaggtttgaaattgcctcttagtcttcagggtcacaaaatattggtcttggtgctggcagaagttcttcaatctcattatctaggccatatcccacacagattcctcacttactgaaggcaaaagtcacttttgctaacagagaaccaagcgagcaacagattttaaagaccctgtgtttcacaaaattaatgggtttatctaagaggccatttcaaagagttgcagaaaaacaaaccaccaagctccccctgaggatcactgttgtctgtattatagttgagaggactccattacacagtccaaaaggccttatactccagccaactagatcatttcctgagaaagggaggcgagaccctgtagcagtgactgggaaagggtgataggagtgtccatctttggtggaacaagcagctctgcagcaaacaggagcttcaagtgatgctccagcaatgccagctccctccttattactctcctgctgctacagattttaggagcagattacaaagccacctgaccctgtccgtgagacccataaacctacagaacaccaccaagcagtcaacaaattttgttacttactcactaggaatataactacaatgaccatgtcttctaacttttttccaagtggttttcctaaatcacctataaccaaaaacttttctaacaactttaggacagatcttcctagaaaaccaagaaagctcaattaaaaaaaaaagcacgggatggtatataatgagttggatcagccaaggacaacataactgcccataagcactcagttcactagcactgcagaaagacagatatgaatgtgtcttaacctccacacagaaggaagatgtcagtaatggctaatggggcagtagcaaagttacaaagtttaagtttcaccaaaaacaaatcagaactataactttcattctaacaatgaaccctatatttttttctgaaactgaaaaatacagggtcctcaaatttagatttaccataaagtaatgcaaaaaattagccctccttttaccgcatatgagatgtaggaggtaaatgaatgtgcttttgacagccactccatcatgcacccagtttgacaggtagaaatcaacacactactgttaaatatagagaccaagttaagttttagtgaaaaatactcaccaacattgaaatcatccttataggtacttgggaagggctgggattttggaggaagcgggtagctgcctttgcgaccagtggtgagagtggtgagtgtgaacagctcatcttcatgcaggctcagtgtgaaactgccatcgctgtcaaggagctgaaaaagaagacactactgtattcaggaccaggtactatagctcatctcatgtggacaaaatagctttaaaaaaattagcttaaagaaaagtccaaatcatttctgttagaacttcctaaacatttgtggaaaactcaccaatatcaaggcccttggaatctttttttcctaagtattttagaaaactttataaaattatgctttataattttaaacaaccttacttcatggaaggaaggactaaataatctcaaaatctatttctattagcctattcttttccactacacagtaagctccttaaagcttggatatattcgatacatgcaactaagagacctgcttttttctctcagtaatttactaaggtaaaaaaattcataaaatatcactgtcgacccagctgttaatcacagaaatccttttacaattaagagagaaaaatcctgctcattttatgatcaatatatatttcaactagcaagttaggcttatgtcacacttacgatcttggcaacttaatctctttaagtcacaatctcctcatctacaaaatgaggaaaaaatacatacctcatagactgctgtgaggattaaaccagataatgcttttaaagtgctaagcctagtgtgtgaccaatggaaaacgctcccagtatcaaagttgttctatgctaaatgtagatctctgaagacactggaatccttttatgaaatttgaacagtttttttctattttgaataaaaggagttattatccttgttttaatggtaaattgatgatcagatctatgaaatacctgacgttatattcaggttgaagaataaccccaaatgacattatttttcttatgaggaaaatcaattttattatgccattcctagcaatttgttacacaaaaagtatgaacttttttttcagaacttaatatataataaggtgttttatcactgttagtgactagttggttatcagaacattaataataaccagaaaaagtggtagacttgtgtcaattaagtgaaataatgtgcttgtttgggccaattcgttctttgaaacctttccccagaaagcaccatggatgaggcactgtgggaagcacctgggatataaagctaaataaggcaaggctcagtcttcaaggtgtccagtggtgcaggaaaagcatttaactaggtaagcacatggccctaggtgaatatgagctaagactggtgaggaagcgtcagaggaaaagacacttgaattgagtctcaaaagatgacaaagatgaggagaggccattctaggtgaagaacacagtatgtgcaaagtcacagaggtaaataaacaggcatgctatgctttgaaaaatgtaagtttagtatgtgaagagaggccagtttagtaggacacatctctaggaagaagaccagtcttctaccttctgggaggataatgagggccatgtgctacactaaggaatgttaacttctaagaaaataatcactgaggtcctctgagcacagtggtcacaaaaatcagatctgcatttttgacatttcactctgtagcagtgtgatgggtgacctggaaagtcagactggaaaaacaagaggcagtttctgaaatccaggagagcgataatgaagaactgaaacaagaagtaacggtggtaatggagaataaggagtgagtaagagaaatgtgtggatacaactgtctatacttgaccactggcgggatacagagggtgagtgggaaagacagagagtctcaaatgggacttaaatttccaacctgggaaaccaggtgatggcgtcaccatccaccaagacaaactaaatgtctaagagctaaacacatctataaacacacaaacttataaaaataaaaattcttaattaatgacatttctgtgcccttttactgttttactgttggaatacccaaaatataagaatttactttaaaattacccatagagaatccagctgcttaaaaagaaatctttcggatgtttttccaagtttggtataccatacctgtagctctggtatttcactctgtaaagaaaagacaaaaaagcatggctgagtaattcatcacatcctctttgaggatttccaaaatcagtaccagcaagaatgtaccaatgacaatattatctctatttatcaggagaaacacctcaaatattaaataataatatttttaaaaataggaaaacattgttcaagcaaatactttattctctaaacactaaagaattttggcaaatgataaaaaaattacagtgtctttgcttcaaaaacattcattactgtacctgtgtaataacttctaaattaaaataactttctggtattaaaaaacaattcttatgccattagtaatcagaaagggtactgcagtttgtcaattcaaacctaacaattcacagaaatagcaagtatctggtacttttaaacaatatttttggcatagtatactgtaaatatcaatgcttgaaagttccctagaccataaaatgcttctaccaccaagaacaactttcttgcaagtgacttttgtaagtgttcctcaaagtcacagagcattttacctcctactggcttctgtcctgctagattaaagcaagtcagaagacagaagacaccagggcctctgtcaattcatatgcaaactgttaaaagttcataatataaggcttcacttaagaactactggcctgtgacagaatatataaattcttaaatcaaaactaaaataaagttaaacatatttacttacaaaagatcccttaagaacaaaggtggcaaattgttgtgacacattgaaataaggaagaaatggccgtatgcacttagaatgtttatgactctgaaaaaaaaaatcacatacattatccaaatgatgtataagctaccttaggggaaaaaaagttcaatagttaatgcccaagattaacagaaatttacatatactagataacaaatatgagtttatttcacatttttaaagacttttttataatataatatttactgaatgtgtattgtatgttcctagtcaaatgcaaaggtcaatggcgtttcaactggatcaaattttgaattcgtagctaaactgtagagacatatatggcatacagattaattttttgttataactgttttccaactaaaatacatcaaataaaaagcaaaagtaaggatgttttcactgaaaagacatctcatctaaatataactttcgttctcatgtaagaagtaaaaaatatatatatatatgtatgggtgtgtgtatatatagtatatatagatatcaaatacacactaaggtcagctaaatatatgtaacatagttctcacattgccatcactgtttactaaatagtcacaactatgggctgggatcaaaagaagtatgagacataatccctactttaagagattccacagtcacagaatacttatagtacacagttctatttcaggctttgcagaccattaaaaaattactttcataatcagagatttcaatatccatctcttagtaattgatagtacaactagatggacaatcagcaaggatataagagatttgatcaacactaccaaacaacatgccatctataaatgcctccatctagcaacagcaggatgcacattcttttcaagcgcacatggaacactgaccaaactacaccatactctgatccataaagcaagtcctcataaatacaggaagattcaagtcacacaaagtacttttttaaccactatagaattaaatcagaaatgaataactgaaaaccttctggaaaagtcaaaaatatttacaaactatcaaatttctaaataatcaatagatcaaaggaaaaataaaaagagaaattagaattttcagctttatgaaaatgaaaacacaacatatcacaatttgtggtatgccactaaagcaatacttaggaggacatttacagcactaaatacctagattagaaaccaagaaaggatttgagagttcagcttctgtcttgagatactagaaaaataggagcaaattttaaaagattacaaattgggttcaatgtatactgctcggggatgggtgaaccaaaatctcacaaatcaccactaaagaacttatgtaaccaaataccacttgttccccaaaaaactgtggaaataaaatttttttaaaaagtaaaaataaaaataaagaaaaaaccaaaataggcaaagaaaataataatgagcaaagaagaattaaacaaaaacaaatttaaaaaccacaagaaaataataaaaccaaaagctgattcttcgagaagatcaatacagttgaaaaacttctagccagactaataaaaaatcaggttaagagaaaacatacacttcaacaataagaaaggtgacattactagagattagagatttacctagggggagaggcaaggcatgaaatagcttcaaaccttttcttaaaggaattgatatttgacacagagcatagagaggtttaagactaatgttgttctaaaaaataatggaggttttggtgaaaagaaaaaagaaaccagtggcttcactataggcataagctaaaccacaaccctgcctaatatcctgttgagaaccacccagcctagtatcctgttgctccactaaaaatgacagtatcacaacacacagtttctttaatgtccgttgctgacccccggaaaaaaattcagcttttatacagtcaacattctttatatctgaaggatgaaaaacagcacaaawatcttgaaaactatgaagtcccagaatctattggtctccagatcttagtggtcatttcttacttagcaaactgtatgaatagacatgttcatgtgaaagattactttgtacattctgtttctgaaacacagaatatagaatcccagaagattcactcctctagactgagtgaggtaacgagctctaatatgcaaatatgtggatttgaaagcatagttctgcatttaactgaaaagtatcaaaagcttctcagtgaaaataaaattatagatgaacagcctaaacatcagtcagatatctgtggtcagaactttcactcaaatttgtttcagttagaccacaaatgtgcagctaygttggatttggtttgyagtactaaacaaattaatatagggcctgaagtggtacaaagagagtgtgtgccaacagaatatcatgaaatacaaaaccagtgtttgggattattttccttgaacacagtagataagccaaggtctgaagtctgaagcagcagttaggaaggtctcagaccttaaaatgtcaactgatacggaatttctctgtataattacctccagccaggttgcttttttagctcaaaagaaagataaagggcggagtcctataaataaagggaatgtaaacatggagactgaaccaaaggcaagttacgggaagataagaatatctgaagagaattccattcaacttgatgattttacagaagcatatgaaagtggacaaaaccaagcatattctcttgaacattttagtcctgtttttcctaaaacagaaaatagccacattcacataaactctgacaaaggtcctgaagaaaatacaggatctcaagaacttttcagttctgaagatgaactgccaccaaatgagatacgtattgagttgtgtagctcaggaatactgtgttcccaactaaacaccttccacaaaagtgctattaaaagaagctgcacctctgaagataaagtgggccagtctgaagctctatctagagtccttcaagtagctaagaaaatgaagttgatttctaatgcaggagattctgttgtagaaatggatcagaggaatgtgtctgaatttaagggtattaaaaaaagtcattaataaaaaactgtgattctaaaagccagaagtatgattgtttagtcatggtgctatctccatgtcatgtgaaggaaataaacataaaattcggaccaaattctggctctaaagtgcctttagcaacagttacagtaattgatcaatcagaaactaagaaggtttttctgtagaggactgcagcattttgggcatatacagtgtttcttggagatataattttactcgcagatgttgttattcatgaggaccaatgggttggcgagacagtactacaatcaacatttagcagtcagttattaaatcttgggagttattcatctattcagcctgaagaatattccagtgtagttwgtgatgttgtacttcaagacctactggcacaggtgtcctcaaaacattcctacctcagagatcttcctccgaggcagcctcagagggtgaacagtatagactttatagaattggagcaccttcagcctgatgtattagtccacacaatactaagagttgttgatttcactatactgacagaggcagtatacagttatagaggacagaagcagaaaaagttatgttaacagtggaacaggcccaagatcaacattatgtgcttgtattatggagtcctggagcagcctggtaccctcaactgcaaaggaaaaaaggttatatttgggaatttaaatatctttttgttcagcgcaattacacactagaaaacctaaaatcgcatacaatgccttggtcatcctgtgagtgcttgtttgatgatgatgtaagggcaattacatttaaagcaaaatttcaaaaaagtgcaccttccttttggaagatatcagacttagcaacccacctagaggataaatgttcaggagtggttctaattaaagcccagatttcagagctgtcatttcctattacggcagctcagaagatagctctaaatgctcacagttctctgaagagtatttcttttcttctcttcccaacatcatatatactggctgygcaaaatatggattggaactagaaacagatragaacaggatctacaaacaatgttttagctgcttgccatttactatgaagaaaatatactataggccagctttaatgactgtagttgatggaagacatgatgtttacatccgtgtagactcaaagctgatagagaagattcttctcaacatttttgcagactgcctcaacagagtgatagttacttcctcagagatcacctatgggatggtcatggcagacctgttacactccttgtcggcagtcagcgcagaaccttgtgtatcaaagattcagagcctttttgtgttagatgaaagcagctatccattacaacaagatttctccctcctggatttttatcctgacactgtaaagcatggagccgatgcccttttctgaggccagaggaagaaatggcaggcatttcaaggaagaagtactgaaatgatttgtcttttgaagtaaataaacgatagggtttttgctttggattttttattaaatacattttacaaagagaatttcaattaaaacttttttctaaraaaatcctgtgaggtttaaaaagattatttttgttttttggtttcttcctttcttctggagaaatgatctaccagtcaaggcaatatgtagcagatccctgggaattaaaggtttgcccatttgttcactgtatttagtccctgctacgttccaggcattgtactaagtatgaggaaccacagggaagacattccctcagaaactgctgcagtgcttttacttatccctacctaaaaaaccrtcaatgtgaaatcatttccttgattacaactatacatgataatggattagtttatataaacctctgtttagacaagttcaagacaagcgtgtctttctatraaaagcattgaaarcgaaggaaatgagatcatgtttcaatttattaaagcggggaagagcrttctgtgsttagttcgtgtctaggatttgagtgccttactgaatgyatttagcaaacatgtagcaatctgttctctcactgtgattgtagwagaagctcatgtaaaatgatagtcattaatgaggaagtatagagtggtacttattckgtaagytcagagtatgccgagtattaatagattatcatactgcctgaaaataaatttatgatgaaatgaaaaaaaaaagtgacagtttaaaaaaaaaaatctcctgtggtcagaagaaaactaaaacactaacttcaaaccacccctgaaaatgagctggaatttaattggatcagtctttggaacaatttaagtccccagggcattgtttaaaacaatacagaaatccaccagcaattagtgtaacttacagtgaggtgtgatcaaggaaccagacagagtcctggaaaaacaaatcccagggtgactgtggatatgcccaaagccacattctccaaggagcaacatttcaggctttacagtgtgtggaggggaagaaggagggaacagagttaactaaaatactccagcaaatcactaagtaaataaataaacaacaacaagcctcaagggggagaggatcaatgcccagagttgatagcatatattatatacgagttgctaccatatattatatataaggtccagtttccaacaacacacacaaaaaatgagacattcaaagaaataggcattatttcattctttctatgctgaagagtatttcatgatgtgtgtgtgtatatgtatatacatacaccatatatatatacacgcaccatatatatatatatacacacacaccatatatatatacacacacacacacacacacacacacaccatatatatatggtatatatatatttcctttatccactcatcagttgatgggcacttaggttgattccatatgtttcaattgtgaattgtgctacataaacatatgtgtgcaggtgactttctgatacagtgacttcttttcttttgggtagatatccagtagtaggattgcaggaatgaatggcagatcaatcaatttagttctttgataaatctccacattgttttccatataggttgtactaacttcattctcaccagcagtggataagcattctcttttcaccacatgtatgccaacatctattgttttttgatgtttcttaatggccattctggctggagtaaggtggtatctcgttgtggttctaatttgcatttctctgatgattagtgatgttgagcattttttttaactgtttttctggctatagacatatcttcttttaagaaatgtctattcatgtcacctgccactttttaatgggatttgtgtttttcttgctggtttgagttccttatagattctggatgctagtcttttgtcagatgcataatttgtaaatgtcttctcccattctgtgggttgtctgtttactccaatgattctttgctttgcagaagctttttagtttaattaggtcccatttatttattttggttttgttgcatttgcttttggggtcttagttataaattatttgcctaggccaatgtacagaagaatttttcctagattttcttctagaatttttatggtttcaggtcttagattgaagcctttaatccatcttgagttaatttctgtatacggtgaggtgagaggtagggatgcagtttcattattctatatgttgctatccaattttcccagaaccatttattaaataggatgtcctttccccaaatttatatttttgaatgctttgtcaaagatcagttggttttaagtatttggctttatttttgggttctgtattctgctctgttgatacatgactgctagatctgataaatgaattcagtaaagtttcaagttacaaaatcaatgtacacaaataatgtatataaatcagcagcactgctatataccaataatgacaaaactgagaatcaaaccaataactcaatctcttttagaatagctacaaaaatatataagaatatacttaaccaagaaccaatagttctaaaaggagaactattatacaaaacatggctgaaagaaataatagatgatgcaaacacatggaaatacatcccatgctcatggattggaagaatcaatattgtgaaaatgagaccacaaagcccaaagcaatctacatattcagtgtaattcctatcaaaataccaacatcatctttcacagaattagaaaaaacaatcctaaaattcatatggaaccaaaaaagagtccaaacagccaaagcaatcctaaacaaaaagaacaatctggaggtatcacattatctaacttcaaattatactacaaggctatagtaaccaaaacagcatgttactggtttaaaaacatataaatttatgtataaagtaacaatgtcctattgagttcgcagcacgcagtgttgtgacatgtgtgctaataatagaacaaaaggagaaagggaacagagcaacaagggaattcagcataatctactgtaattcggttagtttaaatctgaagtgagtccaataagttaagatgtatatggtaagccccagaataatcactaaaaaaaactcacaaaaatatagtgaataattaatattgttaacacagccatattacccaaagcaatctacagatttaatgcaatctgtatcaaaatgccaaggacattcttcacataaatagaaaacacaaccataaaatttatataggaacacaaaagaccacaaacagtcaatgcaaccctgagcaaaaagaacaaagctgaaggcatcacactacctgacttcaacatatactaaaaggctatagtaacgattaataaaacagcatggttttgtctaaaagcaggcacacagaccaatggaacagaatagaaagtccagaaataaattcatgccctatgaccaactaattttcaacaaaggtgccaagaacacgctaggaaaaaggacagtctcttccataaacagcactgggaaaaatggatagccccatgcagaagaacgaaactggactcctgtctctcacaatatacacagtcaactcaaaattgattacatacttaaatataaaacctgaaactataaaactagaaaaaaaacaaagggaaagtgctttatgacaatgagctgggcaagaattttttaaataagacctcaaaagcacagacaacgcaaaaatagacaaaggggatgacatcaaactgaaaagcttttgcacagcaaaagaaacaaagtaaaacagcctacaaaatgggaggaaatatttgcaaattatacatgagacaaggggttaatatctagactatgtaaagaacttaaacaacgacaacaaaatagcccagtttaaaattgggcaaaagactgtaatagacatttctcagaagaagacatacaaatggccaatgggtacatgaaaaaatactcaacatcactaatcatcagggaaatgcaaatcaaaaccacaatgggatatcacttccctctacttagaatggctattaccaaaaaaacaaaagaaaacaagtgttggtgaggatgtggaaaaaaagaaatacttacttcatgttgttagggttgtaaattggtacagccactataaaaaacagtgtggagattcctaaaaaattaaaaataggcggggcacgtggtggctcacgcccataatcccagcattttgggaggctgaggcgggcagatcacttgaggtcaggagtttgagaccagcctggccaacacggtgaaaccccgtctctactaaaaatacaaaaatgagccaggtgtggtggcagacgcctgtaatcccagccacttgggaggctgaggcagaagaatcacttgaacccaggaggcagaggttgcagcgagccaagattgcaccactgtactccagcctggaagtgcagagtaagattctgcctcaaaaaaaaaaaaaaaaaattaaaagtagaactaccatatgatccagtaatcccactactgtgtatatatccccccaaaataaaatatatatgttaaagaggtatctgcactcccatgtttattaaaacactatttacaatagccaagatatggaatcaacctgagtgttcaacaatgaatgcatgaataaagaaaatgtgatatatatatacacaatggagtactattagtcatagaatgaaatcctgatatttgcaacaaatggaggaatatggaggatatgatgttaagtgaaataagccagacacaataagacaaatacctcatgatcacacttacatgtagaattaaaaaaaaagaagagttgatatcacagatgcagaaagtagaacagtggttaccagacactggggtggggctgggaagggaaggacaggaagaggtcggtcaacgggtacaaagtaactattggacaggaggtgtaagttgatatcacagatgcagagagtagaacagtggttaccagacactagggtggggctgggaagggaaggacaggaagaggtcggtcaacaggtacaaagtaactattggacaggaggtgtaagttctggtgttttcttgcacactagggtgaagacggttaacagtaaggttttgtgtattacaaaacagctagaagagaggcttttgaatgctttcatcacaaaggaatgataaattcatgaggtgatgggcataccctgatttgaccattataccacatgtatgtatcaaaacatcaaattgtaccctgtgtcaataaaaaataaaaatatgacaaagttgaaatactcacatttcctcacttcaaaatttatcagacagctacagtacctaagacagtgtggtgctcacgtcaggacagatatataggtcaacagaaaaaaattgaggttctagaaataaaccctcaaatttattgccaattgattttcaacaaggatgccaagacaattcaatgaaaaaggaatagtcttttcaaaaaatagtgcagggacaactggatattaaaatgcaagagaatcaagttggacacacatataaccccagttaagaaagaaaatggaccaaaaacctaaatttaagatttaaaactctaaaactcttaaaggaatacataaatataaatcttcagaaccttgaattaggcaatagcttcttagatatgacaccaaaagcacaagaaacaaaagagaaaacaaagtgggcttcatcacaatttaaaactttttttaattcaaagggtaccattaagaaaatgaaagacaacccatacaaagggagaaaatatctgcaaattatatttctgataaggaatttttatatagaacaaagaacacttatgactcaataataaaaacacaaatatcccaatttaaaaatgggcagagtttaaatagacatttctccaaagaagatatactactagccaataagcacatgaaaagatccccacatcattagtccctaggaaaatgcatatcgaactacaataacatagcacttcacattcactaggatggctataatcaaaggcatggacagtaagaactgttagggaggatgtggagaattgtaagtttcataaaactgctggtggcaatgtaaaatggtgcagtaactttggaaaacaatttggtagttcctcaaaatcctaaagacagagttaccatgtgacccagcaattccactcctacatacatacccaagagaactgaaaacacgttcacagaaaaacttgtacacatatgctaatccacaccattagtcataacagccatgatggggttcaagacacactccccgcaaatattttaaagtgaaataatttgagaaaaatgtagaagcaggaagtttactctctgaccttctcctttctcctctgaagcaggtcataagaccctcactcaacaggtgctctccctattttccttatctctgaagacagtttctggtgaagaagatgagatgcctactcactctaagagcctgcagatgagatcctgagacactgacaaaaaggtggcagaaaggttaagaattctcaccaaggcctgctcttctggatctctgcctgaagtacccgatcgagagaagacaattaaacaaacaaacaaacaaacaaaaacctcctcatcccttcctctccaaatgcagattcgcagaagaaaaacattcgtttggtttgtgattcctgtataaatttag

SEQ ID NO: 97287 - DNA, 12405 bp, Homo sapiens
catacaccaaggcgtttcatcttctccccaagaagatatactgggtgggcaggggtccttgtccctgatggacaaaggaaggcactgagggctcagacagcaaaaataaccgagggtcctgagcgatccggcggaatatttggtcgacaggaaaactcatcaagtcctgccctcaccaggccccaaagccctggcttaagggagggccaggcctggcatttgtcaagatttaacaagttcagtaaatgtgcgcccccaccccacccccatctcccatctctctcccacgccagacccttctccaagccccactccttggccattagctcagtcccaaaggcatccttgcccatcccggctgccgatgatcctgtcaaaacactgtaaataacttatttctacttggcagggcctgcggcaaaaatactgcctgggcaaggaagggagtgagccaaggtctgcctccaagccaggacccacaccctcctgcccagggacccctggtcccccacccacctgagatggcagagacccacagtggaggccaaactcctgcccagtgagacaggggtgtgagcttcacaagacccctcgagtcatctcaggagccagaaaaccagtgagcttcccactccccacagccccacacagcacactaagccctgtccctgacctcaggctacccacgcttctcctacgagggcctgagttttagaaggccttctcacttgccctcccctcgtctcaatcatccatctcatcaccatctggtagatgggcctcagagaggttgtgccactacccaggactgcacagccttggagggatggagctggaactagggaggagtcactggactctcaccaggcaggcagtcttcggagcagaagaggcactggctatgccatcacacctctagaatccaatcccagctccacagctcacatgctaggctgtgacaagcccacctgtgtgagcctcagtcctctcacctggcaagtggggcactaaccctggcactcagtagacgaggcacacacaggagttctcactgctgctgcctgggctgctcatagaagcccagcccagacgccaaacgcactttggaatttttacatgcgcattctagaactctgaagcaatcctactaggtgcttactgcccagacaacagggctggtgacctttaaaaaaaaaaaattggccgggcatggtggctcacacctgtaatcccagcactttgggaggccaaggtgggtggatcacgaggtcaggagattgagaccatcctggctaacatggtgaaaccctgtctctaccaaaaatacaaaaaattagccgggcgtggtggcgggcacctgtagtcccagctacttgggaggctgaggcagaagaatggcgtgaacgtgggaggcagagcttgcagtgagccgaggtcgcgccactgcactccagcctgggcgacagagcgagactccatctcaaaaaataaaaattaaaattttcgtagagatggggtctcactatgtcgcccaggctggtcttgaactccaggcttcaagcaattctcctgccttggcctctcaaagtgttgggattacagacacaggccatcatgcctggctgctggtggccttcctgcagagaatccaggagctctaaatgttcccccaggacacctgatcaaagccccctctcaggcctctgtaccccattcccaccggaaccctgggagccaccccaggcggcttctgtagaagtgctgagtgagccccatgcaccaccgccaagtttctgggacacagctgcagggccgggcaccagcaagccgggatctccttatagggtatactctaaggccattgcataaagctcaaaaagagaaagactcagattgacagtcgagctggaaaacaggcctgtgaaaggagaactagacaccagggcaatcaggtccctgaaagggctgtctctgcctaccatttgtgcagaacatcagagaacttgaggcaaagacgggagccactgtgcttcccaggggagttcttgagctgagggtggatcaaggggaaggagaaagacagagccaagttacaactctggatttacacagcttttggaaaagtcacgatgagtgtgcggggaatccctgggacctcccctgcccataatgaactagcacgggagggggtcatggggctagggtcaggggtcagcactccctgggggtgatgccttcaccccatcatggctagacctggggagatccagaaagaaggaaaacataaatcagcccatgcccccaaatgcaccccagccagagcaaaatctgctctaaccccagaggacaagctgggacctcactcactcacagcaggagactcatccctggtcagccctgctttagccaaaccaaacagacataacttatgctacagacatttctggcttttttactcatgaaaataaatcaaacagaagagatcctttcattttggctcatctacccatcgcatcatttaactacacaacacacctcattcagactcacgcttccctgggccactgaggatgacaatgatggtggtggaggtggcaccagtaaataatcacaaacagctccttctgaggacaaactaggtaaacaggttctgtgctgttccttatctgcatgacctcactcctggaactctatgagactgggtccattattatttccattttacagaagaataaactgaggcttagagggggcaagtaacctgtccagttctaagtccagggcccaagtgtgctggacacagctgactagctgcagcccaacctgtcccccattctccccttcttctttagcaacaaaatcctgaagtcacttctagaccataacccaatgaaacagcctgagatgtgacttaggtccccaaagatttaggtccagagacacccagggcaggactgttagtaacagcaaaccagaaataacctagaacttgagactctggagcagagaaatggttctagatgctgggacatagggatggtgggaagctggtgcagccactctaacagcaatttccaaggtgtttaaatggcacaggcaaatgctcaactgttcccccaaatgcaagtggcaaaactagggacacagaaaagcctaacctgaatgcacatcatatagaaaaaggagcatattttatgtaaaaattgcttcaataattatctctgggttttcatttgtgagcctatcttgacttcccaagatttccacaagtacatattacttaatgagcaaaagaataatctagagttatttttagcaagcacagaccctcgaggcctggccacatcctgtgtagcacaatacctcagtccttaattcactcacccagtagacacagcgcacatcagggccagaccacgtgctcctcagagaccagcaagtcccagcctcaggaggacacaccaacaggcagctcagcttggtgtgcgtgcgtgtgtgcgcgtgcatgtgtgtgtgtgtatgtgtgtgtgtgtgtgtgtgtagggggcagaggcgtctgctgggaaagcagggtaggtgtcactgccaaggtgacatttagcaattctttttttttttttttttgagacggagtcttgctctgtcacaggctagagttcagtggcgcgatctcggctcactgcaagctccgcctcccgcgttcgcgccattctcctgcctcagcctcctgagtagctgggactacaggcacctgccaccacgcccagctaattttttgtatttttagtagagacagggtttcaccgtgttagccaggatggtctcgatctcctgacctcatgatccacccgcctcggcctcccaaagtgctgggattacaggtgtgagccactgcacccacctgacatttagcagttctaaaagcatgaataaaaatatgagagcagggaaggggctgaagagggagatgccaggtccttactcaactgaaatactcagggacgcttcctggtctttggaactgacctgaggcaatgcatctccattcctggctttgactacgatggttctgcgcccagctggacaaggagcacagtccagggccctcaggtcaagatgcctcctcctcagagtctcagccctgcaccaggccaaacgggaaccgactgctgaggaatccagtgtttgcatccgagtttctccatctgcacccagattccctaggatcacactctgagtagcaatgctatggataccttcaccccagaatgccaggacagtcagctactttaagagcagaatcttgcttctggccctttctaaaacccccgttccatcccttcctatttcccctgtgtacttcattccatctcttttctttgcttttacgtaaaatgcttacctggcacgctccactgaggccacggaattcttgacatttgacagccaagcaagggtggcaggtaccagggagatccagtcccaaccctgcgtggtgtggtgaggagggcctggggttctggaagcctgcctgcaagaaggcacccaggcaccctggagcacagggagccccacctgccctggcagagctctgttgtcttgacatgggatgtgggaacttttttttttttttaaaggatttgctcaaattgactcagtgcatcaaaggctggagaaagaatcaccctagaactgagtgccacaggcttcggaagctgcacaagactgcaacacggtgacagcttctatttctaacagcaaacctaaaaagctcaggaaccaaaataaaacggatagaaatgaaaccactcagagtatgacgacagtactcaaagcaactcacgagcatttccccacgctgtcttccaaaatgtgaaaaatgtgatttttttttaatggccacattggagaactgctatgagcagacctcatttatataacccttcccagcacctcatgtatcatcattattaaaaaacactatggggatcatgctttcacataactttgtcttatttgttatctacatagcctaagcaaatagtaaatgatggagaatgaaaataattgtcaatgtttagggggaaaaaaatacctgcatttcaaattttttaaaaaaaccataaaatctatcttttaaaaaaggaaggagtaagctggaatccacaattgttagaaacccaaaagtgatacagaggggaggcaaaaaaaaaaaaaaaatactatattctccacactgaaacaatgtatctttctcaacagcccagtttcatctgtagctgtattttccccactgaaatgccaccattaatcataacaacagatgagtaaaaatcaattaatattccttcagcatctcttaggtgtcttcaatcctgtgcgctgtcatccctttaaagaggaaggaaaagatccacagccaggaaacagactcagaaactcaaacccaggtctctggaccccacagggaagtgaggcacagccaagagcaatctgtgtccattactggcctcaaatgaccacatggaaacactgtgtgcagagccagccccccaagcccgtggcggtcctccttggagatgatggggtctggggagaggtcagagtcaggctcacgtgaacttcagaaagccactgcccaggatatgggtggaccgcaagtctaccatgggctgtcccagctccaaagacgtcagaaccccacagcgattgttattcccaaagccctttacgcttggctccacagcacacggcagagaaaatcgacagaaggaaggatgttcacaggtgtccacccctacctatgccccagtgacctggaaataaaatccatcaagagcaccggggtcagccagctggggtacgctggagagtatgggtggcagagggaaccccgctgtggattgatcatttgacactgtgttcagcataccttttaaaaaaatgttggtaccatgtaaaaatataacctaaataacaagtacatttttaatgctgagatggagaatttagcacctataatccttccagagatgcacaccacgcaaccacrtgagtcccctctggctctgaattccgagagcagctaccaacacaggcctccgctgcctgcactcagcacacctatcggaaagcgccagtgctggcatgggctttccctccctggcggctgctcctcctgcacccccatgcccaggcactccggccagaaacaagggaggagtctggggactgatcctccccctctcacctcccacatctacccaggtaccacaccctgccatctgtctcctgctgccctctgtcactgcaggagcccctggagagcacatcacccctcactaggctgcagccacagcccctctcagaaaaccctgctgtctgctttccagtgcagccctgtctaatcaccctccatgtatcctccccatggctcttcccccatagcctcaggttggagcacccagctttcgcctgcagaagcccctccatgcccccgacacagcaccccatgaacaactcacctggcaccgctactctctccagcctggtctctcactagccccctcaagcctggggctgtagcctttccaagccattggcagccaaaggacccccttccccagctgctgtgtgtggccctggccatgctccttgtctgtaaggccattctaacacctcgcctcctgccagcccctacgcccagtttattccatgtcaggaggtatggcctccatcccctgatggcccactcctccttacatgcccagccttgcgtcctcaccactcccccacagctcagacaggcctgccctgcccctgggcttgggcatccccacggtttccctgccagtgggcatccccacagttccttcgcctccagaggcccagcacccagttctgcctcggccccaggcacatggaccttcccttgggtcttagtgtctctttctcagacttgccttttcttggtggtttgatggtcacccacccaacctccttccctgaaagtctggtgcaggaaggggtaaaaacacatatacaaaggtcaccagcaagccagccagcaccagctctggagaaaacacggacagaaagacgtatgcccaccattcactcattcgcaagccgggagaacttacttacttccttgcctgcttgagaaacagccgccgcaccagagactgggtttcatagtgtctgaattctcaaggaatgtggatggaggacagtgaatctctaactggctgctgcacttctcacacttacagcttgctcattcgcactttaaagtcaaacctcgagtcccctcatgccagcagtcaccttctccccgatcttttacagtaactggggaaaggcagcccagagaacaggccagggcagaggtcaggctgcaaaacatgcttccctaaggacgtccaggctggagggggcccggcagcaggtgggtctttctttcagggtcttcctccaccaaattcaggactattccagaaagaggcagtgagtccctggatggggaaaccgctcctcctgagccttccccacagattggatcggagtggaaggtgcccccaggtgacagcacctagcaaggctgatgcaggccttctgcctggcccacaggagagccccagccccactccccagatcacagacgaccaaggctcctgtgtacgggggaagtaatcatagtgccgtgcttggcacttggtcattttagcaactaggtgttttagaaggaagcacaaggacctaggaactgggttgagctctgtcaggccttgcctctcagttaggatctgttgggtagatgggctcattgccactaaccagactcgtcttccagggagccttcctgatttaccaggctgcgtgagggccctcctctgtgcctgtctggtgtccctgcctaccttggccactgtctgcagacatcacagagagttgaaggggcctggcttgggcctgtgtgagcccccagcacctggggcctatccatagcaagtgtcggggaaactgctgcatgttactgcgtcccatctgcacggcctggctatgaggggccctcagctcagcactcagtgagaccaactcaacactgaaatggtggagtcagggtggcccgtgcgtccagcattcccattaccatactacagagcacggggctgaggaaacaggcacttgccaccatcaccatcatgacaagtagcctctcaagacaggaggtagagagcatctggtcccacgacccttactacactcttcccttgtcctgcagcccaactccctgctctaaacacaaagtaggacatcctcttcttctgagctacctgggtcctggctcccctgcaacttcctttcctgcctgagcagccctgagcagacagtgctgtgtctttcatgatcatcatcacgtggcccaacagaccaggtctgcagacaagtccactgccaagcaagtctcggagcacagttctgggccccagagtcagcccagtccagcccagccccatcagggcctctggacagcctgagagcaaggcctcgtgctgtccctctccgaggaaggatttgcctcaggcctggttctgagaagtaaacagggtaatgttctgaagcagtggacttcaaaccaaacccccacaaaataaatgtttaaaactacatatctatttgcacatttttaagttgatatgaaaaatttctcatcataagtctaaatacttgtagaggatgtaatttccaacatactgtaaatattaacatttaaaaataaaactgttaatgtttctcttttaaatggatccaatggtatctaaataccacggcgattagagattcgccatcatccatttttaaattacataatcaagctcttctttaaccattggaaatttaacagtgttccttttttcctccacaaactctgatctccctcagagatgtttatactatcacagtgtattttatgcttgaaagccttatactgattatcctattatatactatagggccaaaaaatacaaaaatcaatgttttaattttttttaatttcctgtgatttcctgtgatcataaagctctgtcagaagttttctcctggactgaattattataacaattactataagtatacaattgatcaataagacagaaatatattgcaaaattgtataagaaataacctttaaaaataaacttaattaggccaggcgcagtggttcacgcctgtaatcccagcactttgggaggccgaggtgggcagatcacctgaggtcagcagttcaagaccagcctggtcaactggtgaaaccccatctctacttaaaaaaaaaaaaaaaaaaaaattagctgggcatggtggcaggcacctgtaacctcagctacttgggaggctgaggcaggaaaatcgcttgaacctgggaggcggaggttgcagtgggccaagatcatgcctctgcactccagcctgggcgacaagagcgagactccatctcaaaaaaaaaaaaaattaaataagtaaaatttaataaataaatcttattaaaaatacatctatacaatgaatgggaattttttgaaaaattatttcatgaattctcagatgaatattgcctgttgctagaataagacagggtttatcaatttcatctccattttttaatttttacagatgtgagaacagaaaccacttattcaaatttaaaaaatagaatggaaagagatttaccacagcaaattctttggattcctttataattatttgccaagaattacagtaatctagtcatctcttatcaaatattattctttttttttttttttttgagacagtgtcttactttgtcacccaggctgaagtgcagtggcacgatctcagttcactgcagcctcgacctcctgggttcaagtgatcctcccacctcagccccaagcggtcatacaccaccacacccaactaattttttgtatttgtggttgggggggaaccctcagacgaggttttgccatgttgcccaggcagatctcaaactcatgagctcaagcaatccacccacctcagccacccaaaacaaaggtcattcttaatgtgctatcagctgacgacaccatcaggtactctttgaattttgctgcaagcagggaactggaaatacctccctggccccaggatgacaatgactggccactgtacttgaccaccaggagggttttatgccctgaggtctcacactcggtcaggtctgcctgtggatagtgtacagttctcctgcagacagccagcttccagtgtgccaggcccagtgccaattacttcacccaaagtaactcagtcctcacaatggtgccaggggaccagcaccatgattatccccattttacagatgagcagaaagacacagcgtcgttaagcaactggcccaaggtcacacagacaggaacctgaccccaggcggccctgcgcctcacagagtgcacaatcctctgcagaggtgggaggaggaacgaggtgaagaggcacaggggtggcagggaagaagggctcccgagctcctcagcctccagcacaggcacctgaggacactgagatctgcaaaatccactttcttaaatatgctcccacacccacctcgggaaggttacacacaaatgcttccttaaagtaaacccatgatgcctggtacactggagtcctcaataaaaggactgttactgttgccattaaataacaggaagagaaacaactcccatgaccaaccgacctccggtcaccagcgttttgcagtcttgagtcctgacccttggccccaacatccttttttttagatagcagccaaagtccaggtaataagaggaacagaagcatttagtaaatggagaacctatgaacatgcagaggagaccgttcagcagaaaaccatgggccacaggcttttgagacagacagacctgcactcaaatcccaactccaccacggccagctgaaatccccaagagaaagcacagcattctgagcctcagtttccccacctcaaaagggtacttaacaccacatcatccctgggtggctgcacagaacgggagacgcccctcagggaccagacacaggaaacacaggaagacggctggcagcaaggggacgtgtgtcctcttcagtcaccagcacctgaacccagaggactgcaaacacccccagctcccagggcccagcagcctggagatcctgcgcacagaagcccagctgattttgaaaagccagccaagtggcttggcttcctgtttttgcagagtctttctcaatgtcttaaaatctaaaagttctccaaatgcagggatgccaggaggaggtgaacagagaggtatcgtggtaggttttatttttagatgctgaagtgtaaagtgtccagtttggcttcgttctggtccccagccaccacttcctcccccaagccaccacctaaatgaacagcatacatgtctagaaagatttcgcaatgcttcttctgccccggacattctgacacaatggctccagtctcctgttcctcccacagaccgagcggattaaagattttagtctaaatcttcccagaatgccacataaatgaaacccgccgacccctgtccatctctcatcctctcctcgagcggtgggggtgacacccactgtgtgacagtttgaggtcgcgtatggacaggatcaggcatgggggaaggctgtcttgccctctcaggcagtgtgtttgctggggagcgcctgaactcacttcctctgaaaatggctcccacagcagttcccccatggaccctcccaagtggctgggcggaaccacagggcaacccggggccttcctgagcacagtgagccccagctgtcagtctcaggcttattgtgggtaaagcagcatctgtaaaggatccgtggatttcccagtgaaccatcatagagggctaaaagggaaatagaagccaccgcatcctagaggtgcaatggttagagaccatctaaccccgtgatgagatgaataaccacacctcctctttccacgcctgtacccctggcaggcactacagatcaacccctgttcccacccactcacagatttaggatcctccaggctgccaaaaccaatcaaacagaaatggtccctgaacacacacccctaagccattcctgaattccagtatcccccacttgatgatggagaaattaaagcccacagaaaaattcaatgcaggttgggcgcggtggctcacacctgtaatcccagcacttttggaaggccgaggtgggtggatcacctgaggtcgggagttcaagatcagcctgaggaacatggtgaaaccccatctctactaaaaacacaaaaaccagctgggtgtggtggcacacgcctct

SEQ ID NO: 97288 - DNA, 22662 bp, Homo sapiens
agaaagtgggatatcaatgtaaattcaaagatgttgtttaaaccaatatcttcaaaagtcctttcctgtccagaaattctgtgtgttttatgccaggtacttggaagccaggtcatgagtgctgactgtgcatgcccggcgctgtagggcgctatggaggcgtgtgcccggcgctgtagggcgctatagaggcgcgtgcccggcgctgtagggcgctatggaggcgcgtgcccggcgctgtagggcgctatggaggcgcgtgcccggcgctgtagggcgctatggaggcgcgtgcccggcgctgtaaggcgctatggaggcgcgtgcccggcgctgtagggcgctatggaggtgccttccttgtggagctctgagaacacggtgtccactgtgtgggcagctctgcctcattcctgcttcagtatacttggctggaccacataacttcttaaaggccattttaatcttattaacgcttaaaaagcgtatgatgtatcatcggtgtccaaggaaacataccaaaattagtgtatggctttttccaatatatcagaagtctctagggtctggaaaaataatacttgatgatatgttacaaaagttaaaagggctacacttttcagttatattttagggttttgtctatctgaatgtgtcttagcatgtttgctaaaagaaatttgagagaattttaaaactgtgtctcataggagttttgtatttcccaatgccaagattcccatgtgacttcacacaggaatgtggctaagagctctgccagggtagccatgtagagtaagatggttgtgcagtggttgtgatcacgcagttagagaagatgacgatgcctgtgaagcttgaaccacagacactgagagagaaagattagaggactcgagaaatgagactgcctcgggtgaggacttaccagagcacaaacacggttttactgtaacaagaaaatttccgaagttttgccaggtgtaacttaggatgactttgtacatacgacacactgttcagaataagaacaagtgtaagatgatgaggtttaggcctcctgggagatgcactgtcgacatttctcagtaggaaggtccgtgttgtcaccaagtgttcctactgctctgggaccacctcctttgcacgatcccgcgtattcctcagtagtaaaccctagggctctttccctgttcaagttaatccttctttctaagaaaggacgtatgctgagccctagcatttctgctgctttcgcggtccagagcggatggaccaaggtgcccctgaccctctggcacctctgaatctctttcctgaacagccatcacaggaacctgcctggccacgtcgtgctggtaaccatgtcggagggccccacacaatgccgttgtgcagagctgtgccacaggactgtttggttagttttcaagacaaagtccagaaatcctttattcagcttctcctgaaactgcatcttttatccctagggataatctcagtcagtgggagaaggtgattcgaggggaggagactgcaacctggatttcatccccatccgtggctcagaaggcagctgcatctgaagattgagcactggtcaccctgacacgctgtcccacctacagatcctcatcttgcttctttgacattcttttcctttttttggggggggtggggggaacctgcacctggtaactggggtgcaaacctcttcaagaaggtaacatcaaataaataagtcaagcagaggacttcctgccaatctcttctgtgaggcatcatagacactgagcaaccaggaccacccccacgttcagaaatcagctggccaagtgactccatttgacttgcaaaccagccttttctaataggctaatattgctgaggccttaaaggaaatggacaaaaattatccagaaggggtacttttccattgtatctttctaataagggtttaaaatggtactattatggtattgtacttgggctttaacatcaatgttgctttgatgttgttggatataaataggaatttttacacattactattgtgaatggtgaatgttcatgtatgacctacttgtaattaacttgagttgtagtccacagcctcaggacaaatgtcgttgaggttacagagtaagaaatgatggcaaaacgtcaaactcttatttcagagcttcatgaatttagttagactaaacataattctttaagttcaacctaaagggctgagatcaataaatttaacactagacgaagtagacttcctgtctttttgagaagagatgaggtatatgttacaataaatctcagaacttcaagtagcagttcaaaagatgtcagtttttaaaattgtttttgttgttgtcttggcagttttactgaaccctttgcataaagaacaaaataaaagctcggcattgtaatttttttaatggacaagtcttatggatacgaagggtacatttttcataatgattcctttatattttcactttgtgtcattgcagaattttagactctcattcacaatgaaaagtttattttaaacattgtttaattaaaataccatacagttctcttttaaacatcaaaccataaaaagtgtattttgtaattttactctgacctgccgcagtcacctctcacttatctcttccacgtactgcacggtcgtatttcatgagctttctgtccatagcacagaaacagagcagaaagtagtacaatcatgttggaccttctttctgttctctttactcttctcacagatcagatcactccatagaagcctgtgggtttcgatggtttcttctatacacctttttggttgaccagtattactatacaatgtaagtgttttaaaaaatacgaaagtaatactctgcaccccttcctacaaagatgataaagcagtcacttctggcgcattttaataatttaaagatttttagtgcaatggcacggtaacctccaaacctgaattagacagagactcactcaggaagtgacaggcccatcatatcaaataacttattcacttttcatgtggcaggaaactggaatatcgcttttaataaaatggaaaaatatgcttctacatatttaccaccataggcgttttgttcatatgagcctggtttgtgcaaaattaaatcagaggcttctacaacatggtttatttatgttgtagcaaagttggctctacataaacattgttcttattttaaaattaacactatgtgttcagttttcttgtgggcttctgaaagttgccatcttccctccgtggagctccatttgctattttcattatacactatgaggtaaaatgtaataacaaaagagagagaagtaccactgtggctagatatatacacacacatatatatatggatggatgtaatatatgtagaacacacacatagatgtatataggatacacactcatgtatgtaaacgtatacatatgtgtatatatgatacatacacatacacacacacgagagacagaaggaaagagaggaagagagaagcaaacatgtaggaaaaaatataaatcagccccattctcccattctttaagaacaatgatttttcttgatggaaaatgcatatcacttgacagttgacaagaaagtgtcatttttgtgttagtgtatcatataattgaatttgaacaagatacatatttttctgcatacaaatttatgaagctggagtctaccaaacacagctttagtcacaaaagttagtttagttatctcatttcgcttggagatggaatttcaggaagggatatattatttaagattattgtttaattacaagaattttaaaagaatgtatgaattctgttttttaatatagaaaataattatggagttaggaatctcatggctacatttacatttttaggttattacagaaaattctcttaatttattatagtcaagtgtattatgtaatctctatttagaacagtttcccaaaggaatgtgattggatttactggttggttaatttcttgtgaaatattgtcataatagaagcacagcttgaacaaaagactgaattctgatataaactgtcaatattgcttttaccatgtgtaagatttacttagtaatcacagatttacctaaaataaaaggacccgggttgcagtgatatttagttaatgatttgttttggaaaacatgcagttaggagtatttttgtattttgtcagatgtttaggagacagactttcgggtcatgtttcttgtcttgttcccagatcttttcttaaaagaacagtgtgacaccagaagccaagagatggtttttactaacaacagctttgatgagttcctattaaggtcgtattgtgtattgtgccaaattttccacccagtataaatttagtaacccgctatgagcatatgtaggatattcaatttgcagatacttttgttggttatgttggtttataatagacaagttttatggtcatatgcaattattccattatctttttggacacagtgaatatgttttttagctaaaaatgtccttggaaacataaatgcctgccaataacatggaatattgaattcgggcaatgtgaattgattaattagaaaagggtcaaaagaaatacaatggatgtggaaactaattctaaaaaatagccctattaatagggcagagactctggtccatttcccagctgtacttctctctaagaggtgtatgaaaaacccatcttgcaaaagagaccaaaatattagacacaatcgttcccattcctgactcttcaatggaaaaggaaggtacagatgtttacagtggtgccccaggtgactcgttctcaccacaacaaaagcaactaattggaaactagatgtgttcaataatagatttcctcttttttggcatgctttttagattttttttcattttgtaaaatctcagttaatttttctttattggtatatttgtgtatgcgagacaaatcctgtattgtacaggatataaatagatgcataaatccttagatacctgggttttttaataggtttaggtttgggtattgtgtttctggtcttttaactcaaaattaaggtttgagctttaataggactaaattattcacctgccttggcctgtgcctttattttaaatactgcaattttacttcttcattcatgtatttattattttgcttttcttgcttaagtataattgaaaatatttgcaggaacgcacaattcattttatcaagttgaatgaataggaccattctctcctcatcagatttctgttctttatttgacttcattgacatataccctggtgactataaccagtgaactgttcagagtcagtcttttcggcaagaacttcagagaactgtgacactggttatgatgtgattttggggggtttcaggtacctaagcatgatttttaaaatcacttctctctttacatatttcgaacatatgtttgctttctacactttgcagattttatttaggatttaattctttaaagactatattcatttagtcactatagtggatctcttctactgcaagtattcatctgatttttaaattatgtaaaatgtaaatcagccaagtatgtcatccgttatagtttccccatgctttcagcgcatggccatgagatttttacatgtgcataagtatttagccaatacacattttgctgacttctttaaccatttatattgtttaaattagtaatatccaatgcagtgcacacttttttgtcttttttccaacggaatattttggttgtctgtagcgttggaagcattttatatgataaaaatagcaagaaaaaattaaaaagtgtcaacggtgtgctggttctaaattaagaagatagaacaaagagaaagacattaatgttacctaagaaacacatttaacatccgaagaagcaatgctgtcctcacttgatgtttctcttctcaacccagcaatggagagcagggcttgcaaagccgtacagagcctacgtgctctttcctgcaagtgggagaaaactaatcaatggcacacagggccaggtgtggccctgtgaggcaaaggataatgtcacctcaggaccaaggtggaaacttacagctgaatccagggcttactaagtagggaagtcagtttacatatttcagttttcctctgatgtttttgaggtactgtgtatttgcagaagtttaagcagaagggttttgtttctattgtaagttaggttctaaaagtgtataatctgatactctagcccaactgaaatattatatcttgggcgttacagcctttgtctttttctttagtcaccttaatacccagtcctatgctgtatctctgatagcctatataaatgacatataggaatattattttccatatgatctgttgtatggtgtatatgctatgtgttcatttcgtgtgcaagttcagagtgtaatagatttacccagagaaggtgtttctatacaatgcccctacctatttgaaattacatgcttgcccaacacactgtgaaatagttaccaaaatttgtacaaatgcagcatcttcattctttctgagaagacaagatggttttctttacatgaacaaatgaacaaaagagatcctagatccataacgtagctaaggcatctaagagtttgctgttgataatcttgctgaccaaaaactactggagagtaacacaggttatatgccatcacaaatacaatgctcatgaagaactgatttgtagagtcaatgaacctgtgtccagaattttaataggctctctattggaaggagaaagaatttcaagttaacagtatctaactttatcatagttgatgttagtaaattttaaaaaatgattttatatgtatgacaaaaatctttgtaaaatgcgcaagtgcaataatttaaagaggtcttaactttgcatttataaattataaatattgtacatgtgtgtaattttttcatgtattcatttgcagtctttgtatttaaaaaacatttactgttatgtttgtataatagaacagtaatcatttattataatctaggcaagttgtaaataaattcataattcaaacagccagtatatatgcatatatgagtgttatattgcaaaatctttgttttacttacatggttaaagcagcaagaattcttttgttgatatgtaattatacacataaaatatatatatgtatgatacatgaaatatatttagaaatgttcataattttaatggatatcctttggtgtgaataattgaatacagagtttttaaaatatctttcacgtatatcacttgctctcatttgtggggaagataatagacatttcacagaaggtcatttgaaaacactccaggccttgtttgcctagaaaacaccaagtttacattgaattaacatgttgtgtttgcttcacccattttctagcagacagcacaagacaacataaaatgttaaatgttatgattgactaactctaagtccattctgtagttttaaagattcagatactgtgtagggaacccgtggtgccgcagtgatggcttcaggttactgagccagcatccctgagtgccaacccgcaggcttccccgggagcttccgtggccctcggagtctttggggcaacaacgcaaatgcacactcactaaaagcacaccctcctgaaaagagaagtgctgggcaaaacacagtggtgcatgtgtgtttatgtgtacgtgttgggattctttctgctataggaaagaacacattcagggctaaaacctcacatactgtgtacacagtgataagtatactcatggtcttatctttaaaactctgggtaaagaaattatgtttttattttgactatctctgtttgccatcaaatgagtaggcaaatgataaatatgtaagaccaaaaagttaaattttatccctgatcctctctaaccttaaacatattagagttaaatgtgagaggcttaaacatatgagtgtccacagccttgtgaattagaaggaaaaggaattcttctccaataccaaactcttactaatggaatgccctccggatgcatagcactatacataatggtagacaggatttttgttaaatattcatttcctgtgaaatattcatttcctgtgctaaaaataaatttcatgagctaatatatccataaagttatttagttattcaagttgcagattggcactctgtaaagctgatctgaatttgaatcctcatcttaactgtgcatacctttgatttttccatcacctgtaatgcaacagtgttgagagtaaaacttctccatcacatgtatttcctaatgcaagaagaatcctcaaaagcaacacttaccaaacaaacatttattcaacaagcatttattaggcacttagtgtgtggaaggaaagaatggaaggagaagagattggaagcagaggacgggatgtcatgtttctgtagggttggccctcacaccttcatcttgccaaagacaaagtcacttagccatggattcctgtgcacttgtgcctttccgtaagtactactttcatgatcgtagttaccgcagtgtggaagagaaagcacacatttaaagacctgaagatctcagatatttaattacaatttttaatttcaaaaacccgcaattgattccattcttataagaggaaacgaagcttgatgagacagaaaccaaacagaagcatgcccctgcatgtctacagctttttcctctcccacacccttcgcccactatcagaaataaaaagatgcctcccacggcagatctagacgtttcctcgacagtgaagagcaaaggatagtgactagaaaataaaatcaggaatttatttgaaatatcaacttccaaattcttagctggtagttgtatatattcagataatgtctagcttttttgatgtctatgtcactaattagaactcctgctcaaaaggatgaccttacagcatggtaagtagtcattaaaaagaaaacagattcaaacattttaacatacagaatgactraggtacacaaacatattcatatacattaaggaaatgtttacctgctttactttgcattatcaaaaaaagcaaaatatcagaccaccctgtttcctaagtctcctgcataactggattatgcctgtgaaatcaggaatgttagggattggactcagaggtcatgggtacaatctcccatcagccaatgcaaaatcccttacttgccatttctggtagatgctccttcaacaaaccactcctgagttggaaaacattctaccgtgaggcaaaccagaccgctggttgacagctgtagttgccaggaagttctatccaaagttgagctgaaacctgttgctttatgatttttattccaacatgctagttctgagcttgtagtcacacagagaagtccacttcctttgcacctgacaatcttccagttaattgaagaaggctatcatgcctcctcatgctgaacctcatctttttttaattgctttaaaatataagttggctaaggcacctgcagtattcttgacattctcccctgaggaaagtgccagcagcctgctactgggcccttccttactacagaataacatgtggctgaagtgcctcagctggcactcaggtgacctcctacctcccatggcctgtggctcagtcctggggaagtcacaccattccttgagcatcccatgtcctttagagaatgtcacatacaattctctctactggagtgacttcactctgatttctgtttggtcaattcattcttgaaaacataaatttgagaatctcctctacttgagagcctgtttctgccggtcagtgatgtgccccctgaatgtgctcccttgacccccctgcatgatgaaatggggctgtgatgtgcacccagcccaggcggaaataatagaggttaacatctattgagcacttactatttgcaggcactcttgagtcctactcatctgaactcaatctcacaacaattctatgacttatgtgtaatagggcccctcttttaaaaatcagaaaaatgaaatgcagagcggttcagtagctggtaaatgaggatgtaggggtatgtacctgagcccaccgaggctctgagactccatctgtaagctctatgatgtcctgaaatgctccttgcttcagtacctgtttgtaaaggttgcatctggctaaagtaaggcacataaaacattcacgttatccatcaggatcctcgtcccaaagcatcgagttcctcatgaacaatgctcctcttcactccttgcctggaggagtgcaagagtaggaagtctaagagaaagaaacaaatagcattccacttttccttctcaaaatataatttggaaattcacagtagatgaagtattgggagaagttttcgtgtttacaggstaacaatctggcttaaacaagatgttttcaggagcccccaggactgagggttgcctgaactgaggaaggaaggaatgtgagaaagaaggcaattcacaacaggctgtctccaaaaacaggcccagccctgctctcgaccaaggtgggaaccttggggatagaaaggcagggcagaaaacccccagagcaggtgcacagamtaacgcagaggrtccttgtgcctgcttttgtcctagagctcagagcctgtggtacatcccaaacatcatgaacagtccaacatggcaggggacagaaatgaccaagagcagaggtgaccaggtgcaccaagtctgacagctctgtgcaggcagtggccccaaagggaaccaactcgtggttatgacgtggggtccagttcttcatggccccaatgccatgggtttgaggtccaacggggtcacacygcctcagtgaacactggctcagataagcataggctgacgcagagtacatcagtgaggacagatggcagaggccagagccagcgagggccttacaatggcagtcatgtgggcagcacagcagagcaagggtccttacttactcctgcttcagagtccacattcaacctccaacctccyckaactcacacccaaaactcagacgggagaagaatgtgggaaaaggcttttaaatgatttaaaaacctaaatgaattcaagaagcagtgagtttagagaatttacctgaacatggtgactgaattaagtttcttgcattagataaattaggaattcaaagcaaattagagaaattaggaattcaaggcaaattaaatacagttctagaaaagtaatttttttttttacacttgcattcgagaccagtgaatkccatatttgctatacaggtgtagccaattctgcctctcccattcttggttctagtagcttagcgatttatttaacatgaagctggtgactggtgactatgcaatgggaatracacagaatttactgtggagttaatatgtaagtacatgcattacagtatygagtcacaacarggtgctattattcatgtattatcagtggctaatttttcctcagtaaaggaattgctcattttttttgtaagagttgcttttccttcagaagaaaagtgctacacttatccaatgattcaacagcctattaactttgcattagtctgttttcacgttgctaataaagacatacccaagactgagtaatttatacaggaaaaggtttaatggactcacagttccacatgcctgaggaggcctcacaatcatggcagaatgcaaggaggagcaagtcacgtcttacatggatggcagcaggcaaagagagcttttccagggaactcctgtttttaaaaccatcagatcttgtgagactcattcactatcacaagaacagcacaggaaagacctgcccccataattcaatcacctcccactgggttcctcccacaatgtgtgggaactgtgggagttacaattcaagatgagatttgggtggggacacagccaaaccatatcaaccttcatggtccatttggatctaaccaggtgtattagctttctcttattctctctctctatatatatatattgtctgtgatctctggagagasagagagagtgagatttattataaagaattggctcacacagtcacagaggctgaggagtctcatgrtctgccatctataactggagccccaggaaaactgctgggagaagttctaatctgagtccaaagacctaagagtcagagagccaatggtgtgattttcagtccaagagccagraaagaatgatgtctgagctgtagcagagarcagattgtgctgtctcccgctcctccttttgttctatcaaggcctctaacagactggctggggcccagcacatgggatggcaacctgcattacttgttctacctgttagggtctgagtgtttgtgatccctttgaaaaagattcatttgctgaactattatccccagtgcgatgatatttggaggagaagcattaggaaggtaattatgtcatgggaatacagctcataagagcaggccagagagttagctcactctatttctgtcatgtgaggmtacagggagaggtcagatgtctgcaatccagaagtggaccctccctggcactagaccatgatggtatcctgacctctggcttccagccaatggagccatgagaaatgtatttctgtaattgatgagccactctgtttatggtatttttgttacagcagtctgagctgataaagacattactcattcaaacatttatctcatccagaggcaccctcacagacacacccagaataatatttaacaaaatatctgggcaccctgtagtccagtcaagttgatgtgtgaaattcaccatcacaccagggatgcctctctcttctgccaggatacttactgttatttgtaaaataattttcaattcacaaagtccttggacacatggtctttaacaatgatgtctgttttgtctttgtttttttttgtttttttttggcttcttttgcattcctccaatgtgtttagcagaagctcagctgcctaatttccttgcttcataggaggtggcattgtgtgcygcagctctgcctgtggaccagttgccttctcttttctctgcctatcatttcctcagctgtggggaatacataacaagcctcactctatcccagccaccaggcatccagccatgcacaacaggaatttaaaamcctgctgtcaaagagtgtgtgttcttgagtagaaagacagatgattaacatgcaatgattatgtaaagtgtcaggcgatggcaacagcaatgaaaaaacatagggcaagggaagggacaaaggctgatggacagtgataaacacctctgatggatgagatggcattttagcagaaacctggcccaagtgaccgtggggtctgcaagtacttcytagctatgacaacaatgctacaagcaacaagggaataaataagacwaacttcattaaaattaaaatcctttgtgagttaaaggaacccatcaaaaagtaaaaagtcagctcatagatggggaggaaatatctacaaatcctttatgtgataaaggactcatatccaaaatatatacagagctctcacagacatataaccccactaaaaaaattgacaaagggtttgaatagacctttctccaaagaagatacataaatggccagtaaactcatgaaaaggtgttcaacatcattagttattggaaaaatgcaaatcaaaaccacagtgacataccacttcacacccactgcgatggctaaaataaacaagatagacaataacaaatttggtgaggatgtgaartaattacaacccttatacactgtggggwtgcaaaatgatgcagtcactttggaaaagtttttaacctttccctaaaatgttaaaaatcgagttccacataacccagctattccactcctgggtatatacccaaaayaaataaaaacatatgttcacacgtccacacyaaaacctctgcaagaatgttcatacagcattactcatgtaaaaaatggaaagaatgtaagtgaccatcagctgagtaaatgaacactcaaaagtggcctagccatacaatagaacatgatttataaaaaactgaataatcgatacatgccacgacatggatgaatgttcagtgaaagacgccagtcacaaaaggccacatttatgtaaaatgtccagaataggcaaattcatagagacacaaaagtagatgaatggttcccagggctggggctsggggtgattgcgcatgtggatgggtttttttctggggtaatgagaatgtcctaaaattagatagtggtgatggctacaaatctctgtgaatagatcagaaaccacaaattgtacacttttaaaagggcgcattttatgatatgttgaacacattctcaataaaactatgaagaygaagaatgactgtgattgtttatattacattaaaaaaagaaaatccacgtccataataacgttcaaaataaaaagaaggaatacattcattaggtggttttagaggtgactactacaccaattccttacttcaaaagcagtaaytatagaataaaatatttcccgatttaggagattacataccagattgatgagggaaagctgtttttcagaatgacattatgacatctcaacaatatggaagaaatgatagtcatcaatatggaagaaatggacatttacaaactcccttgacttaaggattcaggcaaggagcatgaatggaggtggcaggtgctcagggaactggggagtttcatgagtcatgtgtcaccctgcagcctccctgctaattgcaaaggggaaagcttactgttcctgtaacaggacgtggtggccgcctaccccctcaggagtgagctgatctaattttgcatcactgatagtgttaccagtgcagggtgtccaggttcttgccttcttgaacaaagaattgatcagaacgcacaaacaaagcaaggaaaggatgaggcaacaaaatcagagatttattgaaaatgataggacattccacagggtgggartgggcctgagcacaggggctcaggagccccattacagaattgttttgggtttaaatactttctagaggtttccattggtttcctggtgtacaccttatgtaaatgaagggatgaagtaaagttacaaagccatttatgtggtgtacaccctatggagaggatatttcctgtcacagttaacgggggtgaactggccttatgytccctgcctccatacyccattctcctgcstcaacagtgggaatcacagataatcacctgtgaagtgttagcaaactattcaacctaattataaccaaytgaacctcagaccaaacttccattttattgatttagaatcaaccaatgtaatttcaaccacagcacagaatgaaayaatcagacaaatcccaaaagtagacagggtataagacaaccagcctggtcttttaaaaatgtcaatatagttttttttaagtgtgactgtttcaggtgaaaagagcaggactctgtgactatcatgaaaaccagtacataatgcactgtagatggctggattgtatgtatataaagaaagttgttaaaagggggatagactggataaagaaaatgtggcacatatacactgtggaatactacacagccataaaaacgaatgaagtcatgtcctttgcagggacatggttgaagctggaaactatagctctcagcaaactaacacaggaacagaaaaccaaacaccacatgttctcaatcgtaagtgggagttgaacaaggagaacacacggacacagggaggggaacatcacacaccagggcctgtcggggggtggggggcaaggggagggagagacttagaacaaatacctaatgcattcggggcttgaaacctagatgacgggttgatgggtgcagcaaaccatcatggcacatgtgtacctatgtcacaaacctgcatgttctgcacatgtatcccagaacttaaagtataataaaaaaataaaaataaataaagggggtaataaccaaatatatggattcttatttgaaaacacagctatagaagaaattttgtggaaagtgggaactgtgaatatttgctaggtgtctgcagacagaagtcatgacttggtttcttcagtaaccatggtctgtggtttagaaagagaatgtctttactttagcagacctgctgagtgctgaattatctaagggtaaaaactcataactttactaccaactcaaagatttcagcacaaagtgtggacggagagacagataaggaagtcggagtattaattttgtcacctaggtggcaggcatacggtcgctcactctgccgctcttatttggaagaagagtacatgtggcttgtactgggcatctgccatactctacagtccaggtggaggaaaaatgttcaattcatttgcagatctcaagtctgatgactccatttttgctaggtggtgggaatttttatcgcactcatctccaaggacgtccaaggagactctcaggtttgttccaagcgttcaaggaaggcctctctgcattcctgcgaagctgctcctggcctgggtcctgatgacagatgcccccgtggagggcaggccagcgcagcaccatcgctgaggcaggagtccccgtccaccgtccacgctggtgttctctttccaggctggactcccctctcctcctccccttctcaaaggccgctgtgtctccttttccctccgagaaaatccttcaatatagtcgatgacattcggcttccaaaacaaacaccaagaacaagaaaggagaatcattccaaatgcctgctttctgcctgtgtcataaacccctctgggattcgggaatgagaagggaagcccagagtggacaaagcgaaaattacaatggctttaaattatcctgtgccgctccctccccccaaaacacccaatgtcggtgtcattgtatttaggggaagagggtggagagaataaaggttagcgtgtctccaggcatgcttccaatcagttctgtgcctctgaggagcgggggtggggtggggtgcaggcttgtgtagataaacgtggggaattctagaaggaaagaattgacgcgaaccctccaggtgttgagtggcactcttctcagcacagtgcagggcggtcaatggaggctactctgggttgtggtgctgcatagagaagggagcaaagggcacagagagatcaaggaagcgcccaaagtctcccagaggccatccctcccccgccagcccagagggtggccagtaaccaggacttcaggtcttccccctgacagctcacatttcctaaccttaagaatttaaaaagtcaaccatgtttgttcttatttggacaacttcaggcttttttttaactaagtagcgatgttcccccactctaggttctacacacagaaaatccttctgtctgccgtactgctgggaaaatccctgggggaaagacaagccttggccacccatctaccctggaaggggaaggtctccactctcaagggcggggaacaaccctcagcctcaatggaaacgcttgtggaagtgggaaggagcggacagctcccggggaggcgccattcattcctttctagcccttgtattcaggaaccactaggcctcccattatttcatttttagaaatgtgagcaaccatttgttaccaatgaatatatcagcaatatgaaacaaggaccagaaacagtaaataatcagcaactccaaatattttgaaaaacagttggtaggaatcatgtcttgtttccccacagatgcgggtttgattggacaatcagacagactctgcagccagaccatgctggggttcccgcgttggcgctgcgagcttgcagaggtcaccctgcgtttgcactcggtcaattccactccctgcggaaattcaaagggcatagtatgagggcctctgatttctgcaaatccaggctggagagggccacgtgccccacgtgcagtgcctggacatcatcccccgggagccacatgggcctcgcttttaggtgtgctttcctaagaactacattaacatcaggatgacggaaagcatctggggaactggactactccacctctggtttgcttttgccttccccagcaacagtgaatttctttcccccttgtctatggcaagattcccttggagcaggtcacacacaccttttatctatttctttagttttaaatttacttgtatatgtatgtatttatgtatgtatatatgtatttatttatttatttatttattgagacaaggtcttgctctgtcacccaggctggagtgaagtggtgtgatctcggctcactgcaatctccacctcccaggctcaagcaatcttcctgccttagcctcccaagtagttgggaaccacaggcacacaccaccacacctggccaatttttttgtacttttggtaggggttttgccatgttgccctgactggttttgaactcctgagttcaagtgatccgcctgccttggcctcccaaaatactgggattacaggcgtgagccaatccaccgagcccagacacaccttttagacacataccaagtcatgaaatcaaatgtcgcctatttcccagactttcaacatttttcactccactggccccattccctcaacatgggatccctccaatctctctaatcataaacaaatcgaccaatgaaacacaaacaacaaaaaacagacaacgatttgaaccatctcccccatccctagccaatgttctacctccagtgtcaggccacacaggagttttggaaaaggggggtcaggtctgcaccacattctctagcttgatgccaagaattctcttcctctggctctttgtcacctcctctggaaggttgcagtcaaagagcgccacactctaatccccagaactggtgaagatgtgagctcactgggcagagaagatatggggctgcaggggggatcagggctgctgatcagctgggcttaaaataggaagacgagcctgcactatctaggctggagcagtgccatcacagggctccttttatagagaacaggccaagtacggtggttcacgcctgtaatcccagcactttgggaggctgaggcgggcggattccccaaggtcaggagttcgagaccagcctggccaacatggcgaaaccctgtctctattaaaaatacaaaaattagccaggtatgccggtgggtgcctgtaatcccagctacttgggagcctgaggcaggagaactgcttcaacctgggaggcggaggttgcagcaagccaagatggtgccactgtactccagcctgggtgacagagtgagactccatcacaaaaaaaaaaaggagagaacagagaggcaggagggtgtctgggatgtgagaaagactctcccagcctcgccggctttgcagatggaggaagggcccaggagccaggaaccaggtggcctctagatgctgaaaaaggcaaggaaggggactctcctcagtagcctccaggaggaagcagccctgcccactgcccacacctggattttagccagtgagagccatttcagactttggacttccagcaatgtgagaaagtaaattcattgtttctttcaagctgctaagtctatggttatttataatggcagccacaagaaacaaatagaggccttccctggtcatcttatgtaaaatagtttaagactcaccactgcagttacaatgtacttttataacatcttagggttttttttttccttcacagtttcattgtagattttccttctctcttgacatcttgttggcaaccttgtattggcaaagatcagacagtgtggtgactttgtgtttgaaaatgccatctggtaatgaagaggtggagaagcaggcactctcattactgctgggattgagcaaactgtaataacccttctgagaacaatttgatgctctttctcaacatcccatgggcacaaacttggcgactccaccccaggtgctcaagttctgtgtttacctacagattcacacacacaggaagtgactggaggaccagcagtgggatttaatagcagaagaatggaaagagcctatatgtccatcagtggtctgtggctggaataaatcacagtagagccatacaatggaacactgcccagacatgtaaaaagtcaggtgctctttatgcactagtccggaatgatttccaagagaaaaaagcaaggtggaggaagtgggagtggcccgctgtcatggtggaagagagaggacggagagatggtgtgagtgaattttcttgtctacacgggctgcctgtgggaagtcgtataagcagctggtcagatgggtggtctctgaagggagtgaccagaggctatggggtgtgctggggggattttcatggcccacatacctctcacttaatgggggaatcatgatgtctcctgtcttgacccaagatgcccaaatcattttcacagttgaaaaaataatggagcttttggaaacaggtgtagatgagtgataaacaacagtttgaaaataaagaaatgcagtttttatgcacaaatgtcattgaatgaagtttgttttactttccaaaggaggaaagagacttgctggggagttggggcgtggggaagggatgttaggaagcccttcaagaggtgcgttctgactgcaccatttcttcatcgatttttcaaacttccagagtcttatagttattttgccctcaaataccacccaaaaatgaagctatattgcagaaaattacttttagggcaaaatccaggctccacaggagaagctttgggataagtggaaatagcccacctgtgccacagataacagtgccgtaggaggctccctcacagagaacgcaggtggaccgagagcttcgtgtttcctcctccttggcaggctggccaacagcttccttgtgacagactctgacctggatctgttgtatggaatacctgccttagagaggtgtagagtcaatgcaaaggtcttgtttatatgtgtttttgagatgagaaaaatgaacatgttaattttctgatagaaatgttcctatagaaaagcaaagatgaatgatgcaagagagagatggcgagagtgagagagaggagaggagaggaaaagagagacagatggaaaaacagaccaatgaaccggggcccttgaaaaagcaagagggcaagagagcccaggagcaaagcactttggccttggatgggtgagaggcttttccctgacacatcaagaggagggtggagaatttggagtgtcactgccagccaccattgcttacgtgcctagaactggagatgtcattcttggctcttagccctgttcccttcattctctatgaagtatagcaacagtcatttctctagaaagaagtgatgataccccactctgtaaaacatttttcagtgactcttgatgactcttcagccatcttcaggaccaaactgaaactccctccggactctgcccctgccccatccaagaattctcatcccacccccaaccccacatcctcctgccaggccagcatttgctttgcattctatctaaaatttcttaaaagcattattcagtttctccagagcttaggaagcacaaagatgttttaagttattgcaagtcggttcatttttgcacagcagagtctaatagctgaaaagcagtaactggaatcacttatttgtgacctcttcccttttggaacccatcagttcttctgactgatgctccccgaccctcccccatgattgacaaggaactcccgctcgcccatcctgcacacctggaacaggtggtatttctggaagcctccgcagcctatgagatgtgaatccttcactccttcctctgccggtccacgcccatctccactgctgctcacatcacactgcattttactccccagtggtctcctcttcaccgagcatttttaaagtaggggattcattgtgcatttctgcagtcctagcaaagaaacaatagtagacaaagatttttaatttttaattttttttctggaatgaggggtaggatgaaaggacgggtggatgcgtggattagttgggatggtagaatggcctcacccttgggttgcattcagtggccaagtgttttaggatgtgttcaagcgctatctggagtggataagcaaaacagcagccatagtcactgaaatatgtgcagacgcaatttgcctgctgagtagttcttggctatttctacatagaagtctggcctcaaggaagatccagtgtgtttctggcacatcaattcattatgctgataatgttgtcgttaagtatgtttctgcctcaaatgctttgatgaaatatttagcaataggagagccacagatgggcttttaaggcctgatattgatttgatcattgactttctgatcttgatagcatataagtaaggggtggatgaattaatttaactgcatttgtgttctgccataagggatgacttgggagaaactgaggccctaaaaacaaattattttcttttgatcaaaaccaatact

SEQ ID NO: 97289 - DNA, 139621 bp, Homo sapiens
tgagtatttgcttgggaaaaaagtcctcaataggtatataccagaacgcctggttatctctaggtggggggattatagcgttttttcttcctagtaattttccatattatccaaattgcatttcaggggtgcaggccagggggtggccctgagtgggcctctgtctctgaacttccttccctggggaccaaacaggaaaacccccacccttcccctccagaagggagggattcctaaggacagaagagctatggagggaggaagtgccctgtccaagccctttcaaacatcaggatacataaaactccaggcccttactgcctgcatcttatctgagaagtgggatttttggagctatgtcattgccagctttgctgtctctccgtgtttttttcaccttccacttttttttttttttttttttttgagacggagtcttgctctgtcgctagattggagtgcagtggcacgatctcggctcactgcaatctctgcttcccgggttcaagtgattctcctgcctcagcctccccaaactcccactgggactacaggcgcctgccgtcacgcccagcaaattttttttttttttttttttttttttttagtagagacgtgtttcaccatgttgcccaggctggtctcgaactcctgagctcaggcaatctgcccgcctcggcctcccaaagtgctaggattacaggcgtgagccaccgctcccggcctcaccttccacattttctacaatgaacaagaagaacttggcaagtcaagagaagaagcaaagccatagagagctagccaggggcgttggccggctgtggatctgtccagacccaggccgccctcctacgcgggcctgctgcaacctgcgctggggttgaggcaggaaccaagcttggggccaaccgactgcgtgggacgtggctcccggatctgcccctcaccagctgaggacaccggagcgtctctctccaggactcagtttccccatctgtgaagtgaggatagtcccaccccccagctcaatggatccctgcgggaggagggaatgcgaggctggttgtgggtcggggggcctctttccgattcttcctgaagaaccctgcacagaggagacgggggactgggaggggcctgggtctccgagtgtgggcacggggagctgaggtcttgcagctcctgggtctggggcgccggggttctgtgagagccccagcttcgtcacgtacgacttcctctcctctaattgagggaattgcagaagccccggagggcggctggttcagagaccgaaacaaaggcaggatcaggaccctggatcagaatggggtccacgcgtgagtctctgtaattaacgctctggtgtcccaaattacgagaaaatatataaaacatgtaattgcttctgtattttggacactcattaggagaataataaatgttattatttattaatatggtaatgaatcatctcgcttttaaaattaaacattaaaccgctaacaaattaaatgtaaattattaggccccgagttgatggaaagagttccccggggaggggccgctgggctccttctttgcagaaatgagtgcgtcgccctttaactaggcgcggaggctgcgagcggtgcggggtgacctgaggacacccgaagacacgggcgactcgcggggacatcctgccccctgccggccgcgagcgggaccgcagcggcccgcgggtagcgtcccgccgcggaggtggtttttccttgtgatctttccagaagcagtgaagccctcttgggcacccgcgcccctcgcctggcagacagccacccgctcgcgcacgaactcgctgcacagagctgtcaggagtggggcgtgtggcctggagcgaggctgctcgcgtaggctgggcctgggctcctggccgtgttgtcaccgccaatccccacacacgcaagagaaagcagcttctagcctcatctcacacacgggaaagtgaggctcagagatgtgtggcctggccggggtgcacagccagtatccggtgggcctgggatgccagcccagcctgccaggccccagggtggccatcatggagtgggactcccgggctggccccccagagcctgttccaggcacgtgcatttgaattaatggggttactgtttcctgagggctcttgccagacaccagctacttactgcacgtggttgagcccaatcaagtaggcagtgtgccctgtgcccatcttacgcacgagcagactgaggcacggagaggcttcagcgacttgcccaggtcagcagcaaggaagtaggggcaggagagagaagtaggtcttgctgagtctagagttagctcttgaccactccaggccagactgggttctccctccttccaggaggagggcaggcagccccatctgtgcccatccctgcggtgcacaaaacagtgcagcttccgggccactggctgtgtttctagggatcacctgagttaaagcaagaaaaggaatcattatttttttaaccagcacatgatttggggcttagaggttgtttgcagtcactcttatgaagaatgctacagcagacaccgtgggttcaaggttatttccttgggaaagacttccagaagtcaaactgctggaaccaaaggctgggacagcaggattttggcatgcatgttattaggatccttctcgtatatgtgtcccagcttgcactcatctggggagggactcagaaaagagggcctcctcccctcacaaccaatagcacccttgagatggcccaggctggcagggttggaaaagtccagctcatctatggtccagttctctggtgggcactgacccttgagccagccacacccacacccacacccacacccatgcctgtggggatcagaggtcaatagatgcagcctccaatggtctgaggctccctgactttcctcccgccttctctccgtgtgtaatcccagcccagggccaccctttggtggcaaacacagacacccctgtgtcagccatacgtattcagccaaggctttatgagtaccttccacttaggaaccctcacttctgtctctgccttcccttgcgattatgagtcccagcaatggcagctgagcactcaggatgcccactcctggctctgactttacgtcactttctcaacacgttacaggtgaagagcctgccaagtggccgagccacgatttggccccagagcccaagttctgttctttccttgggtctctgctgtctgcccaggcctgagcatggtccctcagacaggctcaggaagtatttgtggatgaatcaatgaacgaccccgtgagggcctttgcctttctcccctgccaggctgggagcccccagaagacaagtggggttgaccatgtgcctggaaggagtcacggctcctctctagaccggaactccccactagagcgatggggtgccacagggtatcccagcaggcccggcaagcacatcacaggagcgtggagaagcgggaccagccgtgcccccatccctgggagccctgcccccagccttgtctaaggcctcacttgccccatatctggtttggggagcaggtttctcaccccaatatgattctgttctctgccccctctgccctcctaccccacacatcccagcgtggatggacgagacttcgcccctgcctcctgcccgggcccctgccatgggaaggggacgcattattgctctctctcagggctattcagacaccaactaatttatttccctcctgcccccttccttattgatcaatgctttagctgagtggctgttaaatgacttgttcccatagcaaccatcagatacatgctcggatctgatgtgtctgtttcctgagccagatcgcctcctaagagcttggagagaacaaatctcctttcatatccgtcgctgtcttctgaaaggcacaggatattgttcagaacaagtcattttttaaaacaatattaaaaaaagaactaggtttttcaacagatataaagttgtttcataaggtgcatcattcttaagaagtattaaatcagattttaaaagctttgaccaagttaatctttcttctgcctacttttccttctgcacagggggaagtatggaaacggtctctgcataaagatactctgctgcatcatttataaaaagaaaaattgaaaacagcctaaaagcacaatagacgattcaaatgatctatggttcacatacctgtgagggttttatagagatgctgaaacgctgcttagaagagagaaacacacatgtcaacaacgtgaagtgaaaaaaaagaaacaagattaaaaactgtgtctgcacgggtgagcataatgaatggaaaacaaagctaaattatgtagaggaaaaaatactcaggaaaacaaacacagtgaaatgttgacagaagtgtttcttgttggcagagccatgggattttcttccttattcacttacttaatacatatttattgagcacctactacgagcccagccctgtctgaggcattaacagcacaactgctatttctactgcctatattttcccaaatgtgtttaaaactgttttaaaactatgtatttttttcttatttttgtttgtttgtttgtttgttctgagacaggctcaagtgatcctcccacctcagcctccccagtagctgggactacaggcgtgcactactacaccccactaatttttgtattttttgtagaaacagggtctcgttgtgctgcccaagctagcctcgagctccgggcctcaagcaatccacccacctcagcttcccaagctctgggattacaggtgtgagccaccgtgcccagccaagtataattttttttaatgacagggtacatgtttcacctgccacgttgccaacaaataaacataagacgctctgttggtgaggagaggatataggaacaccagccccgcctggcagaagaatgaatgaccacgaccaataaaggaccagttatcaacacttaaaaccgacatactttttcccagcaattccacctgtagtcattgtccctactgggattctctcccacctttgtcgtgggatgtttacgaagcttgtttaccgtggcatgtgactgctggaaccccgaatggtcctcgccaggggatggctacccagatcgtggttcagactcaggaaaacactgagccctgagaagaacgaggcgatctgccagtgtgtggaacactaagctgaggtccctaagggacagagcaaggcggatcacttgagatcaggaattcgagaccagcctggccaacatggtgaaaccctgtctctactaaacatacaaaaattagccgggcgtggtggcgggcacctgtaatcccagctccttgggaggctgaagcaggagaatcccttgaacctgggaggtggaggttgcagtgagccgagatcatgcccaagatctctgctcttcccccgtcttgccttagtgatcctgggcatgtcccttcacctctgcggcctcagtttctcatctgcacagtgaagatgctgatgcccgcctggctgatgcccgcctggctgcttcctggacagatttcccaggatgtgctgtgtgacaggccttccacacaggccctcaggcaccttttcttcttcctgagatggaaacaacaaaaaagttggtgcatggtcaccagcgatccccaaactacgacctctgccctcttttcctgcagacccctcaaaaatcacgaaaggggcccttgcaatagggggtctctatggactcaaacaaagggctttccctgggaggggctgccggcctttgcctataacatgcgtgatgtagtttttaagactagcaaaagcccagcctggcattatctagcattgaggtacagcgtctcacggaaagttcttttttattccccaggctgtccccttctcctccattcccggataagccttcactcacctctgcacctcaccagcatccactcagagagacccagcccctcaaacccagccagcagggaccacgctgcacattaagtttgctcaactgctccaggttatttgaaaacttatgaaacctttttcttaaaaaaatcaaagtcccattgtgagagggaatccagtactttcttaaaagtactaactcagcagctgcaggaatcttcctgacctaaagaaagaggaaggagaaaaaacacaatcacccctggcttctgacacgcatactcctggctggattctagattagaacaaaggggacataggtcacggagccatttctgtgcctagacaccacctttgattttgcagggtggcgcaccagggcttagccacaagggggtcgtgattcagtgggtatgaactccagtgggggagtgcggggagagacagcaggccagtggtccttcggggaagatgcgggagggggttcttttttaatttttctggtctgttccacataactgaatgccagggacccaacctggatgggtagggggtgccaggtgcagacctgactctgcactaggaaggaatgcttgtcaccaccggcaggcatgtgtgcttctcagcccgtcccagaggacaatcccgaaccactgatccaaagccttaaaaccctgcagaacttttgacccaggccccactgctaggaatgaataacatagtaaagataggtgggacgattgagctaccagcgtgtttatgactaccacgttttcagcaggtgaagtgcaaagtgcctaatgttcacaagaggggctgagttgagcaaaagcaaatttcagttcagccataccctaaaatatgaatacaaatattgccgtggctaataccatgaaaactyagtctcatcaaaccgtctagcagattacaagcactctggacagtatgttactatgcagagacataggaaaatgtctacgaagaaatacaccaaaatgttaatgacagtcatctctgagtgacttctctttgttaatatctctgcatgttctgatgtttcccacaataaactgatgtatcttttgttgatttcagagcgtggccttgaggatgttccttcacctctctgagcttcaggctcctcacctgtacaatgaagacagcacctgcctcatggatttgctaatatatgcaaaatgcatagcttgctgcctggaagataataagtacccaaatgttagctgtttttatttttcgctcaattttctacatataaacatgtcattgtgctccgtgctggggatatggcagtgacagctaaactccagaagagaaagattaaaccaacactcacagacgattaatccgctgccgtgaggaccaatgatgtattcattacagttagggatgctgtggtggggggcacgttgagagcatttatcaggggaactttgttgagagttttgatcattatcttaagagcaacaggaagcctgacattgaaggcttcaagcagagctgtgaaatcagaagttcatggtttaagaactcaccatatccacaccgtggactgagaggggccccagggaggtgccttcccaggaggctgctgtgggggtgcgaaccacggaggaagtgctgccacggcagatggggcgaagtggacagaccccagccccttcaggaggtgcagtttgcaaaatctggacacagtgatgcctcggaggggcttgtggcgggatggtsgggtgaccccagacctctagtctgatgtagtgcgccgatggttcctggatacagaggactcagtggggagcaggtctggggcgttgcggagtgtgtctaggggagtgtgtctggggacatgctggttttgggttgcctgggcgggggaggagggtgtccaaggggatgtcctggaagcagagcagtctgtggtcgctttgaactcgggatccgcgagaccccaggggttcacctccattgcatccgggagagacaccggttaggggatgcaggactccccagcgctgggagcgcgaggcctatctaaaggccagacgttctcagagtccgaggctcgggtacaggtgttgcgcctccgacgtggaggggcgcggggctgggagcccaagccaggtgcgcgggtggcctcgctggtacacgaggcggctcggtctcagagggtcagtgggggccggaccctcagcgttggtggccgctttcctctagggtgggcgtatggccgcctcccccaggcagtcctcctgccttgcccgcgaggccagctcaaaagcctttatgcccgggccgcccgccaggggcgcccttcccagcccgcgctcgcccgctctgcctcgcccacgctcgcccccacccctgccctgagccctgcatccygggmagccccctctgcaggtactcactaaacatcgtggaatgagggaaacagagacccggagagaggagcgcggggagaagagagcccacgatgttcccagcccttctcycagtgagatcatgagtcattttatgttccagcgtctatgcttcaacaccttccagattttcctccgtgagctggcatctcctccgtgagctggtggagtcagaaaccagcatttttctatcactgtttctgaagatgtgctgaatacgaaccaaagaccagggcgctccggggaggggaccgggcgggctctagctttgcgaggtgccagggggtgttggtaggggccgtgcctgctgctcccccagcgtggggcggtcctggcggttttctgcttgcctcctgggctcccagacagcttcctccagcccagcttccctggccctagaaggagtaagcaggcaatccctgggatttgcttaaaccacccacacccccaaaaatgtgtgtccccctttactgggaacgtgtttacagctgtgttatgtgggggtgtgtcccatgcccagcgtgggcccctggtggtgagtagtgttgggtacagctgggagcctggactccacctcagctctgtccctggtatgtccagggccatgcccgagcctccttttccttgaatgggactcaccaggtacatctccaaaggaggttgtgagcattaagtatccaggacttgccagggtgctggcacacagtaagcgctcaataagtgctggctactgtgagaataacgtgaagggaactggatggggtgctgggccttgctttccccagttgcccatactctggccctgtgtggcttcctcctttggcccggccagcgtggatgtggttgaggatgacatatgtctgtggaaggccagctgacaggctctgggacagccatgacaagttaatgaattccgctgtggttactaaggcacatgtctgggmcacgaggacttctgtctgccgcactgacctttaaaagagcgcctctaatacccaccaatcactcatgctctgattgaacattcagaagatgaaacctgtctgagctgagagtgatcastcatccctgccgccccgtcactgtcactcctttctgaatcataataaaactttgcaaaactctttggttcactcagcagcctttgctgtgaagacgggggcactttctgacatacctggcggtgagggccagccccgtacgctccttcacccaccccagcccacaccgggcaccccttgtggggagggggttccagccctgcctgcgtacatagcctttattttaatcctttaataaccttctcgttcagctttccatctatccattgaraaaacatttatcaaggatcacctcagtttaaatgtctttggccacaaggaacataaaacctgtctcaagctaaaaccataaaaacatggatcatttcatctaacaggaagtctagaagtggaatggggttcagggtgtgtggtagctgggtgtggtcctcaaagaccctggtgccttccatctctctgctctgttttcctacctctctacctcagcgctggcttcaaatgcaaaatggaaccaagatggtggccagcactccactgtagctggccccgacacctctctcagtgactctttctctttgggagtaacgaatcctaaattcagtcactcttattctggcacctaagattgtatgggtagcccctctccagagagtgccctagatgctacacccaggggcatgaccttgaccttcccatcaatcagccaacagtcagatttcatctagctgccagcttttttagtgaagttctttattctgcaaagatatttagttttctttttgattagctcttattttaattcccgccttagaggtctatattttgtttctttatcttagtggtaatgactgttagtgttaggtgcttccaaataaagcataattgattttgttaattgatatttacaattagccagttctgattcctttttttttttttttttgagagggagtcttcctctgttgcccaggctggaatgtagtgccatgatcttggctcactgcacttcctcctcctgggttcaagtgattctcctacctcagcctcccaagtagctgggtctaccagcgtgcgccaccatgcttggctaatttttgatatttttagtagatgaagggtttcgccatgttggccaggctggtcttgaactcctgacctcaagtaatttgcccgcctgggcctcccaaagtgctgagattacaggcgtgagccacctcgcccagccaccagtctgattcttaacaaaagttcataatgaattattatttcagaaatttaaatcaatttgttttagaaacttaaaaacaatggttaggttttttgtttttgtttttgtttttgttttgagaccgagtctcactctgttgccaggctggagtgcagtcacatgatctcggctcactgcaacctccgcctcctagattcaagsgattctcccacctcagcttcctgagttactgggattacaggcccccgccaccatgcccagctaatttttgtatttttagtagagacagggtttccccatgttggccaggatggtctcgatatcttgacctcccaaagtgctgggattaacaggcatgagtcaccacgcccagccaggtttttttaaaataggaatttaacatactttaagcaaatcaatacattaatgagggactatcagcatttacagcaccaggaaatctatcttttaaaaaggttcattattatacatgtgtgtagataatagtcacattgcatgccattttcagcaatttaattcctgaattaaatgaaaatcaacactttaatacatcctattttatttagtccatgcttcaatttttttatttttgtttatttttaaacttttaataatgcagacagcctttttaaaatcaatcttcagaagctgtaaaggcctctggtctccttaagcatttcatatccaaattgatgtacttttacagatatttttatgttctctgtaattgacaatattttaattaagactggaaagttatagtcacaagacaaccaataattccccccaaaagtctaagtcgttagttaggcaacataatgagaactatcacacattgggattcgtgtgctcctgacaattatcccttttctgccttaaagtcttatttggatgggagaattatccagagaggcaagggcgccaagtggccggcaccacctcaccacgcaatgtgctttttgcccagaaaaaaaagctgtgaccttttctaagcatccacaagcacgaattaagaaacaaagttcttggctaagatcgattgccccagtatccgatggagcccaaggagctggttacaaggtccagcgattacaacctaaagccgaaatgactcacgtaattgcagaatcgctcattctaacagcctgattggaaattgtcaacactgtgtctgggactaatgaagcaaaggaaatggaaaaggtgacattttcaaataatattattagtaaacgaattgacaacatgtcagatgacaaagatgacaccaatccaaagtcttattaagtcaaaagaagttttcattgcagattgatgaatctatatattaatacattactaattgggctcagttaatagcactaattcgaatcccaaaagaaaaaggctggggaggacactgtttgttcttttgagtagtcccaaaacaaattactgggaatgaaccattcaaactggacaattaatacttcragacacatagctcatggtggaggccctgctgtgttgcatacagatgtggctgtaatgatggaaggaataacagctctccaccaagagtttgttctagaaaaccctgagatgccagtaatgcatggcattattcacagcctctggtatagaaagtttgcgtgcagatctgacatccacgttaaattacatgatcaaatgactgactctaataaaatccaagctgtgacagaaccgtctgtttcaatgttatgtgaaaaaaaaaagtgtcatcagaatactgggctcggctgttccatgccaaagtggctgtccaaagaatgagacttgtcgagagcttaagagctaagagaagaaatgggggtggaaaagtgtaaatgattctcacttagcttctcactcggcttcaaaaaatgatgtacttaacttgacatttttgagcacctgaatgaacttaattggaaattgcaaggactgtcaggccgagctgtccttccaccattcgggctatgaaaagccgtttcaaatgtgcaagaacccaggaaatattgtactcacaagcccttcccaagaaagctaccagaaggctggtggagaacattaaatatgtataattgtaggtctcagactaacagaaaaacagagaccagagtagaagaataatagataactattatatgttctgacaaaatagaaataatgaacttaaaatgggaggaaaaaaagagagaaaggggaaacagaacaaactcatggattgtcacataaataataggtggcagacaaaggatgtcacttcatgctgacaaaccaaatactattagtttgcactgtgtgaaactgacaatatctgaccatcttttccctacaaaaatgctaatcctatattgctcaagctaattaaacattacaaaggatattagaataaagacagtcactcaatcaaaaacgcaaacatgtctaaattgcaaaagaaatgtaaaaacaaaaacacactacaatgtaggtaaaccatgaaaatactatgcttagtgaaataagtcaggcataaaatgacaaatgtctgatttcacttatataaagtacttagaacaggcaaattcatagagacagaaaatagaatagaggttactatgagctgtggggaaaggggagatggggagttattgcttaatgggtacagagtttctgtttgtggtaataaactattttggaaataatggtgatagttgcaaaacaacctaaatgtacttaacaccactgaattatacacttaaaaatggttaaaatgataaattttatattatgtgtgttttaccatatgtttgaaaactaatgtaataaaccaaaaaccactgacttgtacactttaaatgggtgaattgtatggtatgtgaagtaaatctcaaagctgctttttaaaaacataacaacacagaaataaaggaagttatgctttaaaaaaaataagagcaaggaaaacagacaacattaaatattgagaaagaaacaataaatattatatamaataacatagtagaatggagaccagcatatcagttatagcagtaacatgaataggtttaactcacttactaaaagaaaaagattttcaaattggcttacatagcaagccaacactctaaacacagagatttagactgaaaatgaggaaaatggccacaaacaagcagggatttgactctgcttatttatggccatcatttttcagacaaggtagaattcaggccagaaagcatcaagcgtgaaaaagatgttacattattaggccagtggaaattgaacagttaagaatacctgtgtggcaagaagcacagcaaccactttataaagcaaaagctacaggaaatataagaagaaatagacaaaaacatactactaataggagacttatacactgctcctagtcaaatgaacaacaacaaaaaagcaaggttatggagtaactgaacagtataatcaataaggaagatcttctggttatgtgtaaaattcatatcacaacaaacaaagatataccttgttctcagatatgcatagaacattcaccaaaataaacacacacacagatcacaatactcttcataaagtagaaattatacaaataatccttgttggttayagtacattaaaactagacattaaaaactaattcaaaaagcaaattttttgcctgaaaatttaaaatctctctcaaataactgtcagctgaaagttaaaatacaaatggaaattgcagagctttttttaaaaaaatataatggcaatgctacatatcggcattttggggatactgtaagatggttatcaaagaaaaattcataacctcaaatactcatatcagtaacaaagataagtgaactaactttccaattcaaaaaaattagaaagttaacaaagtaaaccaaaagaatgtgcaatagggaaataacagagataaaagtagcaggaaggtaaaatgatacagccaatttgggaaaacagtctggcagttcctcaaaaagttaaacaaaaaaaaaaaaaattaccatatgacccaacaattctgctcctaggaatataccccaaagaaatgaaagcatatgtccacacagaaacttgtacatgaattattcatgatgcccaaaagatagaaacaacccaaatgtccttcaatggatgatggataaacaaaatgtggtctatccatacaagggaacatcactcagccataaaaaggaacaaagtgctgatacctgctacaacttggatgtacctcaagaatgttaagtgaaagtagccagacacacaaggtcacatattgcctggtttcttttatgtgatatatgcagattagacaaatccacggaaacagaaagcagcttttctaggaaagtacaatttaccgaaattgatcccagtaaagataagaagttgaagccatctagttccagaaaagaaatagagaaaattgtaaatatatgtaaaaagaaatagaataaaacagaagccaacaaaattggttaactataagagtagacaccttaaatacaaatttgtaaatgctcacctccactcatagtaagggaaaggaaagaaaatgagacttctctgtaccttttttaactattttgacttttaaatcatgttaatatattatacatttataaaataaaattaaataagatttgggggaacacactgaaatcaacagaaacaagcggagataactgtatatcagtttgatatcatgaccgcatagaagaaaatgataataactacaaacactttttgaacacatcgatctgtttgtgtagaagaagaacttaaagaaatcctggactttattgaaaaatttgctgttggtagtggatttggggctgcagtccctaaactattttctgttcattgtaagattgagcaaaaagtaaatatatggatgttattgaaaagcagggttcttttggagagaagggggattcaaaaatgaaacgggaggaggggaagaacttcaagatgttggaatgacattagaagtactggtatgaaataatttttgagtatttactttttatctgtctccactaaactgtcctagaagctgtttaataggcctggggcaagggaagtaaaaaatatttgtgccagaaagtaaggaagcactcaaaactgctagagacatgwcaaaagttttcaagaacacttgaagaggctatcgtctggaaaatttgtaaaaatgttatcctcaakgtactataatgcattaaattttaaaaagaaattctgaagggcagtgggattctgactctagccatgacagaatgacttgtagagctaatcctcttactgacaacaactgcaaaagatagttaaaacggccgggcgcggtgsctcacgcctgtaatcccagcactttgggaggccaagttaggcggatcacgaggtcaggagatcgagaccatcctggctaacacggtgataccccgtctctactaaaaatataaaaaattagccgggagtgktggygggcgcctgtagtcccagctactcgggaggctgaggcaggagaacggcgtgaacccgggaggcggagcttgcagtgagccgagtagagatcgcgctgctgcactccagcctgggggacagagcgagactctgtctcaaaaaaaaaaaaaaaaaagatacgtaaaacatataagacaattatatgaaggcattagagaccagccaaggccaacagaacttgaagggttatgaacactgagagaaggtaagtacatgacatacatttcacaaatatcctcacattttccataagggcattttctacttcccaattcagaaaaacaaagtccaagaagaaagcagaagtctttgcaagtttaggagacagaagttggagtttagagctgcctaaccatctgggacttaggggataaaattctgaggtggtgggaaccatgaggaagtaagcataaaactctctgtacaattcaaaytagagttttataactagagtgttaaacgtaatcaccacagtaaccacaaataaaatagctaaataatataccaaaaaaatggaaatgagaaagaagtttaagtgtgtcgtcaagacgaaaaagaaacgaaggtaataagggacaaaagagctacgaggcttagagaaaacaaatagcaaataacaaaatgacggaaataagttcttccttcttggaaactactttaaatgtaaatggattaaactctccaatcaaaagtgattggcagagtggatttaaaaagcacgatccaactatatgctgtccacaaaaggctcactttccatccaaagacagaaataggctgaaagtgaagaatgtaaagatattccatgaaaataataaccaaaagagaccagtaatagctatactaatatcagacaaaatagattttaaatcaaaaaagcttataagagacagaaaaagacttatatattagtaaaccattccatacagaaagatgacataaacagttataaacattttcacaactggtatataaagcatcaaatatgtagagcaaaaactgacaaaactgaagaaagaaatagatctataacaatagttggacaattcaatatcccatttttaataatggatagaacaatcagacggaagataagtaaggaaatataggacttgaacaacacaataaaccaattaaatctaatagacatgtacagaacrctgtgcccaataacagtatacacattcttctcaagtgttcacgagatatgttccaggataaaatatatgttagactacaaattatgccttaattaattttaaaagataaatataatacaaagtgtcttctctgaccacaacagaatgaagttagtaatcagtcacaaaaggaaaactggaaatttcaaaaatttgtggaaattgaacaacacactcttaaacagccaatggatcaaaggaaaataacaagagaagttagaaaatacttagagatgaatgaaaacagaaacaaaacacaccaaaacgtatgtaacacagcaaaatcagtcctaacagagaaatttatacctataaatcttcctttaaaaattaagaaagatctcatatcaacaacctaaatttacaacttaaggaactagaaaaatgaaaacaaactaagcccaaagctagcagaatgaggaaaataataaagatttaaaaatttttaaagaaaaataataaagaaaatcaacaaaaccaaaagttagctcctcaaaaagatcaacaaaattgacaattctttagctagatagacaaaaaaaaaaggagggagagcaagagcactcaaattattgaagtcagaaataatttctaaattactgggagtattactacaaattctacagaaataaataggattgtaagagagcactatgaataattgtacatcaacaagttagataacctagatgatatagacaaatgtctagaaacccaaaacctgacaagactaaaatgtgagaaaatggaaaatctgaataaacgtataactggaaaggagatttaagcagtaatttaaaatcttctgacaaagaaaaactctggacatgatggcttcctaagtgaattctaaaaaacatttaaagatgaacaaataccaattcttctcaaacattactaaaaaattgaagagaacactcccaaacttattctatgaggccatcatatgctgatatcaaagccagacaaagataccacaagaaaactacagaccaagattccttagaaaattatgcaaatttcctcaacaaaatactagcaaactgaattcagcaacatattaaaagaattatacagcataaccaagttgtatttattcctgaaatgcaaagacatttcaacatataaaaatcaatcaatataatacaccacactaactaaaagggggaaaaaaagacacggtcatcctaactgatatagaaaaagccttgtataaaactgaacacattttcatgttaaaaacactcaacaagtcagaaattgaaggaaattgccttaatgtaataaaatccatatatgaaaaacccacagtaaacatcaaattcagtagtgaaggactgaaagcttttcctctaagatcaggagtaaggtaaggatgctactgttaccacttctattcaacatagtactggaagtcctaactagaacaactgggcaagaaaaaaaggaatccaaattggaaataaagaggcaaaattatccctgttcacagatgaattgtatgtagaaaactctaaagattccaccaagaaaaatatctattatagcactaataacaaattcagcaaagtaacaggatacagggtcaacaagcaaaaattagggcatttctgtacactgtcattgaacaatccaaaaaggaaattaagaaaataatttcattaatggcatcaaaaagagtaaaattcttaagaattaacttaaccaaaggataaaagatatgtacaatgaaaactataaaatattgctgaaaggaattaaagaagacataaataagtggaaaaacatcccatgttcatggattggaaggcttaatgttgtcaggatgtcagtactactcaaaataatctacagattcaaggcaatcctgatcaaaatcccattaatgtttttgcagaaatagaaaaagtcatcctacaatttatgtggaagttcaagggatccctaatagccaaagcaatcctgaaaggaaaaaaaagaacaacaaagatggaggaataacacttcttgatttcaaaatttgatacaaagctatagtaatcagaacagagtggtactgacataaagacagacatgtagaccaatggaatagaacaaagagtccaaaagctttgcatatatggtcaaattattttctacaaggatgccaagaccactcaatggggtaaaggcagtcttttcaacaagtgatgctaggagaactagatacacacatgcaaaagaatgaagttgaacccttacctgaaaccacatacaaaaattaactcaaaatggattaaagccctaaacataagacctaaaattatgaaactcctagaaaaaacatagggcaaaatcttcataacattggatttggcagtaattttttggatgtcataccaaaagtacaggcaacaaaagaaaaaaatagaaaaaattgactttatgaaaattgaaaaattttatgcatcaaaagacataatcaacagagtaaaaagaaaatctacattacagagaaaatacacaaaactctttaaactcaacaccaaaaaacaaacaacctgattcaaaattgagcaaggatttgaatagacatttctctaagaagtccacaaatggccaataagcacagggaaagatgttcagcatcactaatcattagagaaatgcaagtcaaagacctcacacccattaggatggctatttaaaaaaaaaaaaaaaaaaaaaaaaacagaaaataaaagtgttgacaaggatatagagtgattagagcctttgtacactgttggtgggaatgcaaaattatatagccactgtggaaaataatatagctgtccctcaaaacattaataatagaattaccatttgatccagcaattccacttctgggtatatacccaaaataattggaagtaggttctcacagagatatttttacagccatacaaatagtaccattattcacaatagctaaaacatggtagcaactcaagtgttcattgattaatgaatgaatgaatgaatgaatgaatgagcaaaatgcattttatatattactggaatattgtttgactttttaaagaaaataaattctgacatacgccacagcatggatgaagcttgagtgcattgtactaagtgaaataaaccaatcacacaaagccagtcacagaccataccttaggagtaaggggaaactgaaataggccaaacctaacagagcttaaaactaatgctcagcaagatcaaggtggcctgttactctgcatgccagaagaaaaagttagctctctcaggaggaaaataacgttgtccatagtctcttcatatttacacttataagggctgacatccaaacaaaaattatgaagcatgctgaaaagtggggcagggttctgggagggwaacaaaatggctaaaaaccaagagatgaaaacaaacaatagaaacagacccacaggtgatttagatagttgatctatcagtgaagaaattttaaaataactatgattactatgttcaagaaaacagataaattcactaaggacttggagtttataatcttacaatattctaatgggaattctaaaaatgaaaaatattagaagaaaaaattaatagatggtagtaggagcaaaaggaaagagaaaatccagattgaatcacagaaataaaaaatctaatgagattggagactattattctaagtgaagtaactaaggaatggaaaaccaaatatcataggttctcactgatatgtgggagctgagctatgaggatgcaaaggcataggaatgatacaatggactttgggtacgtgggggtaagagtgggagggggacaagggataaaagactacaaatgtgatacaatatatactgctcaggtgatgggtgcaccaaaatctcacaaatcaccacgaaagaacttagtcatgtaaccaaataaaaactgtacctcaataacttatggaagaataaaaaataaaaaaactaatggagagagtgtctcatacacacagaacagactgcagcctcaagatattcataaccagagatgattgaaactaactagaccaacaacccgcaactgacccagttcctaatcagttcttaatcctatcttctttgtggccttgtcaaaaattagttgattgtacatgcttaggtttatttctgggctctctattctattccattggtctgtatgtgttttttataccagtattatactgttttgatactattgctttgtaatataatttaaaatcaggaagtatgatgcctctggctctgtttttctttatatatatacacacacacacacayacacasatatatgaaaagaatatgtatacacacagttttttagttttaattgacaaataatgatggtgtatattaatggagtacaatgtgatattttgtgacacgtatacattgtgaaatgataaaaatcaggctaactaacatatctgacatctaactttttttttttttttgagacaggctctcactctttcacccaggctggagtgcagtggtgcaatcatggcttaccgcagcctcaacctcccaagctcaagcaatactcctgccttagcctccagagtagctgggattataatgccaccatgtctggctatttaaaaaaaaaattgtagtgtctcactgtgttacccaggctggtctcaaattcctgggcttaagcaatcctcctgtctcggcctccagagtagctgggactacaggcacatgtcaccatgggtggctatatttttttaatttttttgtagagatggggtctcactgtgttacccaagctggtctcaaacttctggactcaagcaatccttccacctcagcctcgcaaagttctgggattacacgtgtgagatgccacacccagccattatctttcattctgttaacgtggtatatcacattgattgttttgcacatgttaaaacaattttgcatcccatgaaagatcccacttggtcatggtatatactctttttgatgtgttgtcgaatttggttggctagtatttcattgaggaattttgcatctatgttcatcagagatattggaatgagaaagacaatcactaacactgaaatgatatcgatgttgggattctccaacaaggatttaaagtggttcatcataatgtgcaattataaacatgcttgaaacagatgaaaacatataaagtctcaacaaagaaatagaaaatataaagaagaaccaaatggaaattcaaggattagaaagtataataagccaaaatgtaagaactcactgaatgggatcaacagcataatagagaggacagagggaaaaaaatcagtgaacttgaagatagaatagaaatcagtaaatcttaacagagagaaaatggaatgaaaaatatgaatagaacttcaaggacctatgcaatgataacagaaggtctaatggtctaagcgttagagttccagaagaaaaaaagaaagaggatggggctaaaaactattggaagaaataatgatggaaactttctcaaatttggcaagaaacataaatctacaaattaaaggagatcaaactccatacaggataaatgcagaaaaatccacaccaaaatgcatcataatcaaacttcagaaaactaacaacaaagaaaaaaatcttcacacactgagaaatgacacataacctacaggggaaaaccattcgaatgacagtggatttttcatcagaaaccatggaggctataaggaagttatgtgatatttttcaagagaaaataactgtcaacctttaattctacatggagcaaaactgtcctttaggaatgaaagagaaacaaaacattgtaacatgaaagaaaactaagagaatttgatgccagaagatcaaccctaatgggctggccaaaggaagttcttgaaacagaaagtgataaaagaagtaaccttggaacatcgsggggagaaaagggaagaatataaggagcaaaaaatgggtaaayacaaaagagtttccttctcttttgagttttctaatttatatttgatagtcaaaccaaaaagtataacagtgcctgatgcagacatcaatgaatagagagaaaatgttaaggcaattctattataaacaggggaggtaaagaatgcaaagggaagaaggttttacatttcactcaagctagtaaaatgttggctccgacagatctttgtggtatgaaataggtctgtaacttgattgcagtagtrgttacatgaatctacatatgccataaaatggtatagagctatacacacacatgacaccaaatgtcagtatcttggttttgattttgcactataattatataaagtgtaactattgaagaaattggataaagagtrcatggatctctctgtgctatctttgcaacttacagtaaatctataattatttcaaaataaaaaggttttttttaaaatatgaggtaaaataaagacatttttagaaaaaacaaaatctaaatcatcaccaacaaaccagcaatacaagaaatacttaagcaaattaatagccccagatgggaacacagaatcatgaaaaagaatgaagagtatgggaaagagttaataagtgggtaaatatgtatttacattatttataaataatgtatgtcaactatttgagacaaaaatattaaggtgytatgtgatcataaaaatgaagcaaaaatatatgaaaattaacataaagagcagaaggggagccaggcaccgtgcactcacctgtattcccagctacttgggaggctgaggcaggaggatagcataagcccaggagttccaggctatagtgtgctatgatcatgtctgtgaatagcctctgcactccagcctggacaatgtagtgagactccatctctttaaaaaaaagtgaaaggggataaataaagttaaatttttgtaagattctcgcactctttgggaagtgataaaagcactaacttaaggtaaactataataagtcaagaatgcacattgaaatcttttgtctttggaatccactaaaaatgatataaaaatgtctgcctaaagatctgatagatctaatgtactgattacttctatctgattacttctaaataagacaggaaaagtcaaataaggaacaaataacagctggaacacacagaagacatagtagtagaatggtagacttaaacccaactacatcagttaatttttattaaatgtaatgaaataaacattgtctggataaaaatcaacacccaactgcatgctgtttaccatgtccgcactttatatataaggactgaatgacacagaaaggttgaaagtgaaaggatgggagaagaaaaaccatgctgttgctaaccaaaaggaaactggaatgactacaatatcacagcacaaagttaacattaaggccagaagtattactagaaacaaaggtattccatgattattaaagaatcgattcaacaggaaaacattaaaaattctaaaataggtcaaagaagaaatagcaggggaaattataaaatactttgaaatgaaaatgaagatacaacataccaaactcatggggtgcttagaggaaaatgtatagctctaaatctatttataaaaagaaaaaagaagtcaaataacctgccaccttaagacactgaaaaaagaaacacaaactaagcctagagcaagcagaagaaagacaataaagattaaagaagaaactaatgaaatggagatagaaaatcaatagaaaaaatatcaacaaaaccaaaagttagttctttgaaaagattaataaaattggcaaattcttactcgactagccaaagaagggataaatttcaaattactaaaatcagaaatgaaagagagtgcatgactgttagccttagtagaagtaaaagaactrtaaaggaatactacaaaaaactatatgccaataaattagacacattggataaaattgaaatttttctaaaaagatgcagactaacaaaatagactacagaagaaatagaaaatctgactagacctataacaagttaggagatttaattagtcatgaaaaaatgtcaccaacaaggaaaagccaagacttaggtgacttcactggtgaattccaccaaacatttaaagaattagtgccaattcttcacaaactctttagaaaaatagaagaggagagaaaactacctaattcattctatgaaattaatattcccctgataaccagaaaaatacatcacaagataaacaactacagacccctatatcttgtgactacagatgcaaaatccctccacaaaatactaacaaacaaaattcatcacctaaaaaaaggatcccaccataaccaagtgggatttaccacaggaatgcaaggttgatttaattaattaattaagaaattaattgatataaaacaccatatcaatagaatttttaataacacaaaaactacagtattatctcaatagatgcaggaagactgtytgacaaaaatccagcaccctttcatgattaaaaaaacacacacacacacacttaacaaactaggaatagaagagaacgtttcatagatactctttgaggggtcctcaatctgacaagcatctatgaaagcatctatgaaaaacccaactcatactattggctaatatcacactgaatggtgaaaggctggatgcttttccctaagatcagaaatgagacaagaatattcactcttgtcacttctgtttaacatagcacaggacattgtagccagggaaactaggtaagaaaaataaataaaaggcatccagattagaaaggaagaagtaaaacaatctctatttgcagatgacatgatctcatatgtagaaaatctaaggaattcattgaaaatttgtcagaactaataaatatctccagcatctttaagattaacagggtytaatttgtgaattatgtctttcatcaattttgaaaaaattattgagcagtatcacttcaaacatcacttcttccccacccctctctaggacttcaactaaatgtcatacctttcattctttctcacgtgcttctaatgttccttctatattttcctctttttttccctctatatgtttcaattttaatacattctattggtctgttatctatttcattaattctgtcattggctttgtctaattctttgttaaatccttctagagagttcttatatttcaggtactgtattttttatttatagaatgcttgtttgattctttttatggatttcaattctctcttgaaattcaccaacttttcacgggttttctccatcttctttctgttttcttgagcatattaatcatggttaccttaaaactgctatctgctacctccagtatctagatcaattttgattcattttttgttgggtttttgtcttggatctcagttatttataatagctctctattataaataatgtcctcatcattatacctatacatgcctatcatgtttgggcatttggggtggtcctagttggcttgcttccacaggggtgacttctccctttctgcttgatttgcaccaaagatgagtcttagttgctgtctrrtgcacaagcagttttttctggcaccactcttctcttctaagactgattgtgggaggagactagtggcatgaaccagatacagtcaggggtcagatgaatgactgaccaggagggtcttcatctagagaccattctcaggatttggaagattgctccccctttcttatacgtgcatctagtccgcatcagtttccaagtgtttctttcataagacaatgccaggtggcattgtctcctggaaatccctgggttggaaatccccaggtcaggctgcatcatgttgctaagtgacatgtattagccctgtgagatgcttaagtgggccttatggctaccattaatctgatagccatgatatgcctcttacagtatactataatctttgtttaatatgatcttatttttctagtttaaggtggaagaagaggttattgatttgagaattatcactggtaatttatgtttattgctacaattccccayccccactgtggtgcttttacagcatcccacaaatctaatatgttgtgtttttatttgcattaagtttccaatattttctaatgtctgttttgataccttctttgatctatgaattatttacaagtatgttgtttagtttccaattataagggggttttccaaggattcttctgctactgatttctagtttaattccactgtggtgaaacagcacacagacatttcgcatttcattgcactttgcttcattgagattcacagatcttgtgttgtttacaaattgaaggtttgtggcaaccctgcatcaagcaactctatcagcacaatttttccaactgcatgtgcttgcttcaagtctctgtgtcacatttcagtaatcctcacaatatttcagaatttttcattattattatatctattttgttgacctgtaatcagcgatcttttatgttaccattttaattattttgggggcaccacaaactgcatccgtgtaaaacagcgaacttaatcgataactgttgcgtgttctgactgctccaccgaccagccatactcccatctctccccctctccttgtgtcgctctattccctgagacacaamagtattgaaattcagtcaattaataaccctacaatggcctttaagtgttcaagggacagaaagaatcacacatctctcattttaaatcaaaagctagaaataattaagcttagtgaggaagatatgtcaaaaaccgagataggctgaaacttaggctcttgcatcagaaacagccaagttgtggaggcaaaggaaaagctcatgaaagaaactgaaagtgctactccagtgaacacacaaaggataagacagtgaaacaggcttattgctgatatgaagaaagttttagtgttgtgagtaaataaaaccagccacaacattcccttaagacaaagcctaatccagagcaaagccctacctctcttcaattttatgaaggctgagagaggtgaggaagcagcagaagacaagttggaaaccagcagaggttggttcatgaggtataaggaaagaagccatctccataacataaaagtgcaaagtgaggcagcaagtgctgatgtagaagctgcagcaagttattcagaagacctagctaagatcattaatgaaggcagctagattaaacaacagattttcaatstaaatgaaacggccttatatyggcagaagatgccatctagaactttcatagctacagaagagaagtcaatgctggcttgaaacatcaaaggacacgctgacactcttggcaggggctaatgcagctggtgactttgagttgaatccggtgttcatttaccattctgcaaatcctagggaattatgctaaatctactctgcatgtgttctctagatggaacaacaaaacctggatgacagcacgtttacagcatggcttactgaatactttaaagccactcttgagacccatgctcaaatttctctcaaaatattactgttcatgacagtgcctgtagtcaaccaacagctctgatggaggtgtacaaggagattaatgtttttatgcctgctaggacaacgtccattctgcagcccatgagtcaaagcgtaattctgactttcaagtcttgttatttaagaaacacgtttcataacactatagctgccgtaggtatgcttcccctgatggagctaggcaaagtaaattgaaaactttctggaaagaattcacaattctagatgccattaagaacatttgtgattcatgggaagaggtcaaaatagcagcattaacaggagtctgggcgggcacagtggctcgtgcttgtaatcccagcattttgggaggctgaggagggcggatggcttgagtccaggagtttgagaccagcctggacaacatggtaaaaccccatctctactaaaaatgcaaaaattagctggctatggtgccgtgcacctgtagtcccagctactttgggggctgagatgggaggattacctgagcccagaagtcgaggctgcagtgagccaagatcacaccactgacctccagcctgggtgacaaagtgagaccttgtctcaaaataaaacaagagtttggaagacgttggtcccgaccctcatggataactttgaggggttcgagacatcagtagaggaaggaactgcagatatgatagaaatagcaagagaaccagaattataagtggagcctaaagatgtgactggattgctacgatctcatgagaaaacttgaacagatgaggagttggttcttatggctgagcaaataaagtggtttcttgaaatggaataactcctggtgaagatgctgtgaacactgttgaaatgacaacagaggatttagaatattccataaacccagttgataaaacagtggcaggctttgagaggactgactccaattttgaaagttctactgtgggtaaaatgctgccaaatagcatcacaagctacagagaaatctttcatgaaaggaaaagtccatcaatgtgacaaacttcattcttgtttcatattaagaaattgggccaggcacaatggctcatgcctgtaatcctaacactttgggaggccaagtggggaatatcacttgaggccaggagttccagaccagcctggacaataaaaagagaccttgactctacaaaaaaattaaagaaatcagccagacacagtggcacatgcctgtagtcccagttactcaggaggctaaggtgggaggatcccttgaacccaggagtttgaggttgcagtgaactatgattgtgccactgcatgctagcctgggtaaagagtgagaccctatctcaaaaaaaaagaaagaaagaaattgccacaaccactgccagtaaccaccaccctgatcagtcaacagccatcaacatcaaggtaagatcctccaccagcaaaaagactatgacttgctgaaggctcagatgatagttagcatttttagcaatgaagtattttgaattaagatatgtacattgctttttagatatcatgctattgcacacttgaaagctacagaatagggtaaacatacttttatttgttcagggaaaccaaaaaaatcatgtgactcactttattgcaatatccattttattgtggtgatctggaaccaaacccacaatacctcagaggtatgcctgtattgatatgacttgaatcattttaaatatgttgagatttgttttatagctcacaatatagtcaaatatggtaaacattctgtatttttaaaaaagtgtgtcctcctgttgttgagtagagtgtcctataaatgtcaattagttcaagttatcaatagcattgttcaagttttcatattcatactgactttctatctaattgctctcaaaaattattgaaaaagaggtattgaaatctctgattttcactgtgtctatttctccttctggttctatcagattttcttcatgcattttagagctcttttgttaggtgcattaacatttagaattgtttttgttctcttggtgaattgaaatctttatcattatgaaattggcttcctagccatttgtggtggcccacacctgtaatcctagcactttgggaggctggggtgggtggaacactttgagctcaggagttcaaggtcagcctggacaacatggagaaaccctgtctctacaaaaaatacaaaaatgagccaggcatggtggcttatgcctgtggtcccagctactcaggaggctaaggttggaggatcacttggctcgggaagcggaggttgcagtgagccgagatggcaacactgcactccagcctgggtgacagagcgagaccctgtctcaaaaaaaaaaaaaaaaaaagaaagaaaagaaaagaggagagagagagagagagaaagaaattagtgtccttatccttggtaaaaatcttctgccttaaatctttttttatattaatccagttattccaggcttattttgaatagtgttagcatggcatactgcttttcattctcttacttttcatctatttctgtatttaaagtgcattttgagccaggtgtggtagtgcacgcctgtagtcccagtactcaggagactgaagtgggaggattgtttgagtccaggagttcaaggccagcctgggcaacatagtgagaacctgtctttaattaattaaaattttgaaataattgactaaaaataaaataaagtgcattttgtatagacaggagatgcttggctcacttttttatccagcctgtaacttttaattggaagtttagataatttatatctaatgtatttataattttgattagacttaagcttatcctgctatttgttttccattagttctatctgttctctgttatctttatcctcttttcagccttcttttggattacttgaatattttttattatgtcgtttttatctgcttttttggcttggtaggtctcattgttctattatttttgtgattgctttaagaattacagtatacatctttaatgtatcacaatctacctttaatgatagatattataccatttcacgtctaatataggaaacttgcactagtacgcttctattttctccttatgacctttgtgctattgttgtcatacatttttcttctataaatgtataaaaccaacaatatgttgtcattctttttatatttaagatgtgtaaacaatttttaaaatcttacatatttaccatgtagttaccatttaagatactcttcattcttttgtgtatatccatatttctacatggtacaattttccttctacttgacattttctttaacatttcctgtagtgcaggtctgttggtcatgaactccttcagcttttgtatttctaaaaaccttttaatttttaccctcatttttaaagatattttcactaagatagaattctaggttgcaggttttttattttagtactttaaagatgttgctccactgtctctttgctttttcctcactgtttccaataagaaatgtgctattatttttatcttttttcctatgtacataatttcccacccctgacctctggctgctttttttttttcttgtttttggggggatggggctttgccatgttgctgaggctggtcttgaactcctgggctccagcaatcctcccacctcaacctcccaagtagctgggattacagatgtgcactaccaaggctggctctcctctggctgcttttaagatttttctcttatcatcgattttgagtaatttgattatgatgtgctttggaatagttttccttaggtttcttgtgcttggacttcgttaagtttcttaggtgagtttacagtttttatcaaacttagaaaaacatttagctgttattgcttcaaatattttttctgttccctctctctcttctctttggaactccaattatccgtattactcatatattagaccactttgaatttgtcctacagctcactgatgctcttttatttgggtttattgtaagtgaaatgttgtattggtgcacagtgttccataaaatgaaaggttgctatctttgttcctcttagaaagagaaaataccctatcagattctctgtcagagcttgcctccagcttctgctaaaagtgcttctcagtattaactatttttccaatttcttccttgtggtaaaatacatataacacaaaatttaccatctcaacaattttcaagtatacagttcagtggtattaaatacgttttcaatgttgtgcarccatccatctccagaactcttttcattgtgtacaactaaaactctataaccattaaacagtaactccccatttccaccttcctctagcccctggcaamcactatcctattttctgtctctgtgattttgactactctaagtacctcatacaggtggaatcatacagtattttttttgtatgataggctttgtgtgatgggcttattttgctgaacataatgttctcaaagttcatccattttgtagcatatatcagaattcccttcctttttaaagccaaataataatccattatatgtatacagttgttcatccatatccatgggttctgcatgcatggattcaaccaaccacagataaaaatatttgaaaacaattgcgtatgtacttaacatgcacagactttttccttgtcattattccctaaacaatacagtatacctatttatataatgtttacattatattaggtattataagtaatctagagatgatttaaagtacatgggaggaagtgtataagttrtatgcaaataatacactattttacattggggacttgaacatctgtgggtttttttatccacaggaggtcctggaaccaatcccccatgtataccaacggacaaccttatacattttatttcttcattcatctatcagtggacacttgggttgcttccacatttcagctattgtgaataatgctgctattaacatggttgtataaacatttctttgtgaatctactttcagttattttagatacatacccagaagtggaattgctgaatcaaatggtaattctatttttaatgttttgacagattgccatactgtttcccacagtggctgtaccattttacattcccaccaagatggtacaagggctctaatttctccacattcttgccaacacttctcattttgtgttttttaaaatagccatgtaatgggtgtgagatggtgtttcatcataattttgatttgcatttccccaatgattagttacgttgagcatcttttcatgtgcttattggccatctgtatatcttctttaaagtaatatctatttgagtcctttgcccattttttgaagcaggttgtttggttttgtttgtcttgagtttgaggagttctgtatatgttctgaacattaatatcttatcaaatatatgatttgcaaaatagctgttgattgcctcttgatgcacacaatttttcaattattataaagtctaataagtctatgttttcttttgttgcctgtgctttttgtgtcatatccaagaaatcactgctaaattcaatgtcatgaagattttgccctgtctcttttaagagtcttataattgtaggccttacaagtaggtaatccatttcgagttaatttttgtatatagttttaggtaaggatctgacataatttggatatttgttccctctaaatctaatactaaaatgtgatcctcgatgttggaggtgagacctagcgcgagatgcttgagtcacgagggcagatccctcatgaatgtctttgtgccctcctcatggtaatgagtgagctcttgctctattagtcaccatgagatctgattgttaaaaagagcctggcactttctcctctctctcttgctctctctcttgtcatttgacacactagctcctgtttcccttctgccatgagtaaaaacttccgtaggtctcaccagaagcagaagctggtgccatgcttctgtatgaactgcagagccataagtcaaacctcttttttttataaattacccagcctcagatattcctttatagcaatgcaaaacagactaatacagagtccaactttattctactgtatgtgactatccagttttcccagcaccatttgttgaaaagacagccttttctctactgagtggtctgacacccttgctgaatctaatttgaccatatatgcaagrgtctcttcctaggctctgtattctatttcattggtctttatgtttttctttatgccagactaaagtgttttgattactgtagctttgtaataagttttgaaaacaagaagtgaaatcaggagtgctccagctttgttttcagtattgctttttgttttcagtattgttttagctgttggggtcccttgagattccatacaaattttaggatgsgttttttctacttctgcaaaaacataattgggattttaatcaagattgcatttaatctgtagattattttgagtagtattgacatcttaacaatattaattcttccagtcgtgaacacgggatgtgcttttatttatttatgtctttaatttctttcagcaatattttgtagttttcattgtacaagtctttcacttctttggttaagttaattcttaagtattttatttttttcaatgctattacaaatggaattattttcttaattttctttttggattattcaatgttagtgtatagaaatgcaactgatttttgcttattgactttgtatcctgttctttgctgggtttattagttctaaaaggttttttggtggaatctttatgattttctacctataagaccatatcatattgaagcagatcattttacttcttttctratttaaattgtcttacttgtttttcttgcttaatttctctggctaggacttccagtaactacattgaacagaaatgacaaaatgagcatcttaaccttattccagatcttagataaaaagcttttagtctttcactattgagtatgacattcactgtgagttttttrtatatggattttattatgttgaggtaatttccttctattcctagttttttatgtttttgtcatgaaagcatgttgaattttgtccggtgctttttctggaccaattgagatgaccaggttgggtttttcccttcattctgttaatgttgtgtattatattgatcaattttcatatgttaaagcatccttgcattctaggaataaatcccacttggtcatgatgtataatctttttaatatgctgctgaattcattgtcagttctggcttggatttaattaatttctctcctcattataggttgtatttttctgctcttttgcatgcctgttaatttttgcttagatgacaaacattgcaaattttatctgattaagtgctggatattttctcagtcctataaagagccttcaactttgttttaggatgctgttgaggtcctcagaaatattgtgatccttttgggtcttccttttaagacttgttagatagactagagcattgcacagtctgggtctaattacttcccactcctgaggcaaaatctttctgtgtgctctatcaatgcccaatgaatacttaaggctgtccagtatagctatttggaaatggcactattcccagcccagtgtgagcactaagtactattatctctaatcctttgggtggttctttccccagcctctgatagtcctctcacatgcatgcactgatcaacacccagctaaatactcaagggataccctgctcagatctctggagttctgtctctatgcagctctctcctcttaggtcctctgtcctgctaacactaggaagcacctcgccttcctcagactctcagctccatctcctcaactcagagagtccaccaasctccacctaagaaactcccaaggcagcaagctggggtaataatagggtttgccccatttatttctcatgtctcaaacatgactatcctttggtgcctgattctctcatcatttcatatattttgtccattctttggatgattcaggtggtaggatatatctgattcctgtttttcgatgtttattagtagtccctggctattcttatttaacgtgattattgatatatttggtttaaaatatattagtaattactgacatatttgggtttaataattctttacartctttcacttgayctatatgcctttttctctttgactatctacttttgaatgaattatttttttattccatttttgtttgtctgttttgagatgggatttcactctgttacccaagcaggaatgcagtggcataaagatgtctcactgtatctaactcctgggctcaagcgaccctcctatctcagcctcccaagtagctagaactacaggcttaggccactacacccagctaatttttaaaaaattttttgtagagacaggatctcactatgttgcccaagctggtctggaactccttgcctcaagcagtcctcctgtcttggcctcgcaaggtgctggagttataggtgtaagccaatgcgactggcatttatttttccatttttttattctatgagcttgaaagttatgcaatcttgtattattcttttaatagttgccttagaggttgattataacatgcttctggacttattatgtctaataataaatgataattttatgagaatgcaaaaatcttacaatattttaactccatctattctctcacaaattataggccaagttgccacacattttcattctattcatatttttaacccaacaagatgtcattgtcctatgctatgaatattgatttattttcttttatttacttatttatctatttattgagacagagtctcactcttgttgcccagactggagtgcaatggtgcaaacttggctcactgcatcctccaccacatgggttcaagcgattctcctgcctcagcctcccaagtagctgggattacagacatttgccaccacgcctggctaattttgtatttttagtagagacagggtttcaccatgttggtcaggctggtctcaaattcctstcctcaggtgatccacctgcctcagcctcccaaattgctgggattacaggagtgagccactgtgcccggctgaatattcatttagatttccctatctattgacacttttagttgcacttcatgccttcctgcatctctgacctctygcctgggttcatcctttgacctgaagataccttttaatattttcttttttgtaaaacccaattgtattggttctggaagtattctctttagtgtagttcttctcatgccaaacatctatatgaagatatctttatctttagtcttgaagaatattttcttttcatagaaaatcccagtttagcagctatttttcttgcagcactctaaaaacattgttctaatgctgttgacttcctttatttctgttgaaaatcagctataagcataaggaaaaggggtgggcgtccaggacccaccaaaggtaggctctgggacctctcttgcttggggtggggactagtggtcttggtgtaagggcaacccagaagcattctagccttcttgagttggagaagtaaagtgcacctttgaatcatcacacttcctaaaactggattaaggcaaccatagagttctggtgccccctggtgcctggcagagccaacttatctcacacctggagggagatctcctacatcttgatgtatttctacaataagccaatgaatgccctatcacacaataagcacataaggagacaagacagactctgtaggcaaacaaaacagaatggtccacagtcacccagataacggaattatgatacacagatctcaaaataaatatgcattctttgtttatggaggaaaaagacaagattgagaattttggcagagatctgaaaactgttaaaaagaaaaaaagaagaagaagaagaagaaagaaaaaagaaagttacatccagtgcctcttaagacctgggcagactctttggtcgccttgttctggagcccttggctgtgtgttgaccacctcagggttccatagcaaaattccacaggctgggtggcttacataacagattttgcacagttctggaggctgagaagcccaaagtcaaagtgtcggcagatttagttcctggtgggggtcttcttgggggtttgcagatggccagcttcttgctgtgtctgcacatggtggagagccagggctctggtcttattaggggtctaatcctatcatggcggctccaccctcatgacctcatctgagcctaatttcctcccactgagggttagggctccaacacgtgaatgtcggaggaacrcaaacattcggtccatagcagccatctgttttgcttccaccaccccgctggtcaccagttctgtgtgggcaccgcctgactccacagggagtgggcagcgcatttcaccctaagcctgcggtggatgccgcttgtctcctacctcgggccttccctgttgccaacaaggcgagaaacaccccaggattcgctcagtacccacgcctgtgcgatccggtaacctgaggtattcatgctccacggggtgaacccctgataaatgggatttggcactgactggtaaataaattattccccattcctcctcccaaacagaatgtgctgagagtctgtcattttacagcctcttttttttttttgttttgacagggtctccctctgtcgcccaggctggagtgcaatggcgccatctcaggtcaatgcaagccaactctcgtgtttgagtgattctcctgcctcagcctcctgagtagctgggatcacaggcacccgccaccacttccggctaacttttgtatttttttcagtagaggtggggtttcaccttattggtcaggctggtctccaattcctgacctcaggtgatccgcccgcctcggcctcccaaagtgctgggattacaggcctaagccaccacaccaggccgttttacagcctcttagaaagtacgtctctgagaagtggtcatcagtcacacttgtctgcagccctgtctctgccgtatctgtgtctctccccttcttcctcactgcgccccctggatttcactctctaatcaaacaggagcgctgcccttgcttcgcactctgccttccaggggaatctgttacctagggaggccatgaggatgcaccacagctggagggcttcacacagcaggaattcattgtcccaaagttctggaagccgaagtgcaaaatcaagaagtcagccaggctgtgctccctctgcagcgtctagggagaattcttcctgcctcttccagcttccggtggatcccaacattcttcagcttctggcggaccccaacattcctcagcttctggccgcatccctcccatctctgcctcaatcttcacgcggcgttatcacctgcatgtttccctgtcgtcttccctgtatgtctgtctatctatgtccaaatttcccctttttataaggaaggaccccagtcatatggaattatggtccaccctaataacttcatgttgacggactacctctgtaaagacccaatttccaaataaggtcacattctgaggcactgggggttggggttttgacatatctttttgtagaggacacaattcaatgaaatccaatcactagggaacgctggctaagacaaaaatagagtaaaaatcccataactaaataataataaaataactgaaattacaaacttaattgattagcttaatagtgagttagactgggctaaagatgggccgggagacagaatccagaataaagcatggaataaaatagggaatttgggggcatactgaggacaaaaacaaaaagaataggggaaaaccaaaaaagctgctaaaagaaagagaagataaagaaggactgaggcatatgtcgacctttttcatatatgtaaagaaaatacatgggtgagggggcaaaacggtaattgaacaatacatgttaatggaatcaaattataatggaagagataacaccctagaatttacccaaagtgttgaaagagatcaagcacagatttaagaaactttaaaaacccgagcagaaaaagtacaagaaatgcatacctggatatagcatggtagaactgcagaaaactaaagaaaaagagaaaatatcaaaagcagactataaaagatatattactttccaaaaaagcatcattcagcctctcagtacctcccacactgaattggcagtttcttctgagaggagaagcaacccaaaatggtttgtcacgtctgccaaatttggggccagtatttcttcactattttattatgtcctaataccttcaagtagatttcttatttagcttttctggctgtcttcaaaagaagagctaaattacctacatttcatgtttaccagaagctaaggtgcaaattaattttaatgcttaaaatatctaaatgatggcatcccctataaaagtgttctaggccgaaatgattttacaaattagttttagattacattccaataaggataatttttatgttagtcaaagtattccaagccatagaaaaaaattagaaatttcctcaattcaatttatgatgctaacacaccttaatatcaaaactttcttaagttatttcaaaaaataaatgaacagttttcatttcttatgatagatggaaaaaacaaatatatattaaaatcatacactatggtcaagtagtttttattctaggaaaagaaagatatgtcaatataagacacagccacacagagactacacagctgcgttctcactggtgacagaaccactgcacaccaccagcaagcacccttctacctccctgtaggggaaggtctttccatagtgaaatcagtctgtgaagtctgcaagaggtgactccatcaaatatgcagacatcaatgaaaggcaacaagaaacatgtaaaaccaaggagatatatcaccaacaaaagaacacaataatctcccaaaactgaccacaaataaatgaaaaaaagccactgcactccagcctgggcgcagagcaagactccatctaaaaaaaaaaaaraaagaaagaaatgaaaaaaaactgacaaataattcaaaattcaaaataatttaaggaagctcagcaaacttcaaaaaatacagagaagtaattcagtgaaatcagaagaacaataagcaaccaaaatgagaaatgtaacagaaagattgaaattttttttwaaaaaaagcaaacagaaattctggcacagaagaatacaatgaatgaaattttaaaatgtaatagaaagcatcagtgacagaatgatcaagcagaagaaagaatctgtgaacttgaagacagattatttgaaaatatacagtcagaggagaaaaaagagtgaaaaagaatgatgaaaacttatgggactttggggagagtatcaaaagagcaaatgttcacattatagaagttcaagaagaagagagaaataaaggggaaggaaacttatttaaagaaataatagcagaaaaccttccaaacctggggagcaatataaatatccaggtacaagaaggttaaagatctccaatctgattcaatcaaaacaagactactcctgagacataatcaatttgtcaaaaaccaaagacaaagaaaggatcctaaaagctgcaaragaaaagaaacaaatcacatgtaaagaagttccagtaaggctaacagtggatttctcagcagaaaccttacaaaccaggagagagtgggatgatatattcaaagtgctgaagggaaaaaaaaaaacttccaaccaaaaatactttacccagaaaagctattcttcagagataaaagagagataaagactttcccaggcaaattaaagttgagggagtttatcaccaccagacctgtcttacaagaaatgctaaagggagttcttcaagctgaacaaaagtatgctaattagtagcacaaaaacatacaaaagcaaaaacctcagtggtaaaagtacgtagtacacagtcaaattcagaatactctaacattgtaatggtggtgtgtaaattattgttagtatataggttaaaagacaaaattgttttaaaatatattaatttgctaaaggatataccatattaaaaggtgcaaattgtgacatcaataaatcaaatatggggaggtgaagtctagagttgttgtacgcaaagttaagttttttattagcttaaaacagcctattataagatgttttatacaaagcaaaaacctatagtagatacacaaaaaagaaagagaaagaaatcaaagcctacctctaaagaaaatcatcaaatcacaaaggaggacagcaagagaggaacaaagaaataaaaactccacaaaacagccataaataagttaacaaatggcagtagtaagtccttacctatcaataattaccttaagtggaaatagattaaaatatccaatcaaaaaacagaatgttgtatgggttttttttaaggacccaactatatgctgcctacaagagactcacttaacctaaaaagacacacagattgaaagtgagaggatggaaaaagatattcatgcaaatgaaaaccaaaagagagaggaagctatacttataacagataaaatagaatttaagccaaaaaactgtaaattgagacaaagaaggtcattatgtaatgatataaagggattgatacctcaaggagatataacaattatgaatacataggtatccaacatcagaccactttaatatataaagcaaatattaatagatccgaagagagagacagactgcagtatgataatagtagggaatttcaatgctacactctcaacaattcacaaatcatccagacagaaaatcaataaggaaacattggcttgaactatactttagatcaaatgaaccaaacagacacatattttaggttggtgcaaaagtaattgcattaatggcaaaaacctcaattacttttgcaccaacctaaatagaacttttcattcaacagcagcagaatacccattcttctcaagagcatacgcatggaaaattctctaggatatatcatatgttaggccacaaaacaaatcttaacaaatttatgaagattggaaccatttcagaccccagtggtataaaactagaaattaataatagaggaaattttaggaaattcacaaacatgtggaaatgaaacaacatgctcctaaacaaggggtcaaagaagaaattaaaaggaaaattgttttaatatcttaagacaaaagaaaatggaagttcaacataccaaaagcaatcctaagagcaacaaatgcctacatcaaaaaagaaaaggaaagatcccaaataaacaacctcacattacatgtcaaaggactagaaaaagaacaaactatgcccaaagacaatagaagaaaggaaattaagataaagatcagagctgaaataagtgaaatagacactagaagaacaacagaaagatcaacaagcaaagatttgttttttgaaaagaggaataaaattgacaaacctgtagctacagtaagaaaaaagagaagactaaaataaataaaataacaaatgaaagaggatacattacaactgaatcacagaaatacaaaggactaaaagagactattatgggctgggcacagtggctcaaacctgtaatcccagaactttgggaggccaaggcaggcagatcacgatatgaaaagatcgagacaatcctggctaacactgtgaaaccccatctgtactaaaaatacaaaaacaaaattagccagacgtggtggcaggtgcctgtagtcccagctactcaggaggctgaggtgggcgaatggcatgaacccaggaggcagagtttgcagtgagctgagatcgtgccactgcactccagcctgagcaacacagcaagactccatcaaaaaaaaaaaagagagagagactattatgaacatttgtaggccaacaaattgggtaacctagaagaaattaataaatttccagacatatacaatgtaccaagactaaatcatgaataaattaacaatctgaacagattactaatgagtaaggagattgaatcagtaataaaaagtctcacatttgagacttttccattgagacctgatggtttcaatgctgaattctatcaaacatttaaagaacactaatactaattctcttcaaactattccaaaatattgaaaaggagggaatacttccaaactcattttataaggccagcattaccttgataccaaagccaactaggacactacagaaaagaaaattacaggccaacacccctgatgaacatagatgcaaaaatccataataaaatactggtaaacagaattcaacaacacattgaaaggatcattcaccatgatcaactggaatttatcccctgggatgcaagggtggttcaacatatacaaatcaacaagtgtgatatgtcatattaacagaatgaaggacaaagacatatgatcatctcaatagatgtagaaaagatatttgacaaaattcaacatctttcatcctaaaaattctcaacaaattagacgtagaagaaacttaccttaacacaataaagcccatatacacaaacccatagctaacatcattctcagtggcaaaaagttgaaatcttttcctctaagatcaggaataagacaaggatgcccaccctcaccagttctattcaacagagtacgggaagacctagccagagcaattaggcaagagaaagatgtaaaaaaccattcaaatcagaaaggaaaaagttaaattgtctgtttgcagactacataatcctctatgtagaaaatcctaaagattccaccaaaaaaactcttagaactaataaataaattctgtaaaattgcagcatacaaagtaaacatacaaaaataaatagtgtttctaaacactaacgaaaactacctgaaaaagaaatcaagaaaacaaccccacttacaacagctataaaaaaaaatccttaggaataaatttaacccaggggataaaagatctgtaaactaaaaattaaaacattgataaaaaattaaagacacaaacaaatggaaagatatttacgtgtatggatttaaataattaatattgttaaaataagtgatctacagattcattgcaattcctatcaaaattccaatgaactttttcacagaaatagaaaaaaatcctaaaatgcacatagaaccacaaaaatcactgaatagccaaagcaatcttgagcaaaaagaacaaagctagaggcatcacactatctgatttcaaaatctactaaaaagttatagtatggtaaacccaggggattttttaaaaattaaaaaaattaattttgttttacatttttttaaagttatagtaatcaaaacagcattttgacaaagagtccaataaaacgcaataaagaaaggacagtctcctcgataaatgctgctggaaaaactagatattgatatgcagaagaatgaaattagacccttgcctcacaccatatacaaaaatgaattcaaagtggattcttaaagacttaaacataaaacttaaaactgtaaaactaccataagaaaacatagggggaaagctatataatattggtctgggcaatgattttttgggtatgaccccaaaagcacaggcaacaatagcaaaaataaacaagtgggactatatcaaactgtaaagcttttgcacatcaaaaaaagaaagcaaccaacagagctgggaacccagaatatctgagacaggtatttaataattataattatgaagtttattttgccaaggttgagaatatcggcccatgtgacagccttgggaggtcctgactatatgtgcccaaggtggtcagagcacagctaggttttatacattttagtgtacattggttccattcagaaaggcaggacaactcgaagcagggaagaggcttccaggtcacaggtaggtgagagacaaacggttgctttcttttgagtttctgattagcctttccaaagtgggcaatcagatatgcatttatctcagtgagcagagggatgactttgaatagaatgggaggcaggtttgccctaagcagttcccagcttgactttacccttcagcttagtgatttcggggccccaagatttatttttctttcatatttccccccttttctttttaaaatcttttagagaaagcgttttagaagaaaatgagtctctggtctcaggtttcatctgatctctcatggctacgatggtttattcctaaatgggtaggttccaagttattaggaaagctcatttttagcaggttgtaaactctcatgtcctatgaagagaaaatagggggaggaaggaagaaaaacaacaataaacaaaagaacaatcctggaaaatcaatataggtcacattactctaaagtccttcagcaaagtctcaggatacaaaatcaatgtacaaaaatcacaaacattcttatacaccaataacagacaaacagagagccaaatcatgagtgaactcccattcacaattgcttcaaagagaataaaatacttaggaatccaacttacaagggacgtgaaggacctcttcaaggagaactacaaaccactgctcaaggaaataaaagaggatacaaacaaatggaagaacattccatgctcatgggtaggaagaatcaatatcatgaaaatggccatactgcccaaggtaatttatagattcaatgccatccccatcaagctaccaatgactttcttcacagaattggaaaaaaactactttaaagttcatatggaaccaaaaaagagcctgcatcaccaagtcaatcctaagccaaaagaacaaagctggaggcatcatgctacctgacttcaaactatactacaaggctacagtaaccaaaacagcatggtactggtaccaaaacagagatatagatcaatggaacagaacagagccctcagaaataacgccgcgtatctacaactatctgatctttgacaaacctgagaaaaacaagcaatggggaaaggattccctatttaataaatggtgctgagaaaactggctagccatatgtagaaagctgaaactggatcccttccttacaccttatacaaaaatgaattcaagatggattaaagacttaaatgttagacctagaaccataaaaaccctagaagaaaacctaggcattaccattcaggacataggcatgggcaaggacttcatgtctaaaacaccaaaagcaatggcaacaaaagccaaaattgacaaatgggatctaattaaactaaagagcttctgcacagcaaaagaaactaccatcagagtgaacagacaacctacaaaatgggagaaaatttttgcaacctactcatctgacaaagggctaatatccagaatctacaatgaactcaaacaaatttacaagaaaaaaaacaaacaaccccatcaaaaagtgggcaaaggatatgaacagacacttctcaaaagaagacatttacgcagccaaaagacacatgaaaaaatgttcatcatcactggccatcagagcaatgcaaatcaaaaccacaatgagataccatctcacaccagttagaatggcaatcattaaaaagtcaggaaacaacagatgctggagaggatgtggagaaataggaacacttttacactgttggtgggactgtaaactagttcaaccattgtggaagtcagtgtggcgattcctcagggatctagaactagaaataccatttgacccagccatcccattactgggtatatacccaaaggactataaatcatgctgctataaagacacatgcacacgtatgtttattgcagcactattcacaatagcaaagacttggaaccaacccaaatgtccaacaatgatagactggattaagaaagtgtggcacatatacaccatggaatactatgcagccataaaaaatgatgagttcatgtcctttgtagggacatggttgaaattggaaaccatcattctcagtaaactattgcaaagacaaaaaaccaaacaccgcatgttctcactcatagatgggaattgaacaatgagaacacatggacwcaggaaggggaacatcacactctggggactgttgtggggtggggggagggatagcattaggagatatacctaatgctaaatgacgagttaatgggtgcagcacaccagcatggcacatgtatacatatgtaactaacctgcacattgtgcacatgtaccctaaaacttaaagcataataataataaaaataaataaataaaaaataaagtccatacatcaatagacaggtataaaagtggcttatgtacgtaaaatgttgctgttattttcttccagagattaagttgtctagtggcagtttgtaaggctttaagaaagcacagcttagttttcagtgattttaaattaggaaaaatgggggaaataaggaaaagaaagaagaaaaaaattgaaaacattatcttggagatttgtagccaggaaaaattagaattcaatctagactgcagaaaataataaaaattgaaaaacattaggtaagactagaatctaacaacaggtgtaccatagtttttgaaacataatttttctctctccagtttcccatttttactaaagacaaatcatgttatgattgatttgccttgttatacttggccagattatttrtataaagtacagcaagaataatgatttttctcataggctttttaaattggctttgatggagctttgttccatagaaggaatctcagattagccttttttaaagtcgagcctagccacagatttgtaccatcaaatacctatgagttgggtgaattcctctcctcttgagatcccaagatagcctggggatcctaggcctgtcagaaagtgacattcttacttaccacaggtcaggaaccctgtacggggactatgtaggtatgaggtcagttttcctaaagggcttttattggctctataagtcaagtttgattccttaaaggaaagcctaccattccagtcaaagccttggtaaaataaccagtttctccaattgtgtcctattacaaatgaaaacagattctcattgcacttttgcaaataactatatagccataggttaagaacactcagtttccaaattctggagaatcaggtagaaacaaatatgcttcaaattttgttcataaagtatatttaattgttaaaagctgttaatagctcaaaagaaaagtttccttgactctgaaaaacaaaggatcagcaacattttaagcaaaaagtcaaaaagactacttcagttttctattagttcagtctatgcagttctgcttgatattcatgaacatttcagctttccaggagtcctgaaaggtttttctctattgtgatgtcaccatctccaaagttatcagaaacctgcattcaaaagtgcctgttagaattttatagctgattgggagcgggtaaggattcggcgggcaagcgggtgtaatccacagctatccgtggtagggcatggtagcttccaaccgcggggaccccaagagtctcccgtcagccgagtagcagccaggaaggagaggctgggatggttttttacctgttgtcccttaaatcaagggccgccgggccgaagagggatagagggactggggatttggggactcgaaaacgagctgagggaagggagcctgtggaaatagactggagtctgggtagtgtcgtttcctagagaatggtctcgaagtaacttctcggtaaagtcttcacagaacttccagaccacacttgcccactgggaggcttttaggacctgagacgtgtgcaggcttttccagccaaaatgaagtttaatccctttgtgacttcccaccgaagcaagaatcgcaaaaggcatttcaatgcaccttcccacattcgaaggaagattacgtcttcccctctttccaaagagctgagacagaagtacaacgtgcaatccatgcccatctgaaaggatgatgaagttcaggttgtacaaggacactataaaggtcagcaaattggcaaagtagtccaggtttacaggaagaaatatgttatctacattgaacaggtgcagcgggaaaaggctaatggcacaactgtccacgcaggcgttcaccccagcaaggtggttatcactaggctaaaactggacaaagaccgcaaaaagatccttgaacggaaagccaaatcttgccaagtaggaaaggaaaagggcaaatacaaggaagaaacaattgagaagatgcaggaataaagtaatcttatatacgagctttgattaaaacttgaaacaaagaaaaaaaaagaattttatagctgattataaaaccaccttctaaagaggaccaaaataagacaattgtccacggatgacaaaaggttttagggcacccatagtcaaagacacaattgacaaggaagtttgttacctctgtgacataaaataatgtcacataacaattatgattattactgataatgtacactgagtcatatcagaattataggagtttctcataattttggaacacataccaataacatatttatacaaatataagccaaagaaaaccaaacaccatttcatatttgacaatacttcctgtgtacattttataccaaataagccaaatatgccattttgtactttagggaatctaatatcttaaaggattagttagrtcagaaagagacataatttataattttattttggaaaatgtgccaaatatcaaaggcttaaaacatttgatatcactaaataggatcacaggtcattgtaaaataagtgattcacttagagtgataactcaaacatctcaaaaaaaaaaaaaaagcaaaaaccttcattctttgagagaggatacttaattttccaaacaataagccctaataaagtcagcatgaagccaattaaatgttttttaaaattttataagcaatctataaaatgttcatctgaccataagatataatttcataagccttttataacctttattaaggagtcagttaatgcttcaagaaaaacttgttaatctgacacaggggcccatttgctggtcttgcatcagtgggcctttgacattaatgtttaagttcagttcagagaaacggaacttattttatctctcaaaatcagcccttacaatctcatacacccaccttttctgcaatagttctgggccttgaggagttgaatagtttagtttctggccctgtctcaggaacgcagtttaatttgattggcactttctaccaggcctgaagatgaggctttaattgttgtcagtgtttaagatttaccaggacttggccgggtgcggtggctcacgcctgtaatcccagcactttgggaggccaaggcaggcggatcacgaggtcaggagatcaagaccatcctggctaactcggtgaaaccccgtctctactaaaaatacaaaaaattagccgggcgtggtggtaggcacctgtagtcccagctactcaggaggctgaggcaggagaatggcatgaacctgggaggcagagcttgcagtgagcagagactgtgcctactgcactccagcctgggcaacacagcaagactctgtctccaaaaaaaaagatttagcaggacttcatgtcctttttgggcgaaggagtcaaagccccacaactcaatgtcacgaggactttaaaagcacatacagaaagatacacggatgtaataaccataattttttttwaaaaaattaatctcagtttttttctaagcaaatcaaaacttaataataatggcataggaattattttgataaaacgtaaaaatctgttaggccagttaccaagaggcaaaataaaagaccttctgcagtgcactgaatattatgttggaagaaaacattttctttagacccttaagaaaacattgttagcatcaggctacaacaaacagaacccaatacgaaaaaaacttacatgagctgaaaaatgagttgaaggacagtgttattttgcactttttaaaaggggagaggaaacaaaaatgatgagatgcaataaaagttgaactttgggttataatttttttaaattaaaatatcggcctggcacggtggctcatgcctgtaatcccagcactttgggaggccgaggtgggcagatcacttgaggtcagaacttcaagaccagcttggccaatatggtgaaaccccatctctactaaaaatacaaaaaaattagccgggcactgtggcatgtgcctgtaatcccagctactcaggaggctgaggcaggagaattgcttgaacctgggaggcggaggttgcagtgagccaagcacgccactgcactccagcctgggcgacagagaaagactccatctcaaaaaaaaaaaaaaattaaaatatcttataatttattaagagtaaatcaaccccttaagaaaatttcattgttctaaccaattatttaatgtataagtgattttctttacattaaacccaatctctagaaaggtcattataatttccctttagttatagacaacttgatcatataaaactttttgggttcttttcttgttttcttttaaagctttttcggtatgtttattagttcatttaattaattcttttttttatttaagttctgagatacatgtgtagaacgtgcaggtttgtcacatagtatacatgtgccatggtggtttgctgcacctatcaacccgtcatctaggttttaagccctgtatgcattaggtatttgtcctaatgctctccctccccttgctccccagcccccaacaggccctggtgtgtgatgttttcctccctatgtccatgtgttctcattgttcaacttccacttacgagtgagaacatggggtgtttggttttttgttcctgtgttagtttgctgagaatgacaccttccagctttatccatgaccctgcaatggacatgaactcatttgagggtgttttttttttaataaatccacttattgtgactcacacagaccactcatgacatgtttggactttctgatttatcctgaacaccctcttttttttttttttttttttttttgagacggagtctcgctctgtcacccagtctggagtgcagtggcgggatctcggctcactgcaagctccgcctcccaggttcacgccattctcctgcctcagcctcccaagtagctgggactacaggcgcccgccactacgcccggctaattttttgtatttttagtagagacggggtttcaccgtttttagccgggatggtctcgatctcctgacctcgtgatccgcccgcctcggcctcccaaagtgctgggattacaggtgtgagccaccgcgcccggccaacaccctctttcttaaacaaccagtcattttattctaggacaaaatttaccgtacgagattctttctcgtataaaattatttctctttaagctttcttaccaaaaaaatacctcttttttctataactttctttacatctctcttatttcctggttccttttaccttgttttatacataacctctaaataagctttgaattagacaaaaacaattcacctttttaaaaggacatttttttagaaagcatgttttcctacaatatatttttactggaaaatacccaaataatgaaatatctactgtttaatttaactttagattctaaattatgattctaagtatgcctataggtatttatcccattaaatgtacctaattattttattttaatcatttacctagattatttgtgaaaactgtgagagtcgtcatttaaacttatgaaaccactataactgagacagtgaaaaagatctggcctaacttactccatcttgcttctaacctccaagctatccttatttattcctgggcataggccgaactaactttgggaggaacttagtttatagtttaggtttgaaacaaagatgctaactgtcctttcccaaaacaaatctcctttctgcctgtggactaggctgctaaagccacaagattagaagttatggtaattttactagataattcaagatgactattttcactaaaccaataacaatgtcttatttattaaaaattacacaagcaaagatcattcagtttggggctgagtttatagtttcgtaaccctgatgccaaattttgacaccttatagtatttggcagggataagtacgcaattgcttaatcaataaatgcaaacaaaaatgtatgctggaaattcttaagacatttctaatattactttaccaataatttsaaagctagcttatttattaaagattttacttaagtcatgtaaacttgaaaaagcatttgactagtatttccttttttctggtaaagtatttgatttaagtgcttttagtttcctttaagccaattaattagagctcttttatatatttttagtagtgaaacgtgtacacaacacataaatacataaatgtattaggcataccaatagaagtacatcttatagattcctaagacctttttttttcttaccttagactttcaaactcttgataacctgtttcattaccctggcagttgtcaggtaaatagccctaagtctgcatattgaaggaaataactcttagaagaaaaatcaaatggcaaaatttacatctcaaggtacagagagaaaaartctggtggagctagagggagattaaagatgaatgccaaatcaaacatgaaattatagaaatctatgataggattgtataaggagaccaattttatttaggtgggaactacctatcttttaactagatctctgagctctgggcagagcccacactgaatcctgggtctccaaaaagggagagttgacgctagaacacgtgatgcttttacaggacacttaaaatttttttcagtcaaagacatttctaagtgtctacactacagtcttccttaaaaacccaagagtagcctctgttacaatagctattttagtcaaaaaatcaggtaacacaatacaaaagcaagcagtttaagagctgagacaaacttgtctgtttacactcttgggattccataaggaaaaacagggagcctggtgccttccccattttctttaaggaaatccaggctattataaactattttaggtccctcatgcagcagaacatgcaagagaaaggagagacagcagaagtaaatggagaaaatagaattaaatcaactgagaagaaaaacctttgctcaaaaaaagacaaggtcctaggagagggaaaaaaacaaaaacatgaaagcctcttaaacgcacacacacacacgcacacatatacacatgcacacacacacacatgcacacatacacacgtgcatacatgcacacatgcacatacaggcacacgcatacacatacacacatgcacacatacacatacacacatgcacacacacacgcacacacatatacacatgcacacacatacacacatgcacacacatacacacacatgcacacacacacgcacacacatacacatgcacacatacacatgcacacatacaaacacacatgcatacatatacacatgcacacatacacatgcacacatacacacacacatgcatacatacacacacatcttggatgttatcttcaattaagctgacttttaaccactgagctcctattaaaaaaatctttttaaacctcattaccatattttagctaggacaaattgctgctatttcagaagtacaagtatcaaaccagaaagggcttgatttaggaaccaaacccaggctgtcatagtggaaaaaaagaaggcagaaccttagctatgaaactgcagcatggggcgacagccatcgctctttcagtttggactggctagcaaaaacatagccctgttgtgtaaataaataaagccccttaagtggccaaaataaaaaatctttccttttttttttttttttyccttgtgctggctatttttctctccccaccacatcaccttttgtgtgtgggggtggggggtggaatttagccagttcagaggacctgttccccataatttggaactttccttcagatttgatcaaggaaaaacaccaaaacaaaaacaaaaacaaacaataaaaaaaattaagtgaaacaaataatcacacaatgtgtgtgattactgagtgctcaaatggtaaggagaaattaagaccagctggttgttaatcttaactttagccaaaacaaacctccattcagttacttagatagggatgggtctcaggcgaagactgctctctaccatcctagaagcaggaaaaaactcaaaactcatcttccctgttgggagtgagttcaaactccataaaaaagttgcctgccttccatcgtgatggaagcaggaaaaacttgccttccttgtgctggaagcaagtaaaactccacaaaaggagtcgtacagcaaaataaaatttagatctcgaccaaattttgggagatcagggattttccggaggggttgcttccaggcctcagcaaattgttccattggtttgagccataaagatagctcaagctggtaccaagcacgaattggagatgtgtcaaacgtcaggggcacctccactcagaatcccttcgtggttaccaaaatgtgaacccagaatatctgagacaggtctcagttgatttagaaagtttactctgccagggttgaggatgcacgcctgtgacacagcctcaggaggtcctgatgacatatgcccaaggtggtcggggcacagcttggttttacatattttagggagacatgagacataaatcaatatatgtaggatgtacattggytccattcagaaagtcaggacaactcgaagcagggagggggcttccaggtcacagttagatgagagacaaacagttgcattcttttttttttttttttttttaattgagacagagtctcactctgtcgcccaggctggggtgcagtggcgcaatcgcggctcactgcaagctccgcccgccgggttcaygccactctcctgcctcagcctctccgagtagctgggactacaggcgcccgccaccacgcccggctaattttttgtatttttagtagagacagggtttcaccatggtctctatctcctgaccttgtgatccgcccgcctccgcctcccaaagtgctggrattacaagcctgagccaccgcgcccagccgacggttgcattcttttgagtttctgatgagcctctccaaaggaggcaatcagatatgcatttatctcagtgagcagagggatgacttcgaatagaatgggaggcaggtttaccctaagcagttcccagcttgacttttccctttagcttagtgatttgggggcccaagatttattttcctttyacagagtgaagatataatctasagaatgggagaatatatttgcaaaccataygtgtggtaagggattaagatccaaaatatataagaaactcaactcaatagtaagaaaacaacctgatatgaaaatggacaaagggcctcaatagacatttcacaaaagaagacatacaaatggccaacaggtgtatgaaaaaatgctcaacatcactaaacatcaggaaaatgcaaattaaaaccacagtgagatatcccctcacacctgttagaatggctcttatcgaaaatacaaaagataaatgttggcaaggatgtggagaaaagagaaatcttgtacactgttgtacaaggtacaatatacaagaatgtacatttggtacaaccattatggaaaacagcatggaagttcctcaaaaaattaaaaatagaatttccatatgatccagcaatcccaacattgagtataaatccaaaggatatgaaatcagtatgtcaaagagatatctgcactcccatgttctacagtattacaagaatcaagttaggaatcaacctaagtgtccattgatagatgaacaaataaaatacagtatgtgtacacaatgaaatattattcagctttaaaaagaataaaatcctgtcatttgcaacaatgtggataaactgagaggacatcacattaagtaaaataagccaggcacagaaagaaaaatacgtaatctcacttgtatatagagtgtaaaaaagtcaaacttatagaagcagagagtaaaatagcggttcccagatgctggaggttgggggattgggaagatattggtcgcaggacacaaaatttcagtgaaataagaggaataagttcaagagatctattgtacatcatggtgactacagttgataacaatgtgttatatacttgcaaatccctaagacagttgattttaagtgttctcaccacacacaaaaaaaatgataagtatgtggcatgatgcatatgttcaataatttgatttagccattccatagtgtgtcacaacatcaggttgtacaccacaaatatatacaatttctacttgtcaattaaaaaataaataaaatatattgacacaggaaatatgtacttaagttccttaaaagtcttttttttttctttttttggagatggagtctcactgtgtcacccaggctggagtgcagtggcgcaatctcggctcactgcaacctctgcttcccatgttcaagcaattctcctgcctcagcctgccaagtagctgggactacaggcacatgtcgccacacccggctaatttttttgtattttaagtagaaacggcgtttcactgtgttgcccaggctggtctcgaactcctgagcttaggcaatccacccgcctcagcctcccaaagtgctaggattacaggcatgagccaccgcatccaacctaaaagttttaatttatgctacattattcaaaataataatattttcaaaacaaaagaaaaaaatgtgtgcaaaatgtttaaaggaataaaggccactgttacaactaacagagatcactgggaaaatatcaataaaaggacccatgaaaagactacaagcaacaattcctcaggtccagtgagcaccataagcatctgatcttaaagaccgaatccttccagccagtagctctttagagaagtggctgattcgaggtgcaggacagggggtgcccaacataggtcagggcatctgtgctaaaatcaaggaagaagccaaagactggttcttgccaaaaagacatggaagctggccgggcatggtggctcatgcctgtaatcccagcactttgggaggccgaggcgggtggatcacctgaggtcaggagttcaagaccagcctggtcaacatggtgaaacctcatctctactaaaaatacaaaaattagccgggtgtggtagcatgcacctgtaatcccagctactagaggggctaagaggcaggagaatcgctggaacccaggaggtggaggttgcagtgagccaagatcgcaccattgcactccagcctggttaaaagagtgagactctgtctcaaaaaaaaagacacagaagccagcttgacaccacatttgatgacaatttgcataaagcaaagttcatccgtagtggcattcataaaaagagaaagaaaaaaacggtgaggagctttttgtgaaagaatgccagttaattcacctagaagtcacggatttagaaaatcacaattttgcaaccaccagtataacaactgattcaggtgaaggtcattagtgaataacagcaccaggtaaaatatggttggatggagcagaatcatcactgccccacctacttgcctcagactctccactcactatgccccaggtgacttcccattgccatttcagcatctccaccctgagggcattttgcccacacataggggaagcggaagtgccgggctattaacaaccctctgaaacagcttgcgccaatgactgatgaaagttggtgcataaatatttcggctcccttggccctcctccaagtgagataactctaaggtgtgtgtgttacacaacttcccagcatctcccaacagtgttaagctctggtttccctgtggtggctggcttaatgacacaactttgattggctgtatccccttccaggtatcacttcttcacccaaataaacatcctgctctcaaattttcatctcaggatcaactttgggaaggatgcaatctacaaccttggtgtcagtgacagagcagaagcactgccatcttggacaaacgccaccattttaaattccagctccctttctaacctcatgcatttcaaggaaatcacttcttttctaacaacaagcagccagaaagagcagacggtaaaacacagataagacagctcaggcagggagagagaggggaaagtctcttgggtaaccaccaagcttcacacccatacaatgggacccagcaaaacagtgggtccaaataagcacattcctttcttttcaggtgcactaagatagggaagctaaaagtaaactcgggggtatgcctgcaggtgcaggaagatgtatgggaacagacacaaaactctccctcccagataagcaagacaaagagacacaggacatttcaagcctgtgataagctctcccaccctgaacccttaaatactcttagtctgtaagagagactgctcccaacctaactcggccagaaggccctctcaggtttactctctgaaataaacctgtctttgactactcagccacttttcatgtttctttcttcttcaattcttacagccaggagtaggaggcagatcctctagtgggaccctggaatgagaccactagccacagggccgctggtgttgagaggtgacaacgtgctagcagccgtcgcttgctctaggtgcctcctgggcctyggcatccactctggccatgctccaggagctcttcagcccrccactgcactgtgggggcccctctctgggctggccgaggccggagccggctccctctgcttgccaggaggtgtggagggagaggcacaggcgggaaccagggctgcgcgccgagctcgcgggccagcacgagttccaggtgggcggggctcagcaggccccgcactgggagyggccagcccacaccacctgcctgggcagtgaggggcttagcacctgggccagcagctgcggagggtgcrccaggtcccccagcactgccagcctgcccatgctgtgctccaattcacaccgggcctcagccgcctccccacggggcagggctcaggacctgcagccggccatgcccaagccccacccctcacccctgtgggctccccagcggcccgagccacctcaacggtgccacctcctgytccggggtgcccgcctggtcccatcgactgcccaagggataaggagtgtgggccacagtgcgggactggcgggcatctccgcccacagctctggcgcaggatccactaggtgaagccagctgggctcctgagtggggtggggacttggagaacttttatgtctggatggaggattgtaaatgcaccaatcagcactctgtgtctagctcagggtttgtggatacgccaatcagcactctgtatctagctaatctggtggggacttggagaacttttatgtctagctggaggattgtaaatgcaccaatcagcaccctgtgtctagctcaaggtttataaacacaccaatcagtgctctgtgtytagttaatctagtgtggacttggagaacttttaggtctagctagaggattgtaaatacaccaatcagcactctgtctagctcagggattgtaaatgcactgattagcaacctgtcaaaacggaccaatcagcgctctataaagaggaccagtcagtgctctataaaacggaccaatcagctctctgtaaaatggaccaatcagcaggatgtgggtggggtcagataagggaataaaagcaggctgcccaagacagcagcgcaacctgttcgggtcccattccacagcgtggaggatttgttctttcactctttgcaatacatcttgctgctcgttcttcgggtccacaatgcctttaggagctgtaacactcacgtgaaggtctgcagcttcactcctgaggccagcaagaccacgaacccaccaggaggaatggacgactccagacgcgccaccttaagagctgtaacactcaccatgaaggtctgcaacttcactcctgaagccagcaagaccacgaacccaccagaaagaaaaaactctgaacacatccaaacatcagaaggaacaaactccggacacaccatctttaagaactgtaacactcacggcgagggtccacagcttcattcttgaagtcagtgagactaataacccaccaattctggacacagtgtgaktggggttgtcatcaccctatggggcatgtcacagcattgccatcacaagctgtcacatatgctgaactgggagaagatacagggaaaaaaggttgtaccttcctgtattagtcagttcttgcactgctataaagaaagaccgggtaatttataaagaaaagaggtttaattggctcatggttccacaggctgtacaggaagcatggctggggaagtgaaggggaagcaggcacatcttcacatggttggagcaggaggaagagaacgaaggggcaggtgwyamccacttttagacaaccaaatctcctgaggactcactcactatcacaagaacagcaagggggaaatccaccctgtgatccaattacctcccaccgaacccctctgccaacaatagggagtacaattcaacatgagatttgggcggggacacaaatccaaaccctatccattcccatttgtgaaatgtccgtagcatgtgaaagatgccgagggaatggggagttttaagtgcggtggaggtgtctgtgtgctgtgaagtgcctgagatgtgaggcaggggagaaaatgatggctcaagtcaaccaaccactaacacatggaatgacgtaagaggcagaggcctctatgaaaacgcagaaagtgacctcttctcctgtcgatggagggcaagacctaatgctgagggggatagaattacagagaagcccaacctcatatccctggcaaatctctgccacctgcaaggctctgccaggggagatgtgggaccctaaaaccagggaaagagacatcggatgggtgcatttgggaaatttgaacacccagagtcccccgtatcctccagtcctgtggaaatcatgcacaccgcttgttaaagggtagctgcctcctttcacctaaagcccattcctgaggcaaatgctttgcacgatggttcttgccttcctcaagatctgcacagcttcctcccctmacagcttctaggacaataaataaggtaaagtctcaacttggcccatcttagattggcccaggaatcaggtcaactgtggcaaaaagcaaaaccagcgagatacgagtggtcatgggagtctgagataataaaatccaagactaagggcctcaaaaaggctggatcctgcagcttcacaattgagaggctaaataattcaccaaatttagaaaagcaaagtggaatatccttcaacctcatggtgcttaggtgacaaagacctactggagaaggccccagaggacgagtgagagttgaaaacctccaggagtataagccgacactaacaagctgcaaccactttctcctgggagcacttgccaatctgggtgcaactaagggctaataaagacgcttctagacaaaaaagaaacctaagggaatctgttgtcagtacggtctgcattaaaagaaataatagagttcctcagatcgatggaaatgatgcaaaccaaaacaacatggaaactcaggcaggaatgaagagcactagatagaatgattgtatgatcaaatctacatgaatattgactgtgccaggcaaaactagaaatattgtgtcgggtttaaaatccatgcagaaagaaaatacgttacaataataaagcaaaaagtggggaggaatcatggagttaaaaatattgtgatggattggcattattggtgaaacgaaagagtaaacatctgtactagatcacaagtcaagaatacgcactgtggccagttgcagtggctcacgcactttcggaggccgaggcgggtggatcacctgaggtcaggagttcaagaccagcctgaccaacatggtgaaaccccatctctactaaaaatacaaaaaattagctgggcgtggtggcgggcacctgtaatcccagctactcgggaagctggggcaggagaatcacttgaacccgagaggcagaggttgcagtgagctgagatcgcaccattgcaccattgtcgcctgggtgacaagatcaagactctgtctcaaaaaatatatatatgtgctgtaatctctagggtaacttttaaaaggctagtaagagaatatataacttacaagcaaatagaaggaaaaatagaataattgtaaaaattgaaaaaaagccagagaggagaaaaaagaacataaaacaagtgagtaaaatacaaaatgaataatcgtatcatagatataaacctaactatattagtaatcacaagaaaaatattaagattgtcagacgtgataaagaaacaacccaaacatacattatgtagaagagacacagccgagcgctatggcctgtaatcccagcaactcaggaggttgaggtgagaggatagcttgaggccaggagtttgagacaagcctgggcaacactgcaagactccatctctacaaaaaaaatttcagccaggtgtggtggctcacacctgtaatcccaacactttgggaggccaagatgggtggatcacctgaagtcaggagtttgagaccagcctggccaatatggtgaaaccccacctctactaaaaatacaaaaaattagccaggcgtggcggcgagtgcctgtaatcccagctactcgggaggctggggcaggagaatcgcttgaacccaacaggcggaggttgcagtgagccgagatcgcaccattgcaccatcatcgcctaggcgacaagagtgagactccgtttcaaaaaaaaaaaacaagtgctgtaatctctagggtaacttttaaaaggctaataagagaatatataacttacaagcaaatagaaggaaaaatagaataattgtaaaaattgggaaaaagccagagaggagaaaaaagaacataaaactggtgagtgaaatacaaaatgaataatcatatcatagatacaaacctaagtatattagtaattacaagaaaaaaatattgtcagacgtgataamgaaacatcccaaacatacattatgtagaagagacacagccaagagctacggcctgtaatcccagcaattcaggaggctgaggcaagaggatagcttgaggccaggagtttgagacaagcctgggcaacatagcaagactccatctctacaaaaaaactttcggccaggcgcagtggctcacacctgtaatcccaacactttgggaggccgagtgggtggatcacctgaggtcaggagttcaagaccagcctggccaacatggtgaaaccctgttcctaccaaaaattcaaaaaattagccagacgtggtgacacatgcctgtagtcccagctactcaggaggctgaggcaggagaattgtttgaacccggaaggcagaggttgcagtgagccgagatcaagccactgtactccagcctgggtgacagagcaaaactccatctcaaaagaaaaatttttttcaataatctggrcatggtgatacgtgcctatagtcccagtttcttggaaggctgaggtgggaggattgcttgagtycaggagtttgaggttgcagtgagctatgattctgcccctgcactccagcctgggtgacagagcaaggccctgtctctaaaaaaataagatgtacaactttaatgtaaatttaagatcacaaacargttgaaaaaaaggggtgagaaaaggcctagtaggcaaacacaaaatggaaagagcaggtacaactatgctaataccagataagatttaaggcaagarccattactagaggaaaagaaggacttttcaccaaaacaaagaggtcaatccaccaagaatatatcaacatcctaaatctagaggccctaaagaacacaatttggaataagtgaaacaaaaattggcataattagcaggaaaaatagacaaattcattatcagaatataagattttaaaactgctgtaacggccaggcgcagtggctcacacctgtaatcccagcacttcaggaggccgaggcaagtggatcacttgaggtcaggagttcaagatcagcctgggcaatgtggtgaatccctgtctactaaaaatacaaaaaattagctgggcgtggtagcacatgcctgtagtccagctactcgggaggctgaagcacaagaattgctcaaacctgggaggtggaggctgcagtgagccaagatcatgccactgcactctagcctgggtgacagagcaagatcctgtctcaaaaaaaaaaaactgctataactaccaaaacaaaccaaaaaataagtaaagatatgagagctaagcaacaaatcagcaagcttgacttacatgacatgtatatgaaactctgcatgttagccctactacctaggcactgaacagatgtctatctgctgaaggatgaataaatagtgttctacttgcacaatgcaatagtattcagcaatgagaaccaacaaaatgcaactacacacaatatggacaaatctcaaaccaatggtattgagagaagaagacagaagagtacgtacaaaattattctatttatgaaaagttcaaacagacaaaattattatataataatctgtagtgttagrcatctatagagagatcaccctttgggaggtttaaaaaccataagatggcttaagtggggcccctggtggtttggtaattattatctttcttgatctgcatgctggttacagaagtgtgtctatttaataaaatccatcaaactgtacacctgtatcttgtgtagctttatacatgtaacacttgaacaaaaacttttttagatggagatgctctatataatccctagaatacttctttgtaaagagtaatggcttcaagagaggtggcctaatgygatggttaggagcacacacttcagagctagcatctgtatttggaaacctayattctgcctgtctagccatgtcactatggaagatctgaaactckgatttctttcatctcacagctttttactacctcaaacgttgttcaaagattagggtaagtgatctgaatgataccatgcacatatttgtttatgttaaaagataattctttctgcaacaagttttggatattcccaataggaaaaaggggagggaggctggcaggcatagtggctcatgtctgtaatctcagcactttgggaggccgaggtggacatcaatgaacatctaggaaaacatgacattaccaaatgaactaaataagacaccaatgaccaattctagagtaacagacatatatgacagagaattaaaaatagttgttttgaggaaacacaacaaaagtcaagataacacagagaaggaattcagaatcctatcataaatgtaaccaacaaattgaaataatttttaaaaatcaagcagaaatcctgaagctgaaaaattcaactgacatactgcagagtgcatcagagtctctcaagagcagaattgatcaagcaggaagaattagtgagcttgaagacaggctgtttgaaaatagtcagaggagacaaaagaaaaaagaataaaaaagaatgaagcatgcttacaagatgtagaagatagcctcaaaacggaaaatctaagttattgaccttaaagaggaagtagagagattaggatagaaagtttactcaaagggataataataaagaactttcccaatctactgtaatatatccatagtcaagtacaagaaggttatagaacaccaggccaatttagccaaaataagactacttcaagacatttaataatcaaactcccaaatgtgaaggataatgaaaggatcctaaaagcagcaagagaaaagaaacaaataacatacaaaggagctccaatacatctggtagcagacttcccagtggaaaacttacaggccaggagagagtggcatgacatatttaaagtgctgaagaaacttttatcttggatagtaaatccagcaaaaatatccttcaaacatcaagaagaaatactttcccaggcaaacaaaagccaagggatgtcatcaataccagacctgtcctacaagaaatgttaaggggagttcttcaatctgaaagaagaggacattaacaataagaaattatctgaaggtacaaaacttattggtaatattcttaatattgtacacaaacacacagtattataacactgtaattatggtatgtaaactactcatatcttgagtagaaagacaaaaagatgaacctatcaaaaataataactacaacaactttttaagatacagacagtataataaaatataaatagaaaaaaagtttaaacgtaggggggatgaagttaaagtgtagtttttattcattttctctttgcctatttgttagtttgtttttgcaattagtgttgtcatcagtttaaaataacggcttttaagatgttttttgcaagccttatggtaatctcaaatcaaaacacctacaacagatacacaaaaatcaagaaattaaaacataccaccagagaaaatcaccttcacaaaaaggaagacaggaaggaagagaagaccccaaaacaaccagaaaacaagtaacaaaatggcagtaataagtccttacttatccataacaccattgaatgtaaatgggctaaactcgttaatcaaaacacacagagtagctgaatggattttataaaaacaagacccaatgatctgttgcctacaagaaacacacataaggacacatatagactgaaaataaagggatggaaaaagatgttccatgcaaatggaaaccaaaaaaagggtagcagtagctatacttctatcagattaaataatatcaagacaaaaatctataaaaagagatgaagtttactatataatgataggggcaatgcagcatgaggatataacagttgcaaatatatatacaccccacactggagcctcaagatatataaagcaaatattattagatctaaagagagagatagaccccaatacaataatagctggagactttaatgccccactttcagcattggacagatcatccagagagaaaatcaacaaacaaacatcagacttaatctgcaccatagaacagaagaacctaacagatatttacagaacatatcatccaatagctccagaatacacactcttctcctcagcacatggatcatgctcaatgatagaccatatgttaggttacaaaacaaatctttaaaatttcaaagaaactgaaattatatcaagtatattctctgcccacaatggaacaaaactagaaatcaataacaagagaaactttggaaactgtacaaacacatggaaattaaacaatatgttcttgaatgaccagcaggtcaatgaagaaattaagatgaaaatttaaaattttcttgaagaaatgacaatagaaacacaacataccaaaacctatgggatacagccaaaacaatactcaaaggagggtttacagcaataagcacctacatcaaaaaagcagaaaaatttcaaataaacaacctaatattgcatcttaaagaactgcaaaagcaagagcaaacaaacccaaaattagtagaagaaagaaagaataaaaatcagagcagaaataaatgaaattgaaataaaaaatgtacaaaagatcaataaaacaaaaagttggctttttgaaaagataaacaaaaccaacaaacccttaaccagactaagaaaaaaagaaagatgacccaaataaataaaatcagagatgaaaaaggagacattacacctgataccgcagaaattcaaaggatgattagagactactatgatcaactatatgccaataaattgaaaaacctagaagaaatggataagttcctagacacatacaatctacaaagattgagccatgaagaaatccaaaatgtgaatagatcaataacaagtaatgagatcaaagccgtaataataaaaaaaaaatctccgagcaaagcaaaacccaggacccaatggcttcactgctaaatcttaccaaacatttaaagaagaactaataccaatcctactcaaagtattccaaaaaacagaggaagagagaatacttccaaactcattctatgaggccagtattaccctgatatgaaaaccagacaaagacacatgaaaaaaagaaaattacaggccaatatccccaatgaacattgatgcgaaaatactcaacacaataccagcaaacaaattcagcagcacattaaaaagatcattcatcatgaccaagtgggatttatcccaagactgcatgcatggaacaacatacacaggtcaatcgatgtgatagatcatatcagcataataaaggagaaaaaccatatgatcatttcaactgatgctgaaaaagcatttgataaaattccatatcctttcatgatttgaaaaaaaaaactcaaaaactgggtataaaaggcacatgcctcaacacaataaaaagcatggctttcatgttgagatatgttccttctatacccagtttttgcatccttcaactttcatatataatatatatgtrtatatatatatatatatatatatatatatatatatatatatatawgttgatcatactaatatcatagtgaatgcggaaaaatgaaagccttttctctaagatctggaacaagacaaggatgcccactttcatcgctgttattcaacatagtactggaagtcctagctagagtaatcagacaaaagaaagaaataaaaggcattcaaaatggaaaggaagaagtgaaattatttttatttgcagataatatgatcttatacttgaaaaaaacgaaagactccaccaaaaggctattagaactgataaacaaatttagtaaagttgcagaatacaaaatcaacatacaaaaatcagtagcatttttatatgctaacagcaaacaatctgaaaaagaaatcaagaaagtaatcccatttacaatagctacaaattaaacaaaatacctaggaataaacttaaccaaggaagtgaaaaatctttacaataaaaacttttatgcaagatattgaagaggacaccaaaaaatggaaagatattccatgttcatggattagaagaatcaatattattaaaatgtccatgctacccaaagcaatctacagattcagtgcaatctctattaaagtactaatgaaattcctcacagaaatagaaaaaaaatcctaaaatttatatgggaccacaaaaggcccagaacagtcagaaccatcatgaggaaaaaaaaaaaaaaaaaaaaactggaggaatcccattacctgattttaaattatactacagagctatagcaatgaagtaacaaaaacaggatggtactgacataaaaacagacacatagaccaatggaacagaatagagaacccagaaataaatccatacagccacagtgaactcattttcaacaaagctttcaagaacatgtattgagaaagggattgtctcgtcagtaaattgtgctgggaaaactggatgttcatatgcagaagaatgaaaccagatcgctctctcaccatacacaaaaatcaaatcaaaatggattaaagacttaaatctaaaacctgaaactatgaaactactaaaagaaaacataggagaaactctccaggacattggtacgaacaaagatttcttgagtaatacttcacaggcacaggcaaccgaagcaaaaaatggacaaatggaatcacattttaaaaaatcacatcattaaaaagcttctgcatagcaaaggaaactagcaacaaagtgaagagacaatccacagaatgagagaaaatatttgcaaactatccatctgacaagggattaataaccagaatatataaggagctcaaacaattcaataggaaaaaaaatctaacaatttgatttaaaatgggcaaaagattgaatagacatttctcaaaagaatacatccaaatggcaaacagctatgtgaacaggtgctcaacatcactgatcatcagggaaacacaaatcaaaactccaatgagacatcatctcatactagttaaaatagcttttatctaaaaggcaggaaataatgaatgctggagtgttgagaaagggaaccctcgtacactgttggtgggaatgtaaattagtrcagccacttggaaaacaacatggagcttcctcagaaaactaaaaatagacagggcgcagtggctcctgcctgcaatcccagcactttgggaggccaaggcgggtggatcacctgaggtcaggagttcgagaccagcgtggccaacacaacgaaaccctgtctctactaaaaatgcaaaaaatagccgggcatggcggtgcgtgcctgtgatcccagctactcaggaggctgaggcaggagaatctcttgaacctgggaggtggaggttgcagtgagccaagatcataccactgcactccaccctgggcaacagaacgagattccatcccaaaaaagaaaaaaataatcaaaaaacaaaaagaaaactaagaatagaactaccataggatccagcaatcccactgatagggatatacctaaaagaaagtaaatcagtaaatcaaagagatgtctgcactctcatgcattgcagcactattcacaatatccaagatttggaaccgaggtgtccatcaacaaaagaataaataaaatgtggtacatatgcacaatggagtactattcagccatagaaaagaatgagattctgtcatttgcaaccacatggatggaaatggaggacattatgttaagtaaaataagccaggcacagaaagacaagctttacatgttctcactcatttgtgggagctaaaaattaaaaccatggaattcatggagatgagagtagaatgatggttactggaggctgggaagggtagaaaggggtggagggtagggacagttaaggagtacaaagatatattcagatagaatgaataagatatagtatttgatagcacaacagggtgactaaagtcaacaataatgtattaaatatttttaaaataactaaaagagtataattggattgtttgtaacaccaaaaaaatgataaatgcttgaagtgatgaacaccccatttcccctgatgtgattattacaaattgcatgcctgtatcaaaatatctcatgtaccgcatagatacatacactgctatgtacccacaaaaattaaaaataaagataaatgaataagatataaaaagcaataggggaaactgaatgaagggcatatgagaaactctttgtgtcatctttgcaacttctctgtaaatctaaaaaaaaaaatcagagtaattcactacttgtgatggttaattttatgtatcaacttgactgagccacaggtggctcagatatttagccaaacattattctaagtatgtctgtgagggtgtttctggatgagattaacatttcaatcagtagactgagcacaacagattgccctccccaatgtgggtggacctcacccaatcaactgaagacttaagtagaataaaaagattgagtaagagggaatgcctcctaccagacttgttgacctgagacattggtcttgcaggcttttgggctcagagagaaacataactcttcttaggtcttgaggctgctggcctttggatcagcagctctcctggttctccaccttgcccactgcaaatcttgggacttctcagcctccattatcacatgagccaattccttatagcaaatctatatctatctaactatctatctatctatctatctatctaatatggtttggctctgtgtccctgcccaaatctcatcttgtagccctaccagggcactgcctagtggagctgtgagaagagggccaccatcctccagatcccagaatggtagatctactgacagcttgcaccatgtgcctggaaaagctgcagacactcaacaccagcccatgaaagcagccaggagggaggctgcaccctgcaaaggggcggagctgctgaagactatgggaacctacctcttgcatccacatgacctggatgtaagacgtggactcaaaggagatcattttggagctttaagatttgactgccatgctggattttggacttgcatggggcctgtagcctctctgttttggccaatttctcccatttggaatggttgtatttacccagtgcctataccttcattgtatctaggggcagaatgatatggtttggctctgtgtccccaccaaaatctcatattgtagctcccataattcccacgtgttgtgggaggtacgcagtgggagatgattgaattatggggcaggtctttcccatgctgtttcatgatagtgaatgagtctcatgagatctgatggttttgaaaacaggagttgtcctgcacaagctctctctctttgtttgctgccatccacataaaatgtgacttgctcctccttgccttcctccaggattgtgaggcctccccagccatgtggaacagtaagtccaataaacctctttcttttgtaaattgcccagtctcaggtatgtcttcatcagcagaatgaaaatagactaattatctatctatctatctatctatctatctacctacctatctatatctatccacctatacctatatctatctatctatatctctctatctacctatcctattagttctgtttctctctgaaaaaccctaactaatacaccatattcacagaaagaaaaaaatgagaaaactcccatgattatctcaatagatgcagagaaggcatttaacaaaattaatgattaaaaactcttagaaaactaagaataaaataacacttccatgatctgaaaaagaagtctacagaaaccatcataggaattggtaaaatgttgaaagttttctccctgaaaccaagaacaagacaaagatgtccattatcaccacctctattcaatattgtattgaaggtcttagtcagtgtagaaggacaaagaatggagatgaaaggcatccacgtagaaaagaaaactataaaactgttattatttgcaaataacatgattgtgttattagaaaatccaaatgaacctaccaataaatgattttcagtaataagtgcatttagcagcattgccgtatacaaggtcaatatacaaaaatcacttgtatttctacatgccagcaacaaatgttagaaacttagaaaagcttttgaaaaacataaaacactcttaggtgaatgaatataatgaaagatgtataagacttctatgctgaaaactacaaaacactattaagggaaattaaaccctaaataaataaagaatatatactatgttaatcattgaaaggctcattatttttagatgtgaaattctccccaaaatcatttaaatatttcatataatcacatccaattcccaggagaagtcgcttttggtggaaaatgataacctaactctaaaatgtgtatgaaaatgcaaaggctgagaataaccaaggtgatcctgaagaaggaggaggcagacgatgaggatgagaaggagaaaactgaaggtaattaagacactgtgatattggtacaaaggtagaaatataaaccaacagaaaaagagtttagaaactgattcgaaaatatacaatcccctgatttatgacaaggacacaggagaacactggagatgtgagggtcttgtcagtaaatgctggtgttaattggatatatatttgggaaaaaaaaaaaaggtatcttcaccccctaactcaaatcatgtctaacaattgaggtaggaggtggtattagactctggaggtgaggctcagacaccagaccaaattgaggactagctaaaacaggtctagggccaaagcacctccacataagacacacccaccagtgtgccacgccagtgtaccattgccatggcaacaccagggatttaccacccctttccgtagcaacaacctgataacccagaagttaccgctctcatcctagaaatctctgtataaactaccccttaatttgcatataattaagcatgggtataaatatgagtgcagacctgcctctgagctgctgctctgggctcactgtctaaggggtggccctgctctgcaaggggcagtccctctgccactgctgtgcattgctgcttcaataaacgttgctggctaacaccaccagctcacccttgaattcttacctggaggaagccaggaaccccccagggctaagccccaatttgggggcttgcttatcctgtatcacaatctattctagacagattgtagatgtaaatagtaaagatgtttttagaaaagttttctcttttgttttcaattgagttagtttctgctctcatatggtttttctgtttgttttttggtggtttttgttttgttttgttttgttttgtttttgagacagggtcttgctctgttgcccaggctggagtgcgatggcacgatctcagctcactgcaactgccgcctccygggttccagtgattctcctgcctcagccacctgagtagctggggttataggagtgtgccatcgtgcccaactaacttggggtttttttttktttttgtttaagacagagtctcactctgttgcccaggctggagtgcagtggcacaatctcggctcactacaacctctgcctccagggttgaagtgattctcctgcctcagccactcgagtagctgggattacaggcgcccaccaccacacctggctaatttttttattcttagtagagacgggttttgccatgttggccaggctggtctcgaactcctgacctcaggtgatccgcccgcctcgagcctcccaaagtgctgggatcacaggcgtgagccactgcatccggccttatatgtattatgtcctgctttctgtttgctttggacttctgttgctcttcttttcctagtttcttaatgtagaagcttagatatttgatgagagacctttctttgtttctaatacagagctttaatgttctatctttaatgttctatatttaatgctgtaaatgcttaaggggaaatttatatagaagtgaagtgtcacaatgtctgaatattactttccagtgggttgtggggggaaggtacatatataaaaagagtgacagagaacgaacgtgacaaaagaaggcaaaatgttaacgtgaagaattatgagagattatttgggcatctcatttttccgtggatttggacatttttgtccagtccccagaggtgacagtgtggcctctatggctgccccgtgctctgtgaccggcgcatattcaccacgggtgagcccctcgagctgggccctggggagagagagggcggtgcccaagccaggaccctgcgggccggggctggaggaggcgcaggtcccggcgtccatgtgcagccctgcggccggggcgcgagatctccccgcaggcggccgctccccgccaggggcttccgggagcagccgaagcctgaacctggacgagccgcgaccgcagccggcggggggtgccgtcctcctcgccctccctggagcccggccctgggcccacgccgtgccccgagcctcctctgcggcccgcccccagttcccccggtccgccgcggccgggcatggggaggtgaaggcctccgtggggtgacagggggcgcggggccgcttgtccccagcgcaggaggagccgggacccgacgcgcaccctccggcctgctggaggctgagccgccgcagggaaagcacgtgggtgaagggcccagcgcggcggttccttgaaaaagcgggagcctggtctcagctggggcctggggcctgccccgcccatgcaggggtcgcgggagcaggggctcggcctccttcccaggccgtggcggcgccgccccggaggcagggacaggggcgagctcccgctgagccgcacttcctgggcgaggccgctgcaggcagcgccggaggcacgtgccccgagggcctcctcttctgccccagcttgacaggcagccctgggaggagtgagaagctgctggcgccggattcctgcccctaactcccttcaggaggaaattcatgaggcccaggccaagagaggaggcttcccggcaaaaagggaagggctgggcaggggcagcaggaaccacggcccgaggggtgagagcttctgggctctgagagcctgaccctgacttcccttggcccgtggacatgacctctccaggtcagattcctcctccgcagaatggaggggatggtactggcaggaggttgtaccgacctcgcaaggccatctcgagggctcgaggaaaggcctaccacgcatggcccgtggacagagctggtaaatattggctgtcactaagttcaaggccgcagggaacatggcagagtgacccaggtgtcagcacaggccttgtgcatgaggaagcgctaggggaagggaaggagacctctacacccactgcctgcacaccctgggacaggactccagaagtccccgcccaaatccccctccatctccccctctaacctaagccccaggtgctgtgccgtatccccagcacccagcacagtgcctggcacacagcatgactgcccacaggggcaggggctgcagagaacccgcagggatacagccgacctgcaggcccagtaacaactaggtttttaaaatccagaatgaggctctgcggttcacctggagacatgaagactgggtctggcgccacacacacacagcagggtctgtggtctccgtttccaaggcccccgaatccctggcagtccccagcccagctgcagcagggaccagcttccttagctggaccatgatccccctcgagcattagagacaggagctagttctgaagagcccgggacaggtgtagtgaagatgcctgtcccgtgaaatcctcccctttaatgaggaggctgcctaccgccggggccaaggaactgaaatggagcaagaaggggccgcaggcaattcaccaccagcagggcctgtgagtccttgagccccgcataaaaaagtatccagcttggcgcaatctaaggtgtaattgtaccatttggtcaccagagggcgctcaataatcatctttgcttttagtatcgcaaattacgcagcagaaaacttcctgcccattcagcacacgcaagccactgttgcatgtttcttgtgtcagctcaagtaattctcacaaccagccatgaagtatttgttgttgcccttacacagccgaagaatctgaggttcagagtatttgagtaatttggctgaggtcacacagcagtgactcttagaggcaggaccaagcccaggtcttgtctccagaggctgcactgtgcacccccatactgcttcctgttcgacctgtatgatactgcatgcatttaagttcatgttctagcaaaatatctccctgtataaggtgccaaacttttatttgaagtgctaggggtgcacacagtgcagcacagaggaaagtcctttgtttcgtcccaggagtttgggtctgaccctgtagcagggtgtgcttgtgccggctcacaagcagactattacagtgcagggtgtgtagtaggaccctctgggctccctcatccccaccagtgctcacatgctcctgatcaccaaggacagccgtcctggacctccccaagtcgtcatgcaggccatctgggaagggaatatgcccaggagctccgcctctgagctgttggaaatgcatgccccagggtgggctcagagagcaggcaaacayacagggtattgtccaggtgacggagggggtcctgggccctatctgggggctgctgtagggttagcagctgagaaagggcctcacagctctagccaaggagtcttccctattcacccaaatctggaagtttcatatggttctggagacccggctctgagaggaccccagctccagagggcggaggccacatttgcatcccccggctttgcaaagccctgccacatagcagtggactccatacatactcagaggtaaagagagggtgagaaagagaaagggaaggatgaagggagggaggctcagacagagggtggaaggggcaaagaccagcgagtccatctgggccccacaagtggacccagggagctggcatggggcgtggcttgtggaggagggtgagtctggacagcagcgggccacctgtttaggctttgtcccaggagtctgggtctgaccctgtagcagggtgtgcttgtgccggctcacaagcagactattacattttcaggaattttgcagatcagttgttaagcacagccattattaaagattaaattatattcaaaaacaggtaataaatactcaaaactttctaacattttactatactttattgttttctctgccgttgaggttatttctgtgtggtgcgtctgtgtagtagagcctgtgtgacgatgtgctattgatctcttccccacggcatagtcagtgacttcagattggtagtttgaaattggccatgacaggcagatttacaccatggaaattggcaaacactgccaatcggggctttttatccagagcagtcgttaaacatttacacgtagtgcactactgtccataaggggcagcatggtcagactgcacttttaaaaggtcttgagggcaggggaaccaagaggcgttcaagtaaaggagtgaagaatcagagcgtgacgtagtttagcgacttggaccaggacacgtttgaaagcctaagtaccttagaggagccactggctgacgtccagatggcagaaagaaagccaccccaaatcaggccctctcattcagtgctgaggagcacggtctagacggctggttcaacttttaaacacatgggaaaataatccccactgggacacagccccgccgccctggatcccagcctgccccagggtgtctgtctgctgcttctgccaccctgcagctgcgcaaatgtttggggaagggtcctatctggaggggcctcctttcaccgcccagatgcagcagggcaagcctgggcagctgtgttggacaccagccccacgctgcctccgttgccttcattctcagatgaggaggatgcagggaaacagggcaggggtgggggatgggggagggacagaaggcgaggactgcagttttggggcattttcaacatcattagccacgtcgagtagacggccggaggtgggtgggagaggtatttgggcattgctggcacgcacgtaggagctccacaggggccagtgtaggtaaagggaagaactgaggtcggagaggagctgagaacatgtggtgggggcatcggtggaggcaaagggccccccaaaacagctcgctccctggctggagatgctgtgccaaacagaaagaggaggaggacttcatcggaggaggccaagctagtgccacctagcagtgccctacacttaggttccaaaagcttggtgtcttgggttctcaggcaccataggccacagtgctcacatataaagggtatatggaggttaaaaaaaaaagcctctgtgaccaaacggtctcctcaccaacacacagctcacagctgagttctgccttaaatgcaatgaggtctgcctgaccccataatctcacattggccccaactggccaacaccagccaccacgaccaatccagaacctttgctagaccagctgaggctgcaggagagaggtcctggcttcagcgagaaggaaatgaaggatacatcagcccaagatatatcctaggtggaccagccaggtcacctaggccctgcctatagcccaggccggcacacgggacctgtccctcttcctgttggtcagcacagggatccaggaagcgagaagtggggaggtggggccttttatgcagtgactgtgcccaccgaccacacctgctggccacgcctactgctaaacgcagcccaaacagtgactcagcttccaccaatccaatcagcatccgttcctccatgggaggtgtttggagagggagtaggctcagagatgagctgaggtctggaagactcctctccaacaaacatctcaggggaacccaaacaccaagaggcaggagcacagctgctctggccaaagggagggcctcaagcccacttagtcttcacctcactaggagccagggcacactgcctgtgagaatgctgggagcccactcactccttaaaaccacactgtgaggccagattcactacccttcttgtacagaagaagagactgaggttcagagaggcccactatacacccaatggcacacagctgttgggtagcagcctcactggcctccttcactgggcttgtccccctccagtgactgcctggttagggacaccaggcatgaggctaggacaggcaccccatggatcagctccacctgcctctcaatggctcacccaaaaagataccagtaactcaaaggaagggggtgctgtggtctgaatgtgttcccccaacatttatgtgttgaaatcctaactcccaggcgatggtattaagaggaaattggtaccaagtgggggtgctactgtaacaagtacctaaaaatgtggaagcagctttggaactggaagagtttgggggtacctgccagaaaacgcctacattgccatgaatgaaccattaagggtgattctggggagggctcagaaagacaagagacttggaatcccacagaccatgttccccggggccgcctgtccacccccctcactcaaccaccgggccatccagtgctggggatgaggaaacagccgggcccctgcctgcctgtggaggccccatctggtcatctgctgtcacccatgacgaagtgcaaggaggtctatgtttgaatgtcccagaggccagcccagccactccactgagaatttcacccctcccaggcgtcacctcccttcccagcttcatgtagctccaggacacaggaaacagcattcctcctttaccctgttgcctccaccctccaccacaacacagacaccaggcaggctctttccagcactgtgttccctgcagaaccccctgccacagacccacactcattccctgaagggagggaggcaggcagaagggtggcaggaggacccccctgcacagagctgctgccccagctgcacggccagagaaggggggcagccagtgtggggaggggtggcagtcaaaggagtgccacaggggagcagcagctggggctgggtctagacactcaacagaggttgactggaagcttccactgtggctaagggacagccactcctgccttgtcccctcacaggtcaagtcctcagaggaaacacagaggacagaactcagcacttcccaactgcaatctcaccccacccagcgagatctcaccccacccagcgagatctcacccgacccaccgatatctcaccccacccaccgagatctcaccccaccgagatctcaccccaccgagatctcaccccacccaccatcatctctccccacccaccgtcatctcaccccacccaccgtcatctctccccacccaccgtcatctcaccccacccaccgtcatctcaccccacccaccatctctccccccccaccgtcatctcccccccacccaccatctctccccacccaccgtcatctctccccacccaccgtcatctctccccacccaccgtcatctcaccccacccactgtcatctcaccccaccgagatctcaccccacccactgtcatctcaccccacccactgtcatctcaccccacccaccgagatctcaccccacccaccatcatctctccccacccaccgtcatctcatcccacccaccgtcatctctccccacccaccgtcatctcatcccacccaccgtcatctctccccacccaccgtcatctcatcccacccaccgtcatctctccccacccactgtcatctctccccacccaccgtcatctcaccccacccaccgtcatctcaccccacccactgtcatctctccccacccactgagatctcaccccacccgccgtcatctcaccccacccactgtcatctctccccacccaccaagatctcaccccacccaccgagatctcaccccacccaccgtcatttctccccacccactgtcatctctcccgacccaccgtcatctcaccccacccaccgtcatctcatcccacccaccgtcatctcaccccaccgtcatctcaccccacccaccgtcatctcaccccactgtcatctcaccccacccaccatcatctcaccccacccaccgtcatctcaccccacccaccgtcatctctccccacccaccgtcatctcaccccacccaccgtcatctctccccacccaccaagatctcaccccacccaccgtcatctctccccaccgtcatctcaccccacccaccgtcatctcaccccacccaccgtcatctctccccacccaccgagatctcaccccacccaccgtcatctcaccccacccaccgtcatctcaccccacccaccgtcatctccccccacccactgtcatctctccccacccactgtcatctcaccccaccgagatctctccccacccaccgtcatctctcccaacccactgtcatctcaccccacccactgtcatctcacccgagatctcaccccacccaccgtcatctccccccacccaccgtcatctccccccacccactgtcatctctcccaacccactgtcatctcacccgagatctcaccccacccactgtcatctcaccccacccactgtcatctcaccccacccactgtcatctctccccaccgtcatctcaccccacccgctgtcatctcaccccacccactgtcatctctccccacccactgtcatctcaccccacccactgtcatctctccccacccactgtcatctcaccccacccactgtcatctcaccccacccaccgtcatctctccggacccaccgtcatctctccccacccaccgtcatctcatcccacccaccgtcatctctccccacccaccgtcatctccccccacccaccgtcatctccccccacccactgtcatctctccccacccaccgtcatctcaccccacccaccgtcatctcaccccacccaccgtcatctcaccccacccactgtcatcccaccccacccactgtcatctcacccgagatctcaccccacccactgtcatctcaccccacccgctgtcatctcaccccacccaccgtcatctcaccccacccactgtcatctcaccccaccgagatctcaccccacccaccgtcatctctccccacccactgtcatctcaccccacccactgagatctcacccaagtataatcttgcagcaccgcttttctttctaatgtcttgacaagcaggtgagaagatgctgagtgttcttggtccattgctgtggctacaaaggctggttctagtgtctcactggctgtctcctgctcaagcatggttttagcagttcccttcttatcccgggccatactagacctactgtcttccctggcttgcactatgctatggtttgaatgtttgtctccttcctcatgttgaaatttaacccccaatgtggcagtattgggaggtggggcctttaagaggtgattatgtcatatgtccccttccctcatgagtagattactccattcagcgagtaatgggctaatggatgttcttgggagtaggacttgtggctctataacaaggagagagaactgagcttgcacactcagcccctcatcttgtgatgccctgggctgccttgggactttgcagaaagtccctgctagcatgaaggccctcaccagatgcagcctctcaaccttggacttcccagccttcaggactgtaagaaataaatcttgtttctttattaattacccagtttcaggtattctgttataagccacagtaaatggactaagacaggctgtggtaacaaactaccattaaatgggtggcttaaataacagatttatttcttagagttctagggtctggggagtccaagatcaaggtgctggtagatcccctgtctgatacgagctcacttccaggtttgtagatagccaccttctcattgtgtcctacatggcagacagcagacagaggaggagcaaactccactgtctcttcgtataagggcactaatcccattcatgagggccacaccctcatgacctaattacatcccaaaggcccacctctgaatatccttgtgttgaaggttaggaattcaacacatgaatttgggggagacaaacgtttagtccataacacctataacaaccaagacacagctaccagccacatgtggctactgagccagtatgaattgggatgggctataaaatgcaaaatatacactgaaatgtaatgattctgtataaaggctgggtacagtggcttaggcctataatcccaacaatttgggaggctgaggtgggaagatcccttgagaccagcctgggcaacataggaagaccccatttctagaaaaaaatttcccagtctgggcaacatagagagaacttgtctctgtagaaatttttaaaaattagccaggcatggtgcaggcacctgtagtcccatctacccaggaggctgaggtggaaggataccctgagcctgggaggtcgaggcttcagtaagctatgatcatgccactgcactccagcctgggttacagagtgagcctcttctcaatttaaaaaaaaaaaaaaaaaaaaagatttagtaggaaaaaaggatgaaggcaaaatatctcattaataagttttattttgatggcatgttgcgatgataatattttgagcatatcttggactacattaaatatattactaaaatcaatgtcatctttttctttttacttttgaaatgtgggcactaagaattttttaacacctacgtggttcgcacttgtggctcacatgacatccctattgggcagagctagtccagaggattctgagcctttggcgccagtgcttggatcatctgagttgtaggcgccctcccctcatgcgtgcacaagcagtgaagatcttgatctcactcttgggtcgatgagttaaatgtgtgtgatactacagagggaggcaggcagcccaggtgttgcagggctgtgagtggaagcttcgggggcatctgcttctctgtcttgcaggtcttcaagtgattgtccgggaaagtctggggagaggtggggatactgcagttgcaaaccccagtgctggaggtggggcctggtgggaggtgactggatcttggggcggtttctcatggtttaacaccacccaccttggtgctcctgcttggcctcagccataagtcaaagatccccaaggcctccccagaggcagatgctgccatgcttcctgtatagcctgtggaaccacgagccaatgacacctgcttcctttataaattacccagtctcaggtatttctttatagcagtgcaagaacggactacagcactccagtgccggcctctctccaagggcagctccacttccagcctccactcttgggtcatctgggacctgtggacattcaccccaagcgaagccaagagtcccctttgggatgaataaatccaatggctgaccaggtggtgacctccaggcctggcaaagctgcctcccacgaagccctatctccatattgaggattgcaattccacatgagatttgggcggagacaaagatccaaaccatatcatgggtcagaaacctgagtatggaacaggacgtggccagtgagggccggtggggggcagcatggagagtcacactggtgagaactcatcaaggtctgtccactgggtctgagcaacaccccctgacctgcctgccccaccccaagccaagacgccaactggaggctgcatcccctccactgctggctgcagtgttgaagattgggaggctctccctcttccgcaggcatagaatttcaaattgacacagactgcagtggaaccgctgacccagcactaacctcacccatcccagcccctcggcaggcctgccagcgggtagcttcctgccccagtcacccctgcaggacaccagctctccattcctctggcacccgtgtcaacctctcgttcccacagtggctgccttggctcatgccttcacatgtttctcccttgcactctcccaggcccctgacccatctctgcacctctcagctctcctgccgctgcacctgcccacattcccgagtcagagccccctgctgcgcaccgccacctgggcagcctctcaacaggagagtttaaccgacacccagctctgggtgcactcctcagcagagccacccttggctcccagaatgcccaccctgtgacccctcttcggctggactgcaaggagtctctgtgccaacaaggaaaaggcgcccctgctggctgcaggacatgggctgtggagggaagtgtctgacccagacagtgcccagttgtaattatctcataacccgcagtctttacttgtctgacttcctttttagaccatgggaactgccagggcagatccctagacgctcaataaatgcatctttayttagaatgcacaggtgcagttatccagcgggcgcagtggaagtggggatgcaggaggtgcctgtgaatgggcagccggggagattctaatgtgggcagagagcggagaggacctgggaaggaagggaggggccgcggcactgggagtcacaggccaggctgtcgctttgagggtctgcacagagggcaggaccagaggagaccaccctgggactgcacagagccggcttgagggtccagccccttaaagacaatcctctagaggctgcagagtttcctcgagctgccataacaaagctcacaggctgtgtcccccagccacccttcacccgccgattcctgtgttgaagccctaacccccagtacctcagaatgtggctgcatttggagactgggcctttaaaaaggtgattgagttaaattgaggcccttaggttggccctaatccaacccggctgacatcctttaaaaaaaaaaaaaaaaaagaggtgattcagacacacaaagagccaccagggatgtgtgagtgcataaaaatagagcatgtgagggtgcagcgagcaggcggccgcctgcagaccaaggagagaggcctccagagaaatcagctctgccggcatctttgtctcagacttctgacctccagaaccgtgagaggacacatttctgtggttgaagccctgcgtctgtgagatttgttacagcagcccttgctggctaatatcatggcttggactagacacgaccccttcacagttttggaggtcagaagtctgagaccacggtgcaggcagggctgtgctccctctgagggcgctaggaagggcctgttcctggcctccctcagagcttctgctggttccttggcttggggcagcagaactccaatccacacgtggccctctccctgtgtgcgtgtctgtgtccaaatttccccttttggataaagacatcggtcaggtggactaggacccaccctaatgaccacatcttcacttcaatacatctgcaatgaccctgtatccaaataagttcacattctgagacgctgggagttacgactccaacacatggattttggcagacacaattcaacctgttacagactggatttctcagagaaattccggtgctgaatmactggcctccaatgcgaccacattcgaagatagggccatcagggaggtagctaaggttatgaggccacgagggtgggccctcaagccaatagggttggagtccttataccaagaggaaagacaccagagaccaccccctctctaagtgtgcacagggaagaggccatgggaggatgccgtgagaaggtgacacccgccggccaggaagagaggccttcccagaaaccaaccccacgagcgccctgatgtggacttccagcctccaaaactgtgagaaacaagtttctgctgtttaagccacccagtctgtggcacttcttatggcagcctaagcagaagaaaatgccacccagagccttatctattaaatcgtttggttgcaaatgacagaaacttaaattaaaccactttaaccagaggaaaatttctagctgggcatggtggctcacacctgtaatcccagcactctgggaggccgaggtgggcagatcccttgagctcaggagttcgagaccagctttggcaacatggtgaaacccctgtctgtacaaaaaataccaaaaaatagcttggtgtgctggcacatgcctatagtctcagctactcgggaggctgaggtaaggggattgcttgagccttggaggttgaggctggagccaagattgtggcagagtgagaccttgtgtcaataaaaaggaaaggaaaggagaggggaggagaggggaggagaggggagaggaggagaggggaggggagggaaggggaagggaggggaggagggggagggcaggggagcagggaaggagaaggaaggggaagggaggggaggagaagggaggggaggggagggacctaaggaggcatgtcacctgaatgtcacgtggagtcctgagtagaatcgtggaacaggaagacgacattagggaaaaactaagggaatctgaataaaaggtggatttaatatgtcaaaaatggtgctataatggtgacaaatgtaccatatgctgtgaggggaggggaggggaggggaggggagtaggaaggattcttagctcaagaactgaataggccaagcatagatctgggcgcagcagtctccagggctcttcgggccccacgtctgtctgtttctacgaatgcctctcccagcggccctttcctccctgggttctgtcctggagtgactctccagctgtgtgcctgtccgctcaacaacttccatagacaggaagcactccctccagaagctcagggctgtgttgagagactcacagaggccaagcagcagcttacacaggacacagtgacaagaggacacagtgacaatgagacacaggacacaggacacagtgacgacaggacacagtgacaacagggcacaggacacagagatgatgggacacaggacacagggatgacgggacacaggacacagtggatcacaggggccagacatgaaacagggaactcagaaggaacccacagagatgacgaaggacccaggaggcccctgaaggagctctcaacggcctaggctgggacaattggagccacaaaataaaacagtactgggttatgacccaaagcagaaaacaaatgtccttgagtctgtggggatacagatcaatgactggataaacacctgaagaggggagaggaggtgaatctcccgcagaagaattccacctaatgtatgcagaaacacctccctcaaggaggagcagcagaactcccagctcgggagcgtgggctgcactgacagacgcatcccaagaggacagcacaggggcaggccagggggaggagctccgtttttattttcaggggaaaccctatgaacatgatctccgccaggtggtcaaggccagaatcaacagggataagtggcgttgatggcacggacccttgaccttgatgtgatgaaatggcctcccataaccccagtctaaccatgagaacatcagacaaatcccaactgagggacatcttacaaagcactcggccacttatcctcaaaactgtcacattcaaactgtcaccgtcragaggagcctagggaggcatgtcacctgaatgtcacgtggggtcctgagtggaatcgtggaacaggaagaggacattagggaaaaactaagggaatgtgaataaagtgtggacttaaggtgtcaataacggtgccgtaatggtgacagctgtaccacatgctgcgagatgttcgcaatcagggaggtcatgtgagaggtacggaacgctctgtactagcttcacaatgattctgtgcctctagagccgtcctaaaagaaaacgtttatttaacagtatcaattttttttaaagagggggccagttggggccgaaaaggaatgttggatactcaagaaatatggatctattaaacctcacatcaaaatacattctgaattccagatggatgtaagatccaaacatatatatttttagcccaggcgcagtggctcacgcttataatcccagcactttgggaggctgaggcaggtggatggcttgagcccaagaattcgagaccagcctaggcaacacgataagattctgtctctaccaaaaaataaaaaataatgctaataattagccaggcatggtggtgtgtgactattgtcccagctacttgggaggctgaggtgggaggatcacttgagaccaggaggtggagggtgcagtgagccgagatcacaccactgcactccagcctgggcgacagagtgagaccctgaccctatctctttctttctgtctcttctctctctctctgcagatacatagatagatagatagatagatagatagatagatagatagatagacagacagacagagacacacacacatatatggagatatatatataaataatatattatatgtttatatataaatatatttatttatatatatattatatatataatatatatattatatatatataatatatatataatatatatatattatatatatataatatatatatatgaaatcatgaaggcttcatggcaggaaaatagggtctggaggcagggaacagaaggccgattcacasttcagctatgacaggaaacaccctctccatagggcatacgccttaaatgactgtgtaactttactttgatctctccatttacatcaggaatacccaaagtaaccagtgcaatcctctagggggtatttaaactcccaaaaattctgtaacttggcccttgagcccctackctcaggcctgcccccacactgtggagggttcttccgttttcagtaaatcccttccttccttccctgctttgtttgtgcgttttgtccacttctttgttcaagacaccaagaacctggacaccttctaccggtaataaaggtactaaagagaaaatggaggtaaatacttatataatcttaaaataaagaagctggctgggcacagtggctcacgcctataatcccaacactttgggaggctgcagcagaaggatcacttgagcccaggagtttgagagcagcctgggcaacataatgagaccgtgtctctacaaaaataaaataaaataaaaataaagaagttctttctacatatcactccaaagacaaaaaccacaaaagatagctttaactacagaaaatacaatactatacatatggccaataagaaaaataagatagacactaataaaaatagcaaataattatctcatactcgctgtattccaggccctgttataagtactgtattaactcatttaattcccacaacaaacctacaaggtactgcaaaggctctggtaggtgaagcaatgcacccaaagctacagagctaggaagcggtggggcagtgtggctacgcctgtgccctgaaccacaaaagtaacaggcacacggctgactggggaaaacgtgagaacattttgtgaaccatatccgaaaagcaaagattatatctttatgacggtaatatatatatgcactcttaccaataagaaaaagacaaacatctcagtagaaaaacaggcaaaggaagtcattcgcaaaggcaatccacaaaggaagtcattcagtcaatgcttgtaaaaaaawaaaaaaaaaagttcaacctcaacagttaacaaagagatgcaaattaaaacggacatcttcccaccccatcaagctgactcatgccaaagaaatcagtctccggtcgccagtctacgtaaagcgagcctggcacgttgggttcttagggaggtaccacaggatgtttacgaggggcttgcctcggcatcggtggaaggaggagagagaagcaggattggwcgagggagaaggcaaacttccatgcagacccagtgatagccccaaagaccaaacagtagcctccaagctagagtggccccgggagaccttcctgactcgggcagaggtggtccccacattgaggagtcgtwgaatgcagttgcccaggaagagtcccggctttggacagggtggctctttgcagctgaacagtctctgaagggactgagagttgaaggcaccccaagcagctggggtaacaagtccttcccggaagggggatctaggtggctcatcacagtgaagacatacaaaaatgtttattaaaagccagaggcatggtggctcatgcctgttatcccagcactttgggaggctgaggaaggaggatcaattgagcccaggagttcaagaccagcctggacaacatggtgaaaccctgtctctacaaaagaaaaaaatttaaaaattaaaattaaaattaaaagtcactaacattaaagaaatgcaaatcaaaactacaatgagataccagctcacatccattaagatgtaccataaaaaaaaaaaaaaaaaacacagaaaataagtgttggggaagatgaggagaaattggaccccttgtacactgttggtgggaattacagaggtgcagctgctgtagaaacaatatgggtgtaaggattaataccgagtgtcagcctgattggaatgaaggatggaaagtattgatcctgggtgtgtctgtgagggtgtcggcaaaggagattaactttgagtcagggggttggtagcggcaggcccacccttaatctgggtgggcaccatctaatcagctgccagagaggccagaatataaagcaggcagaagaatgtgaaaagactagactggcccagcctcccagcctgcatctttctgctgtgctggatgcttcctgacctcgaacatcggaatccaagttcctcagctttgggactcgggctggcttccttgctcctcagcttgagacggcctatcgtgggaccttgtgattgtgtgagttaatgctccttaataaactatcccatatatatatatatgtcccatatatatatataaactatatatgtatatataactatatatgtatatatacamacatatatgtatatgtatatataactatatgtgtatataaactatatataaactatatatatgtcccatatacatacatataaactatcctatatatatatcccatatatatatcctatatatatcctatatatatatcctctatatatatcttctatatatatcctctctatatatatcctctatatatatcctctatatatatcctctatatatatatatcctctatatacatatcctctatatatatatatcctctatatacatatcctctatatatatatatcctctatatacatatcctctatatatatatctcctctatatatatcctctatatatatatcctctatatatatatcctctatatatatatatcctctatatatatatcctctatatatatatcctctatatatatatatcctgtatatatatatatcctttatatatatcctctctctatatatatatcctctatatatatatcctctatatatatatatatcctctatatatatatatatcctctatatatatatcctctatatatatatcctctatatatatatcctctatatatcctctacatatatcctatatattctatatatatatcctacatatatcctatatatatatcctacatatatctcctacatatctcctatatatatatctcctatctatatatatctcctattttatgtcctatatatatatctcctatctatatgtcctatatatatatatctcctatccatatatatcctgtatatatctcctatccatatatatcctgtatatatctcctatccatatatatcctgtatatatctcctatccatataccctgtatatctgctatccatatataccctatatatatcctctacatatataccctatatatatgtcctctacatatataccctatatatatgtcctctacatatataccctatatatatgtcctctacatatataccctatatatatgtcctctacatatataccctatatatatgtcctctatatatataccctatatatctgtcctatatatgtcctatatatatctgtcctatatatatgtcctatatatatcctatatatatgtcctatatatatatcctatgtatatgtcctatatataccctatatatgtgtcctatatataccctatatatgtgtcctatatataccctatatatgtgtcctatatataccctatatatgtgtcctatatatataccctatatatgtgtcctatatatataccctatatatgtgtcctatatatatatcctatatatatatgtcctatatatatatcctatatatatgtcctatatatatatcctatatatatgtcctatatatatatcctatatatatgtcctatatatatcctatatatatatgtcctatatatatcctatatatacatgtcctatatatatatcctatatatacatgtcctatatatatcctatatatacatgtcctatatatatcctatatatatgtcctatatatatatcctatatatatatgtcctatatatatcctatatatatgtcctatatatatcctatatatgtcctatatatatatcctatatatatatgtcctatatatatatcctatatatatatgtcctatatatatatcctatatatatatgtcctatatatatatcctatatatatatgtcctatatatatatcctatatatatatgkcctatatatatatcctatatatatatgtcctatatatatatgtcctattagttctgtccctctagagaaccctgactaatacaataggtatccctccaaaaattaaaaatagaatttctataagatccagcaattccacttctgagtatataccctaaagaattaaaagcaggcagtcaaagagatatttgcacacccatgttcataacaacagcattaacaatagctaaaacatggaagcagcccaaagtgtctgtgggtggatgagtggatacgtgaaaagtagcccatccagacaaaggaatatcactcaggcttaaaaaaggacatgtggctcacaacagtaatcccagcactttgggaggctgaggcaggtagatcatgaggtcagcagtttgagaccagcctggccaacatggtgaaaccccatctctactaaaaaaaaaatacaaaagttagccggatatggtggcgggcacctgtaatcccagctacttgggaggctgaggcagaagaatcatttgaactcgggaggcggaggttgcagtgagccccaagattgcgccaccgcactccagcctggcaacagagtgagactccatctcaaaaaaaaaaaaaaaagaagaagaagaactttatgcaatctgctacagtatgggcgaacttggggacactgtgtcacaaaaagacaaatactagatgattccccttacatgaggcacccagagtagtcaaaaatatagagacagaagggagaatggtggggaccaggagctgggaggggcaatggggagttagcatttaacgggtatggaatttccactttgcaagatgaaaagagttaacggagatggctggtgatgtttgcacattacaaactgtaggcttaaaaagggttacgatggtaaatgttttgttatgtatattttaccacaacaaaaaaaaaattgaaaaaaagcagtcattgtgatatgcagcctatttctgcagactccctgacaggggtcaaatgggggttaaaaggccggacatggtggctcacgcctgtaatcccaacactttgggaggctcaggcaggtggattgattgagctcaaaagtttgcgatcagcctaagtaacacagcaagaccccgactcacaaaaacatttttaaaattagccaggcatgatggcgtgcacctgtgatcccagatatttggaagctgagtcgggagaatcactggagccagggaggtcaaggctgcagtgagccgtgatcgtgccacggcactccagcctgggcaacaaagcaagacactgtctgaaaaaaagaaagggcgttagagctctgagtaattctgacaagatctccatgcctccctcccccaactcacaccctcagctctcacatccctccccctgtctgctgtggagacctccaggacctatcccatggtgccctatacccagctatctgctacaggaactggcttgcaccagcttgcaagagcccattgttaaatgtttaaatattccacaagcctgctgttaaaccactggtagcttgaaatgagccatggtgggagtatttacaccatggaaagtgtcaaaggctacacgtcaggccaaagagtgcgagtgcactctaacagcctcagggcacagctgcaaacgctgttctcctcattcgccaaagacccaggacacccaggtcgtcacttcaccccaggtcgtacttcaccccaggccctaacccctgtaaggccattctcacctgctaatccaaccccacctccaggcctccttactcccaaaaccctcactgtttcctctggagcttgagacacgccgggagccacagctcctccttcccacagcttctctccacctgcttgctctgactggaacccgggcccctggagcatcctccgttgcagttacttccagatcaacccccaccttccccaaacccgccagccttgaagctggtgccatcacactatgctctgtgccgcctgtcctgtctggttctctgcagaccctagtcccctccgtcttgttcctacgcgactcctactcccggttcactgtcactcttgctaaatccctgtcctaattcttggcgatttaaatctccacggagatgatcctcctccttccctgacctttgctcctccaatgatcttgccttctacccgtgctcggccacctctcccacgctccttctctagatccctacgtgccatccaacagagtggccacaaamccctcaaaawgagcctggtccaaagtgagaggcactgtctgtgtaaatcacatgcgaggtttcaaagtcgtagtgtgggaaaaaatgtaaaatacttcactaataattctgaatgttgattacatgttgaggtgacatttgggatgcatttgggttaaatagaatataattgtaccttctttacctcatgtcccactccccttcttcccatgtggactccatagtccattgtgccacccctctctcctgtgcaccttcagccccctcacctttctctcatttcctcatactcgcctgggaaaaacctccaacctgctcaattacaacacagtgccagcacctgttaagctgaacgaggttgaaggaaaacacgcaaagattctgaccctccactcaggttttggcttcccccatttcagcagcgctccaccaccaccaccaattgttgatttgtcctccctattggagccaacccatcatctcccattataataattcattcattaaaaaaattaaaacttgatctctgatatggtttggctgtgtccccaaccacatctcatcttgaattgtggttaccataattcccacttgtcatgggagggacccggtgggaggtaattgaatcatgggggtggttacccccatgctactgttctcatgatagtgagtgagttcccacgagatctgatggttcaataaggggctttccccctttttgctcggtacttctccttgctgctgccatatgaagatatgaagaaggacatatttgcttccccttctgccatgactgtaagtttcctgaggcctccccagccatgctgaactgtcagtcaattaaacctctttcctttgtaaattacccagtctcgggtatgtctttattggcaacgtgagaacggactaataaaatctctctctccctttctgctctcctttatagcaagactctttggaagtatccatctgggccagagtgcagtggcatactcacagctcactgcagcctcgatctcctgagcccaagcaattctcgcacctcagcctcttagtagctgggactacaggtgtgcaccaccactccccgctaatttgtaaaaattttttgtaggccgggcgcaatgtctcatccctgtaattgcagcactttgggaggccgaggtgggcggatcacctgaggtcaggagttggagaccagcctggccaacatggtgaaaccttgtctctagtaaaatacaaaaaattagccaggtgtgttggcgggcacctgtaatcccagctactcaggaggctgaatgaagagaattgcttgaacctgggaggtggaggttgcagtgagctgaggttgcaccactgcactccaccctgggctacagagcgagactctgtcaaaaaaaaaaaaaattaaaaaaaaaatttgtagagacagagtcttgctatgtttcccaggttgctctggaactcttggcctcaagcaatccctacctcaacttcccaaagtgctgagcttataggtgtgagcccctgcacccagctggaagtatctattcttattatcttcaatttttctcctcccattttctcttgaaccttttcaatcagtatttgcctcctaccaccacattgaagccctccagtggcttccctatttcatttgggataaaatccaaagtcttggccaggtgcggtggctcatgcctgtaatcccaacactttgggaggccaaggtgggcagatcacttaagctcaggagttcaagaccagcctgggcaacatggtgaaaccccatctctacaaaaagtacaaaaattagccatgtgtaggggcgcatggctgtaatcccaactacttgaggtgctgaggcaggaggattgcgtgaacttgggaggtcgaggctgtagtgagccaagatcatgccactgcactccagcatgggtgacagagcgagaccttgtctcaaaaaagaaaaataaagccagagtcttcgcagtgcccacaagaccctacgtgacctgatctcccatgactcattgctcctcgacagccaccactccgttccatggagtagcccaggccaactgctctgcagccaaactcagggaaacttggagaacatgtgtggaccagaggaccccttcctcctggctaccaaaagaacccccaaatcctgcagcccaccagctgtgtgcccagacacaatctggagtagaggagtagacagtggcagccatcagaagccccactggccaaacacttcagcctcagaatgctgagctgctcaaagaactggttaaatgtttgtattagaccaaggttactagaatggatgtttctccccattgtattacccagcagagagtacctttcaagaaagatcagattaattaagtaggaaaatgaagacactctattttctttgcacatctgatgtattgtgagtgattttgtgaccctgctacgtgcacgcatatgcacagaaaaaaaatatcttagaatgtagaccaaaatattaacagtggttatggatgagtgatggatgagtgaactaactatagatttggaaggatattgtctgttttaaaagaaaatgaacactttcactcccaaacaagacggaatgtagagactggatttcctctcctgcctgaaaaagtcaaaataaattggaccaaatatataaaacaagagttctcaagacactggatgatatggttttgctatgtccccacccaaatctcatcttgaattgtagctcccataattcccatgtgttgtgggagggacctggtgggagatatttgaatcatgggggtggtttcccccatactgttctcgtggtagtgaacaagtctcacgagatctgatggttttataaggggtttccctctccacttggttccattctctcttgtccaccaccatataagatgtgcctttcaccttctgccatgattgtaaggcttccccaggcccgtggaactgtgagtccattaaacctattaaacctgtttttccttataatttacccagtctcgggtatgtctttatcagcagcatgaggacagactaatacactggatatcaggtaactaggcacaatgatttctgagaatgtggaaaataaagtgagcctgcaattaacccagcttcctttcttgagagggtttccaagctacagtatggacaagggtacccaggtggggcctggcaggctcttcgagttgggaagacagagctgagagtccagggagactctggtcacaggtaggggcaggggggtgatgctgagagcccctggggcatgcctgccctctacaaagctcgtggttgaatgcagggaggtggtctgggggtggacttgggcaatggggaggctgcatgggttagagccaagctctcccctcttccagtctgtctgggcctctgcagctcccggtaactttgcactgattccagagacagtgattgctcaggtacccaggtctgggtgtaattaaaaaaaaaacaaaacaacaacaacaacaacaacaacaacaaaaaaccaaacctggctcttggtgctttcagagatggctcagagcaggaattctctagctttggggtgcatcctcagaggtgggggggggcttgctgaaaagacaggtgtatggtcccacctcaggcctgctgaacagaagctctggagcaggctcaggagtttcttttctaacaggctccccgagagatcctagcaaatgtttgcacaacactcacttggaagctatgtgaccaaaaccatgatcacagggttgtccctgaacacggtggggaaataacctctcccttaaatctcccctgcgtggtgacttagrggaggagccggaagagagcagtgcttcacaataaaaggaagaattgcttgaacggaggcgtttcaggcatgagtcacaggccgggtgtggaagaggaaagtgtgaagcaaggtaggcttcccagcacccctccatgcacagcaggggctggccagcctcagccaggccagatggagccctggagggtggggctggctgcccagctagagtgtctccttttacttccagcaggaaaaaaaggcctcctgtcaatagcagaatcatctacgttttccctgccttcctcacttaaatgctttcgaggagtgggaggaagaaattggaggctggaatgaataccctttgccctcctctgaaagcagcctgggaggggtgacggggtgtaggagcagagacttcaagtggcccccacctgccaaaccattctcagggacaggtaccagctgggawgttggcagcagccgctcccctgcaaggagaacctcccacttcctgtcccgcacacctgcctcattggaaagtgacgcacccactgtttggcctcggcagcctgatgtttctcatcacacaggaagacggtcatgctacaggaagacctcggactttgcatccagcagatgtgagttcaaattccagctttgtaatttgcaagctcagaggtggatttgctgggaagctaaacaagcttacctgcagagcccccagcttgcatgggcccctcccaagaccttaacctcattttgtattcataattttgtagtcttttcccttcaaaaggcagcccaaatttaaaagcattaagccccacaagacctgagtccacctaggaggtgggagatatcccttgcagcatgagaataataattaccacctcgtagggttgttctagagattgtcagacygagaccacgccacacacccagaaggcacccaagtcacagagcctgatattgttcctggagcgccattgcatcatccttgaccacaagatctgcgtcattggatttgtctcaaaaacttgggactctggagataaaacctcattgcaaggctacctttgccactgtatcttagcagcttttgaagcaaagcatttcaatatttagacactgtgtttctaatgggtactgggatcaaaataataaaaactcagtctgcaaagggagaagaatagaaaccagcagatttattatttcacagaatgttcctctcctctcaggtaaacatgcctaataatatctgcttaactaatgagcacccgcattgtcagtggggccttgactctgacgacgtaatgcatttctgtgccattgcaccccccacccatctcggagagcatctgaaaattaagtggggcagatgtaattatgcatctaatatgcaaggtacatgtgcatgtagaagtgtgcattgtgtaaacaactgtatcaaatcaactgcatgtatctgcttggctcacgtcctacaagcacaattttcattttattccagttacttcttttttttttttttttttacagagtctcactgtgttgcccgggctggagtgcagcagcgccatattggctcactgcaacctccgcctctcaggttcaagcaattctcatgcctcagcctcccaagtagctggaattacaggcatgcgccaccacacccagctaatttttgtacttttagtagaggtggggtttcaccatgcgttggctggtctcaaactcctcacttcaggtgatctgcccaccttggcctcccaaagtcctgggattacaggcatcagccaccatgcccggccttccagttacttcttgctggctaataaatcaccccagaaccaagtggcttaagacagccatgagtgttttgtaacaagcattggatgactatttcccccagccctggggactaactaggctcagcttatctgggtctttcatccagttgcagtcagtggcttgtgtttgagtcatctgaaggcttcctcactcacacagctggcattggtgttgcctgttggctgggatcccagctgggagtgctggcctctgtgtgtggactgggcttcctcctagcatggcggctgtgttctgaggcccagcgtcctgagagaggtgggcagaaggtgtattgccttttacggcctagtcttgtcagtcgtgtaagttttaccaaactcacaggccagcctggtttcaaggaagggaacatagtcctacctctcaacaggaggactatcattgccacattgtaaaaaagagcatgcaggatgggaggccttattttggccaccttggaaagtgaaacctgccacacataccttccaagtatgaatagtaaatcattgtgttttccttaaacttcatctctaaggaggcctgctggatgattatttgtgaatctagtggtcatcactgtctgtgttatgaacttacaattaatgagcatgcattttcttggacgataataatccataattctgacttcttactattcagattaatcttcttcccactttcccggtaagagtgactttgctgtatttcggggcagattcatcctccaagttacccttgctgctcctgaagctgagcagattagctccccagaaaatagcattttcccagaggtgcaggttgattttctcacgtccctctttccgcatgggaaacagactgcagttgagattcacatgcagcagccttgggctatttcgttgagaatcaaatccgcagagatgtggcatgaaaggaaagaaggcgagtgcacagcatgctctgggctttcaggtcactcagtgctcctcggagccgcaccagacacagaagacaacacaggctccacctgggggacaggttccacacggtgtggcccagcgtgacagtgagggttcctcccataaccagcacggggctctatgtaaggccattccctcccaaaggaaactcttgcgagatcatttttaaggctagtttctagtcttctagcaaccgggctgggttagaattcatgcatttttttagacttccatcctcagcactgaaggcccacttctgagtgtgctccaagctgtgcccagggcagggagatgattcagacacagctgtgccctccacaggtcacaggtgggtggagaagagtcatccctgcccacagggacagttggtaacagggaaaagggaagaacagggctaagggaacccaggaaaagcccgagtcaggtgttagagaagcaagcagccagagtgggctgaggcggggggacgcggggggacgcaaggggacgtggggtgacgggaggcctccagcaggggtgcagctgtggaaacccaaggagcgctgcaagcaacgtaactaaggctgggcggggaggggaagagatgaagctgaagtcagtggaaaccagatggccaagggcctggagagccgagccaggggtggaacttcatcctgagggccgtggcgagctactaaagggatttcaggagggcagtaataccataagattttggagttttcattttttgtttttttttggtttcgggtttttttttctgacatggagtcttgctctgtcacccaggctggagtgcagtggcgcaatctcggctcactgcaacctttacctcccaggttcaagcaagcctcctgcctcagcctcttgtgtagctgggactacaggcgcccaccaccatgccaatttttgtatttttgtatttttaagtagagacaggattttgctatgtcagccaggctggtcttgaactcctgacctcaggcgatctgcctgccttggcgtctcaaagtgctgcgattacaggcgtaagccaccaggctcagctaagatttgggttttcaaggggtggtgctggctgctgggcacrgtggaattgaaggaaagagaagtggattctggggagggcatggtggccacttcagaagctgcaggattcagagtttgagaagccccagtgtgcatcagacccagcacgttgaaatgtacccactacaaagaaaagaaactttttatctgaggaaggcgagccccctttaaatgatcaggcctagagaggcactggaatgagacagctgtcacatctcactgccccacctgagaaaagaaatctcctgaggccgcttgctgtgtgggctctaggctgactggtaccagtagctatggatgaacctaacaatgccacacactggacaccataacccgtgccctgtagttcaacaacatatagataatcactcatcaatgttatttctgtaaaccgatgagaattcctgaaaaacaatttcgcaatcgcccctttcctgatttgtcctcttgtatttaaaagctcgagcctctcttctctggagcactttccaaggtaacttgggagtgcttcctggactacagtcctcaactgtggcccaaataaactctctacctgtgttaatttcgcttccatctctttctattggtcaacaccacaatctacatttgaaatgtcattcttccatgctagaatatgtattcggaaaaaaaawtttttaatttttttctgaagttccttggctgtaatacatttcattgactctcggctgtgatctgtggacaatgactgtgcacacctacagactcactcctcatcttcgtgaggctgggataaaggtacacacggaggctggtcccacatctgtaaaggcctcacatgcatggctacgggcatctcggccctcatgtccgagctccatccmccctgccccttaatcaactctcccaaccccaccccacctcaggtccaggatgaacattccagcagtgtggtctgcccacaggggagacccagggaagaggcctgcacagtccttagaaaaaggcttagggtttgagggtgaggaatcccaggatcccagacacctggtgtgggcttcaggtgggctcgtgcccttggccytcccagctaagtggttctgctggaggaggcagaccagagtgggaccctcaaagtcacagagccctgggccgagacccccaaatgctcaactttaagggtgatactatcctcaggaatccttgcaaagtaggaaaattgaacccagtgattgttttcaagatagctttatgttaatactcaatttaaccaattaaagaaatcgacataaaatcaactaaccccatatgtggttttttttttttgtttttgtttttgttttttttggcccctgacttttgtggagacccatgagatgcttggtcctgagcctaacggatgcaggggcctggctgggacccagctgggaagctgatgctgttctccaggtgagcgctttaccaaaggctgctcggaacactgcctgcctccaaactgctgctttcctaacaggtcacaaacactttgcaagaagctgcaatccgtcatccccttctgcttgcatcccccctcacatctgcgggtgggagagaggacagagcagggggaagcaggaactctgaggctcccacctggggcacccacactttgatgggcaggaggtgctcctggcccgctgggtgggacctctcccaagaggtccatatgccaacctggacgctggggacacaccgagctctcccttagcctgacccaccttcctagaaagacagctcaggattcatttctgcccagggctttcgtcgtgcatgagaagtcccttctgccttctattttctctgctccaggaaacctctctccgcagcccgaattcatgacttcgaacttttccaagacttccagcaccaaagactcaggactgactgattttctcaatatactactcccccaactccacctttggactcccagtcaatctccctcccgctttttccccctgtaaaaaacctaaactgctcagttcttctccctcaacccccagatcacatcagcccctttgagagctccactatggtccaccacctccagcagagccacttagctgggaaggccaagggcacaagcccacctggagcccacaccgggtatctgggatcctggaattcctcacccacaaatgctaaccctaattttagaacctgatcacaaaggatttcatccttggaagaaactggtccagcaatctcgatttcgacatgagtctggaaaggatcttgagcgccacgtgggtcccactggggtcccactgggggtctcctcccagtggctcctgctccctcctggcacggctggcctttgctctgcacctccactctgctcttgtggtccctttggctagtccttgtggaggggccccaggagacagtggggaaagcacaggctccccccaaaagactccaatgtgagctcagcctagtcatgtgaccctagacaagcttttcactttcctggaccccacagcacaagtaaccgcccctgctgttatgggttgagttgtgttcccccaaaaaagatctgttgcagtcctaacccccagaacctgaaaatgtgaccatatttgggcatagggtctttacagaggtcatcaaggtaaagtgaggtcattaggatgggccctagtgtgatacgattggtgtccctacaaaaaggggaaatttggacacggaaacagacaggcattgagggaagatgatgtgaagaaacacagggagaagatgtcatctacaagccacagacagaggcccagagcagaccctgtcactgccttcagaaggagccagccctgccaatgcctcgatcttggacttccagcctccagagctgtcagacaataaacatctgctgtttcagcccccatctgtgggactttcttaaggcagccctagcaacaaacccacctgccttgttgacttcctgaaacgagacagccacacggtggtgctgtgtaaagggcaagtgccacggattcattcatgccatgagcaatcattgagcaccaacagtgtaccagggaccatgcctgagcactaggggtctgcaccaccaacttatataaagtcctttacttgcttcctttacataagttattctcccagccaccatgtaaacggaatcatctaagactgctacagtcctcacagctcctagctaatcattaagcacattgtaggtgcttaataaatgcctaaataattgacttaatacagattcgtaatggctacaaattattcagtgtacaagtctgaacgtgggtgtgctgaatattttacagtcttcagcaacatccagaagaactaatcatagtttgggtccaaaataacctcatttatttagcgccacgacaggcttggcctgttctgtagggtgtagaatattgagcccgaagggatggcatctcgtttgctttcatgacctcctcccctcttgcatggatacagatcatggctttagacaatttttgaggtgaggttacattttctgggtgtagccaactgcagataaaagatattttctgtaatgcatcatgcaggatcttaataattctaggagctcatttgaaagtcattttaaactggccttttgagagttctgcattattagaaagaaagggagaggagaggggggaagtggaaagggggaggggaagtggggaaaggagaacacagagaggggagagggagaaaaggaaggaaggaagagagggagaaagaaatcagtccctacagcatgtggacattgtgtgctgctgggcagaaggttttcagcacgacaagaatgagaatgccaagcgcataaattataatgccgtcttttccctgcaaacagtgaataattatagatgccaagtgtctcagtgaaatctgctgggcatatggcccctttttgtcttcatgccacttttctttgctccttcagggcaaagaagccagcatgaattagcacctggccacagtatcctgacctgtgagaaaaaaatgagggcatgttttcaatttccagggaagtatacatccatgtttgattcaaaacatatttactgagtacctaaaatatcccaggtcctgtggaaatacaggaagggctcgtcacacaaggagtgcacaaccttaactgacagcccagcaccacaatcgtttattgagtgactactgtacaccaggtgctgtgctaggttgggggtgcagatggaggcaccaagatgaatattccatcattcctgcccccaaagggattatagattcatgaaaagggagattcataacgaatcacgtcttttcctttcattctcatagcagtctacaaaggcggcacaatcattcgcccaccttgcagatgcagcaactgtggcatgcagtttcagtcacttccttgcaaaggggactaggaagtggaggaggtgggtgtgaacatagcctggctgtgcacactgggctgacgtggtcgtctcagcacaatggagcaggaggtgagggttgtacacaggcaagcagcctgcaaggattcaggagaggacagagaaaacacttcccagaagtgcagagatgctgtccttggaatccagaggagggagtgattccaacaggaagactgacagaggcatttggaatggggtggaacttcagtaggtgaggaagttgggaaaggccagtgcagaggcaggcaagagcagaggcaggcccatgggggctggggatgccagggaggatgaggggccytgcgggatgcagagggagtggaagcaaagttggagctcagagggtcctgctggcctgctgaagagctggatgcatcttatttgtgctgtcttagtcagtttcacactgctataaagacactacctgagactgggtaacgtataaacaaaagaggtttaattaactcacagttcagcatggctggggaggcctcaggaaacttacaatcatggcagaaggtggaggggaagcaaggcatttcttaccatgtgaagcaggagagagagagcatgcaggaaaaactaccagttttaaaccatcagatctcatgagagctccctcactatcatgagaacagcatgggggaaactgtccccatgatccaacgacctcccaccaggtccctccctcaacacatggagattacaatttgagatgagatttgggtggggacacagagccaaaccatgtcattccaccccggcccctcccaaatctcgtgtcctcttcacatttcaaaaccaatcatgtcttcccaacagttccccgaaagtattaactcattccagcattaactcaaaagtccaagtccaaagtctcatctgaaataaggcaagtcccttctgccttgccttcatgagcctgtaagatcaaacacaatttagctgcttccaagatacaatgggggtaaaggcattgggtaaatgttcccattccaaataggagaaattcaccaaaacaaaggggccacaggccccttgcaagtccaaaaccaggcagagcacttattaaatcttaaagctccagaatgaccttctttgactccatgtctcacatccagagcatgctcatgcaaggagtgggctcccaaggccttgggcagctccactcctgtggctttacagggtacagcccccatggctgctttcacaggctggcattgagtgcctgcagcttttccaggtgcatagtgcaagccatcagtgaatctaccattctggagcctgaaggacagtggctgtcttctcatagctccatgaggcagtgccccagtggggactctgtgcaggggctccaaccccacatttcccctctgcattgccctaatagaggttctccatgagggctccagccctctgcagacttctgcctggacatccagacatttcaaatcctctgaaatttaggcggaggctcccaaagctcaactcttgtcttctgcacacccaaaggcctaacaccatgtggaagctgccaaggcttgggcttgcaacttctgaggccatggcccgagctgcaccttggtcccttctagccatggccggagatgcagtggttgttgggacacaggacaccaactcctgaggctgcacagagcagcagagccctatgcccagcccaggaaaccatttttccatcctaggtctccaggctttgatgggaggggctgccatgaaggtctctgacaagccctggagacatcttctccattgtattggctactaactttcagctcctcattgcttatgcaaatttctgcagctggcttgaattcctccccagaaaatgggtttttcttttctacatggtcaggctgcaaattttccaaacctttatgctctgcttcccttttaaacataagttcccatttcaaaccatctatttctgaatgcatataactgaacactttcagaatgagccaggtcacatcttgaatactttgctgcttagaaatttcttccaccagatatcctaaatcatctctctcaaagttcaaagttccacagatctttaaagcaggggcaaaatgccaccagtctcttcgctaaagcatagcctgagtgacctttactccagttcccaacaggttcctgttcttcatctgagaccacctcagcctggacttcactgtccatatcactatcaatattttggtcaaaaccattcaacaagtctctaggaagttccaaactttcccacatcttcctgtcttcttctgagccctccaaattgttctaacctctgcccattactcagttccaaagtcacttacacattttcaagctattcttttttctttttttttttttgagacagagtctcactctgtcacccaggctggagtgcagtggtgcaatcttggcacactgtaacctacacctcccaggttcaagcgattctcatgcctcagcctcccaagtagctggggttacaggcatgggccaccacccccagctaattttttttttttgtatttttagtagagacggggtctcaccatgttgcccaggctggtctcaaactcctgagctcagggaatccatccaccttgccctcccaaagtgctaggattacaggcgtgagccaccgcagccagcctcagattatgtttatagcagtgccccacttccagtaccaattctgtgtattagtccattttcacactgctataaagacactacctgagagtgggtaatttataaacaaaagaggtttaattgactcacagttccacatagctgggaaggcctcaggaaacttacaatcgcgacagaaggcaaaagggaagcaaagcatgtcttgccacagcaaagcagaagaaagagcacaggaaaaactgccacaaaactgccacttttaaaaccatcagatctcatgagaactccctcagtatcacgagaacagcatgggggaagctgcccccacaatccaatcacctcccaccaggtccctccctcaacatgtggggattacaactcaagatgagatttgggtgtggacacagaaccaaaccatatcagtgctattgaaggtgcctgaggagggatgtggcatgatccagcccatgtagaggacagtaactggtaaccacaggcagaattcattacagaagggaatcaggtaagaaatcatcagagatatgggatcatttaaaacaactattgatcctccaactgggtacaccaaaagggtaactaggatgatgctatgagggaggaagatgaaacaaaaaagcagtttcccaggtagaagcatccataaggtccagggcagtgagttaagggtgccaccacttgctcacagtacgttgagtgaaactcagatgcaaaactaggtttagtataattacatatgtgtcaatgaaaaaaatgcatacaggctgggcacagtggctcacacttgtaatcccagaactttgggaggctgaggtgggtggatcacttgaggtcagcagttcaagaccagcctgtgagcatggccaacatggtgaaaccccatctgtactaaaaacacaaaaaattagccaggcgtggtggtgcacgcctgtaattccagctactcaggaggctgagacactagaattgcttgaacccaggagcctttgcaatgagccaagatcatgccactccactccagcctgggcaacagagcaagactgtctcaaaaacaaaacaaaaaacaaatttaaaaatgcatacgaaaaagtggaaacatatacacaaaatgagaacaataattgcctttaggagatgggattataaatttttttaactttcctttctcttgtttacctgcacttgctaaggtttgtgcagtaaatattttacttttggagtcagttaagttttgaaaaaggcagaaaaagcccacaactgtaacaggttcgtcctctccgtagcaaagctgattcaaacagcagtctttgaacacagtagtatcacgctggttggtatcgtctcggtagcagaatgagaacacaaaatcatctagggcaataggagcagcaatgtgtagcagagaaaatagcccaagtcaaatttatgtccagccaagaccactaatgaaagctgaaaactagcatccttgcttcctctgcccaccccatcccatcccaccttcacatacatccgcccacacccattagccagagcattcctttgatggcctaagttagatgtcgtctatgccccagggcctttgcaccagctggtcctcaggtgccagtgctctctcccagtgtctcacgtggctgactcctttgtcaggtcccagttcaaatttaccttctcagagcaaccttccctgaccatcgtagctaatatagccaacaccctctagcaggcaccccatagagtctaatccagctttgtccatagaattttctgtgacaataagactcttctgtgtctatgctgtcaactcgccacatgtggctataagcactcaaaatacggctagtgttaattaaacatggaattttacattttatttcattttttattatacataagttctagggtatatgtgcacaatgtacaggtttgttacataggtatacatgtgccatgtgggtttgccgcacccattaactcgtcatttacattaggtatttctcctaatgctatccctccccctgccctccaccccacgacaggccctggtttgtgatgttccccaccctgtgtccaagtgttctcattgttcaattcccacctatgagtgagaacatgcagtgtttggttttctgcccttgtgatagtttgctcagaatgatggtttccagctttatccatgtccctgcaaaggacacgaactcatccttttttatggctgcatagtattccatggtgtatatgcgccattttcttaatccagtctatcactgatggacatttgggttgttccaagttttcgttattgtgaatagtgccgcaataaacatacgtgtgcatgtgtctttacagtagcatgatttataatcctttgggtatatacccagtaatagtatctctgggccaaatggtatttctagttctagctccttgaggaattgccacactgtcttccacaatggttgaactagtttacactccaccaacagtgtaaaagcgttcctatttctccacatcctttccagcatctgttgtttcctgactttttaatgactgccattctaactggtgtgagatgctgtctcactgtggttttgattgcatttgtctgatgaccagtgacgatgaacattttttcatgtgtctgttggctgcataaatgtcttcttttgagaagtgtctgttcatatcctttgcccactttttgatggggttgttttttttcttgtaaatttgtttaagttctttgtagattctggatatgagccctttgtcaaatgggtagattgcaaaaattttctcccattctgtaggtggcctgttcactctgatggtagtttcttttgctgtgcagaagctgtttagtttaattagatcccatttgtctattttggttttgttgccattgcttttggtgttttagtcatgaaattgcacatgcctatgtcctgaatggtattgcctaggtttgcttctagggtttttatggttttaggtataacatttaagtctttaatccatcttgaattaatttttgtataatgtgtaaggaagggatccagtttcagctttttacatatggctagctagttttcccagcaccatttattaaatagggaatcctttccccatttcttgtttttgttggtttgtcaaagatcagatggttgtagatgtgtggtgttatttctgaggcctctgttctgttccattggtctatctctctgttttagtaccagtaccatgctgttttggttactgtagccttgtagtatagcttgaagtcaggtagcgtgatgcctccagatttgttcttttggcttaggattgtcttggcaatgcaggctcttttttggttccatatgaactttaaagtagttttttccaattctgtgaagaaagtcattggtagcttgatggggatggcattgaatctataaattactttgggcagtatggccattttcacgatattgattcttccaacccatgagcatggaatgttgttccatttgtttgtattctctttatttccttgagcagtggtttgtagttctccttgaagaggtccttcacatcctttgtaagttggattcctaggtattttattctctttgtagcagttgtgaatgggagttcactcatgatttggctctctgtttgtgtgttaatggtgtataggaatgcttgtgatttttgcacactgattttgtatcctgagactttgctgaagttgcttatcagcttaaggagattttgggctgagaacagtggggttttctaaatatacaatcatgtcatctgcaaacagggacaatttgacttcctcttttcctaattgaataccctttatttctttctcttgcctgactgtcctggccagaacttccaacactgtgttgaataggagtggtgagagagggcatccctgtcttgtgccacttttcaaaggraatgcttccagtttttgcccgttcagtatgatattggccgtgggtttgtcataaatagctcttattattttgagatacattccatcaatacctaatttattgagagtttttaggatgaatggttgttggattttgtcaaaggccttttctgcatctattgagataatcatgtggtttttgtcattggttctgtttatgtgatggattgcatatattgatttgcatatgttgaaccagccttgcatcccagggatgaagctgacttgatcgtggtagataagcttcttgatgtgctgctggattcagtttgccagtattttattgagaattttcacatcgatgttcatcagggatattggtctaaaattgccttttttgttgtgtctctgccaggctttggtatcaggatgatgttggcctcataaaatgatttagggaggattccctctttttctattgattggaatcgtttcagaaggaatggtaccagctcctctttgtacctctggtagaattcagctgtgaatctatctggtcctggactttttttggttggtaggctattaattattgcctcaatttcagagcctgttattggtctattcagagattcaacttcttcctggtttggtcttgggagggtgtatgtgtccaggaatttatccatttcttctagattttctagtttattctctgatggtagtttgtatttctgtgggatctgtggtgatatcccctttatcattttgtattgcatctatttgattcttctctcttttcttctttattagtcttgctagtggtctatcaattttgttgatcttttcaaaaaaccagctcctggattcattgattttttgaaggtttttttgtgtctctatctacttcagttctgctctgatcttagttatttcttgccttctgctagcttttgaagtttgctcttgcttctctagttcttttaattgagatgttagggtgttgattttagatctttcctctttctcttgtgggaatttagtgttaaaaatttccctctacacactgctttaaatgtgtcccagagattctggtacattgtgtctttgttctcattggtttcaaagaacatctttatttctgccttcatttcattatttacccagtagtcattcaggagcaggttgttcagtttccatgtagttgtgtggttttgagtgaatttcttaatcctgagttctaatttgattgcactgtagtctaagaaacagtttgttgtgatttctattcttttacatttgctgaggagtgctttacttccaactatgtggtcagttttggaataactgtgatgtggtgctgagaaaaatgtatattctgttgatttgaggggagagttctgtagatgtctattaggtctgcttggtgcagagctgagttcaagtcctggatatcgctgttaaccttctgtctcattgatctgtctaatattgacagtggggtgttaaagtctcccattattattgtgtgggagtctaagtctctttgtaggtctctaaggacttgctttatgaatctgagtgctactgtattgggtgcatatatatatttaggatagctcttcttgttgaattgaattgatccctttactattatgtaatggccttctttgtctcttttgatctttgttggtttcaaatctgttttatcagagacgaggattgcaacctctgcttttttttttgctttccgtttgcttggtagatcttcctccttccctttattttaagcctatgtgtgtctctgcacgtgagatggctctcctgaatacagcacactgatgggtcttgactctttatccaatttgccagtctgtgtattttaattggggcatttagcccatttacatttaaggttaatattgttatgtgtgaatttgatcctgtcattatgatgttagctggttattttgcccgttagttgatgcagtttmttgctagcatcgatggtctttacaatttggcatgtttttgcagtggctggtaccagttgttcctttccacgtttagtgcttccttcaggagctcttgtaaggcaggcctggtggtgacaaaatctctcagcatttgcttgtctgtaaaggattgtatttcttcttcacttatgaagcttagtttggctggatatgaaattctgggttgaaaattctttcctttaagaatgttgaatattggcccccactgtcttctggcttgtagggtttctgctgagagatccgctgttagtctgatgtgcttccctttatgggtaacccaatctttctctctggctgcccttaacattttttccttcatttcaaccttgatgaatctgacaattatatgtcttggggttgctcttctcgaggagtatctttgtggtgttctctgtatttcctgaatttgaatgttggcctgccttgctaggttggggaagttctcctggataatatcctgaagagtgttttccaacttggttccattctccctgtcactttcaggtacaccaatcaaatgtagatttggtcttttcacatagtcccaaatttcttggaggctctgttcatttctttttactctttttctctaaacttctcctctcgctttatttcattaatttgatcttcaatcagtgataccctttcttccacttgatctaatcggctattgaagcttaggtatgtgtcacgtagttctcatgccatggttttcagctccatcaggttatttaaggtcttctctacactgcttattctagttagccattcatctaatatttttccaaggtttttagcttccttgcaatgggttcaaacatcctgttttagctcggagaagtttgttattacagactttctgaagcctacttctgtcggctcgtcaaagtcattctctgtccagctttgttccattgctggtgaggagctgtgatcctttgaaggagaagaggtgctctggtttcagaatttttagcttttctgctctggtttctccccatctttgtggttttatctacctttggtctttgatgctggtgacctacagatggggttttggtgtggatgtcctttttgttgatgttgatgctatgcctttctgtttgttagttttccttctaagagtcaggtccctcaggtgcaggtctgttggagtttgctggaggtccactccagactctgtttgcctgggtttcaccagcataggctgcagaacagcaaatattgcagaacagcaaatattgctgcctgatccttcctctggaagcttcatcccagaggggcaacctcctgtatgaggtgtcagtcggcccctactgggaggtgtctcccagttaggctacatgggtgtcagggacccacttgaggaggcagtctgtctgttctcagagctcaaacaccgtgctgggagaaccactgctctcttgagagctgtcagacagggacgtttaagtctgcagaagtttctgctgccttttgttcagctatgccctgcccccccccagaggtggggtctacagaggcagcaggccttgcagagctgtggtgggctcctcccagtttgagcttcactactcaagggaagctttgtttacctactttgtttacctactcaagcctcagcaatggcagacacccctcccactaccaggctgctgcctcgcaggtcaatgtcagactgctgtgctagcagtgagcaaggctccttgggcttgggacccgccaagccaggcatgggatataacctcctggtgtgccgtttgctaagaacattggaaaagtgcagtatttgggtgggagtgtcccgattttccaggtacagtctgtcatggcttcccttggctaggaaagggaaatcccctgaccccttgtgtttccccagtgaggtgatgccccaccctgcttcagctcgccctccatgggctgcacccactgtccaaccagtcccaatgagatgaaccaggtacctcagttggaaatgcagaaatcaccatcttctgcattgatcacactaggagctgcagaccagagctgtccctattcagccatcttggaacagaatctctcattttcactaattgaaaagtaaatgtctatgtggcaagtggctagcataatagacagcataggccaaaccattacccacttgtttctgttttcatagcatatcactgtctgaaatgatctttctcaactgtttacaaatttacagtttgtcttcccccattagaatgtaggttttgggactggacccatctgttgttagtcataagctaatttactgtgagttagaactcatttacaagcctgtagcacatgctgttacatacctgaaattgtaggaaattttcatcttcaagtctggatttgatatctacaagagccaagagtaatgtgtgtcaagttgcataaggtagagactaatgtctgggtttacttctgtttaagacagcagcaccgaacacagggctcatgcctgtaatcctagcactttgggaggctgaggcaggtggattgcttgagcccaggagttcgagaccagcctggccaacatggcagaaccccatctctactaaaaatacaaaaattagccaggcgtaatggtgcacgcctgtaattccagctgtaattccagctactcaggaggctgaggcaagagaatcacttgaacccgggaggcagaggctatagtgagctcagatcatgccactgcaatccagcctgggcgacagagcgagactctgtctagaaaaagaaagcaaactggcaatgaagtgaagtaatagcaacaaactagggcaataaagtcatcaaaacttattattccaaaaagatactctaaaaatctgagaaaagcacatagttataaaaggtacatcaccttccaaagtaaagaactattcctcaaaaaggaaatttgtttggccataaaatttataacattcattctaagaaggcagcctcattgaatcagtaatcaaaagcctcacaacaatgaaaaactcaggcttagatggcatcattggtgaattctaccaaacatttaaggaatttacacaaaccctcctcaaactcttccacaaaattgaagaggagggaacacttcgtagctcattctatgaagctagcatgatactaaattcagacaaagacattataaagaaagaaaactacagaccaatatctctgatgaatatcagtgcaacaagcctcaataaaatactagcaaacagaattcaacggcacattaaaaggattataccccatgaccaaatgggatttattcttggaatgcaagaatggttcaacatacaaaaatcaatcactgtaacacactacattaacagaatgaaggaaaacaaccccatgattatctcaattggtgcataaaaggcatttgctaaaattcaacatattttcattataaaaaaaaacacccaataaactaggattagaagaaaaccaccccaatataatgagggttgtacataaacagccaacaactaacatcatacttaatggtgaaagactgaaagtttttcctctaggattagaaatgaggtaaagatgcttattttgccactgttattcaacatagcactggaagtcctacacagaacaattaaacaagaaaaagaaatcaaggcatccaaattggaaaggaagaagtaaaattgtttccacttgcagatgataagattacacacacacacacacacacacacacacacacagacacacacacaaacacataaaacaaatcctgttagaactaatcaatgagttcagcaaagttgcaggataccaaatcaacccacaaaatcagttgtgtttcttacactaaaaatgaagaatccaaaagggaaattaagaaaacaattccatttacaacagcataaaaagaataaaattatcaggaataaacttaaccaaggaggcaaaagacttgtacactggaaactacaaaatgttgctgaaaaaaattaaagacaactaaatggaaatacatcctgtgttcatgagtttggaaggcttaatagttaaggtgttcatgctacccaatgtgacctatatatttaatgcaattcataccaaaattctaatggcagtttttgcagaggaaaactccaccttaaaattcatatggaatctaaagggatgctgaatagccacaacagtcttggaaaagaagaccaaagttggaggactcacacttcctgatttcaaaacatactacagacatcaaaacagtgtggtactgggataaagacagatatatagaccaatgtaatagaatagagagcacagaaacaaaatgtcaaatgatttttgaaaaaggtgccaagaccaatcaatggggaaaggacagtctcttcaacaaatggtgctgtgaaaattggatatgcaatgcaaaagaatgaagttggacccttaccctataccatacacaaaaatcaactcaaaatgaaccaaagacctaaatatgggagctaaaactgtaaaactcttagaagaaaacataggggaaaagcctcatgacattggatttggcaatgatttcttggatttgacaccaaaagcacaggtaacaaaagtaaaaatagataaattggactacatcaaaatttaaaattcctgtaaatcaaaggatataattaacagactgaaaggcaacctacagaataggagagaaaatatttgtagatcatatatctgataaggaattaatatccagaatatataaagaattactacaatacaacaacaacagcaggaagaaaaaacaaataacccaatttaaaaataggcaaaggacttgaatagacattcctccaaagaggatatacaagtggccaaaaagcatatgaaaagatgctcaacatcactaatcattatggaaatacaaatcaaaaccataatgagatatcatctcacacctattaggatggctactactgaaaaaacaaaacataacaagtgttggtgaggatgtggagaaaggggaaccttgtatatggttggtagcaatataaaatggtgcaggctctatagaaaataatatggaggctcctcaaaaaattaaaaatagaattaccatatgattgaagaattccacttctgggtatgatacggtttggctctgtgtctctacccaaatctcatgtaaaactgtaatccccacatgttggaggagggacctggtgggaggtgattgactcatggggttgtatttcccccttgttgttcttgtgatagtgagttctcacgagatctggttgtttaaaagtgtgtagcacctcccccttctctctctctctcctgccaccatgtgaagacgtgcttgcttccccttcacccttctgccatgattgtaagttttgtgaggtgcccccaccccccatagccatgccttctgtacagcctgcagaactgtgagtcaattaaatctattttctttataaattacccagtctcaggcagttctttatagtagtgtgagaataaactaatccagggttatatacccaaaagaattgaaagcagggtctcaaagacatatttgcacacccatgttaatagtatggaattagaccactacttctcctgctgaccttctcatcttttccacaccccccatccccgtttccctagtttataagacaggagaaaaaggagaaagcaaaaagttggaaagaaacagaagtaagataaatagctagatgaccttggcgctaccacctggccctggtggttaaaataataataataatattaacccctgaccaaaactacttgtgttagctgtaaattccagacattgtatgagaaagtactgtaaaacttttggttctgttagctgatgcatgtagcccccagtcacattgcccacgcttgcttgacctatcacgaccctttcacatgtaccccttagagttgtaagcccttaaaaaggccaggaatttctttttccaggagctcggctcttaagatgtaagtctgccaatgctcccagccaaataaacctcttccttctttaatctggtgtctgaggagttttgcctgtggcttgccctgctacaatagcagcattgttcacaatagccaagaggtggaagcatccaaagtgtccacctacagatgaatgaataaacaatacaatacatgaatattcatacaatggaatatcagccttaaaaaggaaggaaattctgacacatgctacaacatggatgaaccttgaggatattatgctaagtgaaataagccaatcgcaaaaggacaaatactgcataattccacatttgaggcacctggagtagtcagtcattgagacagaaagtagaatggtggttgccaggggctggagaggggcaatgaggagcggttcggttggaacagatatgagtttgggaagatgaaagttctgtaggtggatggtgatgatgtttgcacaacaatgtgaatgtatttaacatcttagaactgtacacttaaaaaggttaagatagtaaattttatgctgtatgtattttgtcataattttacaaaattaaaggcagtctcattagttctctgttataacttggatgccagttcatgcagaaaggcaatctcttcaggtctcgcaggatggagtagtgacctggaagagaatcctgctcactggagcagggcgctgctctcttttgaagatgcagtggaggttgtctctttctccacacaaagggcaggaaagacgacaatggcagggtgtggggggagaggcagtgaagtgcattcagcaaactgtggagttccatccagatcaagaaattctccttacatgaagtctgtggtacagttctggctttcatgcccactgtcttctgtgatgctcttggtaaccagcagagagggcagggcaggttgtgtcatatctgcttttcgtgagtttagacaggggttctccacctcagcactattatcttttgggccagaggattctgttgtgtgtggctgtcctgtgcattgttggatgtatagtggcatccctggcttctacccactagatgccagtagccctccctacccacccagttgtgacaaccaaaaatgtctccagacatcaccaatgacccctggggggcagaatcacccgtttcagaaccattaggttaaaagttttgagactcacacagagtctgcacaaacccaagtcttctaattccagatctcccattccaccatgacaccaagttattctccacctaaggcccccttgacagccactcctcacccttctcctccctagagcaggacatcaagggatgcctcgctgggctcgctgggcttcctggccctctggctcaagtgggtcagcaaaatgggagccactggtgagagagaggaggggagaagcaagagggtggggtgtgtcttcacctgtcctggcccccctccctgcacaccgatggggactatgacaatgagttggctacaccaggctctggcatgacctctgcctccccctgcccagtgaggcctgggaacaaggacagctcccacagccacagcccctgcctgcttcccactgcctcgtccctggtgtgacccttgcatgcctctgtgcatggacctttcattcatttatttccaattaaacacttctgactggctcatctgttccagcctgttaaaaccaatcaccccaaacttaggacaagaactaaaagtcagcacttgaacacgctgcagctgattatccacaccctcccttccagcaagctctctgctgctctattgaatacgtctcccctctctgaaagcccctaatcctgctcgctaatgctcttacggtgtgcttctcccaccaccttgggttaagttatttctgtcccatcttatctcctccactggacttagggatttgggaggaaaaaagaaagggattgtatttcactccatttatatgaaaatgaattattttgtgttgttttccatttttcttcaatacttggatacaaaattttattaagatatttttagaattattttgaactttcacagtttttagaataatctatgaaattttcagttttggaaactttcacagatttctttctaccttttggatctcattgggaaagtactccaggcactcgtggcattactctcagctgttggggactaactggctcacggcatttttcagagctctacaggggccaaacaagatgcccggcttagtctaataagctctctgggtgcccttgggcctgaaaatactaacttttgggtattttcttggactcctcagaaccgaatggcacctcacttcaaatcatggtccacttgttaaacttactgagtgcttgatacgtgcctagagtgtgatccgcactcttaatatatggataattaattcaaatgtaatctgacttaacatactctctactccaactctgcaggcaaatttgtagtggaaggagtctggtgcatgaataaatagatacaaattcagtacaaaatgcgtgtttcatgacattttcatggaaaggaagtgaggaaagttgggaggagtagatgtgatgaacatctagttttcggggaggcctcagggatgcctgaaaggaagtcactacccaatccaggtagccctgggccaggagaggtgaggaggaggggctgagcacctgggggagctagtgacacagacagaggagggcccataagcacaccacaaagctggagaaagacagcagttaaagaaaggcggcataaagtcagaaacaagtctgagatgcaacagtgtctcgctctgttacccaggctggagttcagcggcatgatcacggctcactgcagcctccatctgcagtgatggctcaagcaatcctcctgcctcagcttcctgagtggctgggaccacagacgcgtgccaccacgcccaggctgctcttgaacttctgggctcaagcaatcctcccgccttggcctcccaaagtgctgggattataggcgtgagccaccacacccagctagaattagtttcttcaaatgctaggcactgagtaacacagaatgcctaagacatgatcactgcccctaggaagctcagctgaatatccaagtatgcaagactgcctggatgcccagaaggcctaggaatgacatgaagaaacctaagcccacaagccggggtctgtgagagccaagagagaaggctttctgggcagggtgaccaaagctgcagcctggcaggcagggcagctctacaccagcctcagaggagcaggcagggcctactgtgctgcaggcatcttcacagagaagacgcaggaagggcttctgagggcagacgcagggaagggtgcggggctgattctcagtcaagggccatcttctctctgccctgctcatatgtgccactgatggtatccagagtgaagcagtgaacagtgtagggctgcggctggtggctgcagtgaggtcaaagacctcagtcctctgggaacctctctgatcctccagagacctcaggggcacaaataaagcaatccaacatacagagaagacagacatggaaaaagtatgtttgggtttttagagactgtattagtccattcttgcatcactatatacaaatacctgagattgggtaatttataaagaaaagaggtttaattggctcatggttctgcaggctgtacaggaagcctggtgttagcatctgctcagcttctggtgaagcctcagggagttttcgttcatgrtggaaggcgaagggggagcaggcacttcacatggtgaaagcaggctcaaggtggggggaggtgccacatacttttaaataactaaatttcatgtgaactccaagcgagagctcacttatcaccaaggggatggcccaagccattcatgaggcatcttcctccgtgattcaaacacttcccagcaggcccacctcccatcggtgattacatttcaacatggatttgggtggggataaatatcctaactatatcagggaccatctcaaaaaagtgtcccagaggagcaggggttggaagaaaaggagttttgtgtgatgcgagcagtgccttcatgaacatggaatgtggggccatcctggaagaggtaaccctcagccacacacacacacacacacccacataatggctttatatcctatctcaatagcttgtcctgaatcccttcttttgggagcaggagctatatctatctttagcgttcctgtaaataccacagcacctaagacactgcatgaaacccagtgtgttctacgggtagtcggtaactaactgtccttaaagatggtcctccctaatgtgggcaaatgaagccagtccaatggccagtgacgtacacatgcagttgtacaggtaatggtgttgagtcagatttctctggttgctatggtttcaaggtcactggatgttaatcaggcagctttgcttgtaccctgtccctatgctttccctaaaactctaaactgacctgagaaacctctaacctgacatgcaactagtcctctatgctatatttccagttgccatcttggacacctctacctacattttgcggacacagcaacgtgtcccaaactggaatcttgttcccttgcaaacctgccctccacttgcatcccttcctcatcattcactgtgttgcccaaactacaagcatgagcattcgctttttatcctcgattctggctctctgtcgcgtcggcgatccttccccccgttgctgtggagatgcctccctggcacgcacctgaaccatagctggatgctgattgctctttctgcctcctgcttttacttccaccctcacctcctccacactcctgccaccgatgtcttctaaaatgcaaatgtgagtacatcactccccacttcagtatctgtcagtgaccctgaaatgcattcaaaaagaagtacaatatcttggcaaggtctaccagtcttaattcagcgtcgctgttccttcagtctcatctccggccataacaaaacgtcctgtgcagtgctctgtcatgcttccaagcctgacccccctcaccccagtcctgtagacttgtcacatgtcatgtccttctgattgctggttttttctatttccatgcaagcatgtgaactgcttgaggacaagggtagtgccttgttcaccatgaaatttctggcatcatgctttgcacatagtagttatccaacaaatgtgggtcgaatgaatgaattgtatgcaacaccggatcaggagatatgatacaaggatttgggtggcaaaggattgtctcagagatgcctctaagcctccctaagagttcatggccataaaccaatagtttcagagctactcctttttgatatggatatatcctggacttattaaattgacagcacatattttatttttaaaatgttattaagttaactaggggcatcgctctatcctcaaaattgttttggagacaccattaacccacttaaattattaataaaaaagccacttattccgcacaaatagttgagactgtcctgcttacctacagatattcgtctaagagccggcagacattcagatacccgcagacagaacttactttctggacctcccacaacattcctccctttagatcttttttttcttaccccgtctttcagctttctcattgcagaactgctgagaataatggaaaatgctttgcctggaaacttccaagaacaaaactccgggggctaagagaacgcgatgatttttaagctgccagttaagatgcagctccttcatcatcacaggtgaagcaccaatgcctctcgcacgtgaaatccgtacgctcctagagtcttactacctaatgcatttctgcaatctgggacgcctgtccttagcgtcttcaatagttttgggcacgaggtggaccgcggaagtattgtattgaaaagttaacgtttttcccttggacaccctctcctcacagctattaacaagctgagagaaatcaggtgactcccagtcatgcagaggtttcctcaccatttatgatcaagccaaattaaagaataaaaataaaatcctattggcgcagcggccaccaagtctttgaggcctcgcctcggtgggcggggccgacgccggaggagaggggctgcgcatgtgggcgtgacctcgcggaaggagctgcggagggcggggccgactggagaggggcggggctgtcgggtgggtgggacctcgcggcaaaagctgcggagggcgggaccaaccaggaaaggacgggactgtcgggtaggcgggaccttgcgggagaaactgcggagggcgggaccaaccagggaggggcgggctgtcggatgggcgggacctcgcgggaggagctgcggaaagctgagctggtgaggggaggggctggtcgaggggaggggctggtcgaggggaggggctggccgagggaaggggccggccgaggggaggggccggtcgaggggaggggccggtcaaggggagggcccggccaaggggaggggccggtcgaggggaggggccggtcgaggagaggggttggtcgaggggaagggctggccgaggggaggggctggccgagggaagaggaggggaggggacgggctggtcgaggggaggggaggggagggcaggggacgggctggtcgagagaaggggagggcaggggacggggtggtcgaggggaggggacggaggggaggggagtggagggagaggagggaaggggaggggagggaagggaggggaggcggggcccagcggtgtcccgcgaaactgccgctcgctcggttcccgggcctccccgtgcgcctcagtgcaaagcgtgccaggcactcttgactgcaacgagagccgcggcggtgagggggcaaggccaagaggccacggttcgcgtttcgccggctgcagaagttgttgccatacatttcaaatgtgcatttcctacgtctcacgctctgtcttgcgcctccacagcgggccacggccctgtcaccgcagtcgcagccacatgctccctcccctgagtcggctcagctctgctcagcggtcagccccgcgccaggaggccgcggcctgcctgaggccggctcgcagcgactcgggacggagggcgggggcgtgaacgggtcgcgcggagagggtggggggagcggggagcgttagggtacgtgggggcgcgtcgaccaatggcagggcgctgttgagtgcagcggggcggggccgggcgcgggggtggggcgagcggcgggcggggcggggcggccggccggggggtgggaggagaggggcggggcgggccggccgggggaggggcggagagacgccgccgctgccgccgccgccgccgccgccgccgccgtggctgccgcagcctctgggagtctggaaaaggggaagcgagagcaagcgaaagactcagtccccgggcggcggcggcggcggcggccgcgggggcgcgacggccggggcgggggcgctgctgctgcgggggcaggcggcggcaggggcggcggcggcggcggcggcccgctccagccatgccgaataaaaacaagaaggagaaagtgagtccgggcccggccgcgggacggagggagcagggagggactgccgggggagggcgcgacggcaccggggtcctgcgcccgggccccggctcagttccccgcctgacgccgcgggcttcgcgtccccgagggcggccgagccaggcatccccgggcttctctcggcctcatgcccggtgggggcggggagcccggggatcgcgccggagccgcggggcgcaggcccgggccgctgggaccttcgtgatgggccggggctgggcgtggagggagggcgcggcccggggagggggtcggaggggcgcccgtttccgacagcgcgccgtgggcttgggcgggcaggtgcggccgccgagggggttcgcagcctcgcaggctcccggaaaggagcttcagggatgggggctgtagacgcctggggagggacccctgtacgggggaaagggagcgagaagggaccccgctgagagctggtaaggaattctctgccgccccggagggacgctctggggctctcgaacactattattatcctgggtggcggcggcggtgagggctgcgagcaagggtgctgcgtttgcattcgggggggcgggtatgtttctgcttcaggtggagctctgtagcgtttcattatcaccccagaaatcctcactcatagggtttagggtgggagggtagaaagggatgtgatgtggatctcaaaatgccagaagcactgtataaaattggatttatctgttttctgcttgaagttttcaacctcaaatgcagataaaacgaaaagaatctgaatgggggttggggggcattgcactgttggaatcctaaacggtatgatatagaatttcctaatggtatgaattaaaaatatcagaagctgtagttgtataaatcacttttaaaactgcatttggcttatctgatgtttacctgtctaaaaagtgagaagactaattgactttgcttgatgtttaccaggaatcaccaaaagcagggaagagtggaaaaagttcaaaagaaggacaagacacagtagaatcagaggtaactgtcatcaaatattgactttgtattttatacacagcttttaacttcaggtagaaaaaccgagagtgataaagcctagaatcttctaaaatgtttccctatgtgaggttttttttttgtggtgtcttttataaccctcaattttagttgtttaggtatttactgttttgctttggaaaactattaatgattttatgaaaattgtgcttgcctatggggtttgtttgtgggtcttttggggttttttttgttttttatttttttgagacggggtctcactttgtcacgcaggctggagtgcagtggcgcaatctctgctcactgctaccccttgccgcccaggctcaagtgatcctcttacctcagcctcccaagtagctgggaccacaggaacatgccaccacacccaacaaatttttttttttttttaatagagtctcactctgtcacccaggctggagtgcagtggcgcgatcttggctcactgcaacctctgcctcccgagttcaagcaattctcctgcctcagcctcctgagtagctgggattacaggcacccgctaccacgcccggctaatttttgtatttttattagagacggggtttcaccaggttggtcaggccggtcttgaactcctgtcctcgtgacccgcccaccttggcctcctaaggtgctgggattacaggcctgagccaccgtgcccatcctggatctggtatttttaagttcatttcccacacctcaaacccagcaaccctcctgtatagattggtcttatgcagtctatggtgttgctatgttgcttttagctttagggtcatctccccaccgccacttccattgcaagctgccaggcaactcagtggttagttctttttcttccatcaccttgttttccttcaaaccacctctgctactgacgtcctgggctagctccctatttctgttgacggtcccttggcctctttctccaataatgttggtatttgaaaaaatttacctagttttggtattttattattgttcacattgtgtgtgtgtgtgtgtgtgtgtgtgggcgcgcgcacttgcgcgtcggccacttgtaaatttctttgcttcttggctttggcctcattgaggaacagctggaatgccaagtgagcattgcatctacttgaccaaggttgatgctgttccttcacaccgtgaagtgccttcagaggatttgcagagtcaccactttcctttgccttttcttccttgtgactaattgttgaactagagcacctagggccaagggtccaggagctgcgtggacccaggcagagccagtaggtccttttgaatccatgggtagcacataattgggttaatagagtgtcagttatccagaactggatcattgaagccccagtcttatcacaaatgacgtttatttgccagtgtcagacttcttcctgtaagccaaattagaatgagttcagttctgtctgggaaacacagttaactggcgatgatctgcagtggacttttttttagccctgcattctctcttttctatcatttggtgtattctgaacctccctcctcttcagcaggtggtttattccagcaaatctgttgccctccccaaagcaaaaagcagaaatccaaaagattccttaaatgtcaatagttaggatcatttgtgccagtctgtccctccctgtctttatagcagacaactgaggtttactgtgccatgctgggatttgacttgtttctttcttccctgtcacccttttgactaaattcatttcgatgaagatgaaatgtaggtgctttatgaaggtatatgctatatgccttttttttttttttttttggtcttttgatctttcattaaaactgctaagatttcttctccccagagctttcttgctaatgtgcctatatcctcttactttagctatattccttatacaaaggagcatcagtgtgtatatatcatttatttctatttttagtgggaagatcctggctgtaaggatgaataatgttaagtttaaacctgaaaaatctcagtagttcaaagataccaaaatcactactatgtgaaatgtgtgttttgaaagcagtttgccagccgtgtgagacctgcggtgtggcctgcagtgcctgagtatgatgccccacttgtctttttgtattttttctagtgctactgtctaagagctggagctacagagcttgaaattaccactgaaaacactgaaatgttgggcccttcactgcttcctcataaggataccagaggcaacctggcatattaagcttgacacttggcagatcactgtgtaaattgtttttcaggaatacaagttgggacacttctgttcatttgacctttgagttgacccttaaattttattattgttttttttcccctcagtcttcagctcactgcttcacttctagttccacccacttaccaaatatgattgactcatgcaggtgaattaaaccattattgcacactttttccctctcctctctctcagtattactcttaacttgaatattttaacctgaacaatttaaataggcttgacattcccatgctgctttcaagcctttttttttttttttttgagacagagtttcactcttgttccctggctggagtgcaatggcacagtctcggctcactgcaacctccacctcccgggttcaagtgatcctcttgcctcagcctcccaagtagctgggattacaggctcctgccaccatgcccagctaattttttttttttttttttttttttgtatttttagtagagacggagttttaccttgttggccaggctagtctcgaactcgtgacctcaggtgatccgtctgcctcagcatcccaaagtgctgggattacaggcgttagccaccatgcagcccctttcaagccttttaacatcatgtcaccttcacaatgagcagttgctcccattacccagtgaactcaccttctgatgggacagttaccctagttggggcttctcagccttgagagatgtgcagagcagggacctgtccagggcagagcagccagacagcgtggaaataatccaaacagagaaagcattcaagaacttggcctctggttgacttaacacactacttcaagtatatggcaggtctgtataataaactcctgcctgtctagtcttcagcctcatagaaagcaagaaagcaggtggcgtatgttgcagaacaattcttgggtagaacaaggggacatttgatggtttgggtttttcagtaagaaagatgaagtcctggagtatagggtagagtggtacagtggaaaatatttcagcttgggggttagaaaataaacatgccgattcttgctttgccataaatgatgtcacctaacttgtgtgaccctgttttctcatccctaaaatgatttgataagtttaagattaggctatttttaaatgtatggaagaaattgggtgttaccctta

SEQ ID NO: 97290 - DNA, 137553 bp, Homo sapiens
cgagttgatggaaagagttccccggggaggggccgctgggctccttctttgcagaaatgagtgcgtcgccctttaactaggcgcggaggctgcgagcggtgcggggtgacctgaggacacccgaagacacgggcgactcgcggggacatcctgccccctgccggccgcgagcgggaccgcagcggcccgcgggtagcgtcccgccgcggaggtggtttttccttgtgatctttccagaagcagtgaagccctcttgggcacccgcgcccctcgcctggcagacagccacccgctcgcgcacgaactcgctgcacagagctgtcaggagtggggcgtgtggcctggagcgaggctgctcgcgtaggctgggcctgggctcctggccgtgttgtcaccgccaatccccacacacgcaagagaaagcagcttctagcctcatctcacacacgggaaagtgaggctcagagatgtgtggcctggccggggtgcacagccagtatccggtgggcctgggatgccagcccagcctgccaggccccagggtggccatcatggagtgggactcccgggctggccccccagagcctgttccaggcacgtgcatttgaattaatggggttactgtttcctgagggctcttgccagacaccagctacttactgcacgtggttgagcccaatcaagtaggcagtgtgccctgtgcccatcttacgcacgagcagactgaggcacggagaggcttcagcgacttgcccaggtcagcagcaaggaagtaggggcaggagagagaagtaggtcttgctgagtctagagttagctcttgaccactccaggccagactgggttctccctccttccaggaggagggcaggcagccccatctgtgcccatccctgcggtgcacaaaacagtgcagcttccgggccactggctgtgtttctagggatcacctgagttaaagcaagaaaaggaatcattatttttttaaccagcacatgatttggggcttagaggttgtttgcagtcactcttatgaagaatgctacagcagacaccgtgggttcaaggttatttccttgggaaagacttccagaagtcaaactgctggaaccaaaggctgggacagcaggattttggcatgcatgttattaggatccttctcgtatatgtgtcccagcttgcactcatctggggagggactcagaaaagagggcctcctcccctcacaaccaatagcacccttgagatggcccaggctggcagggttggaaaagtccagctcatctatggtccagttctctggtgggcactgacccttgagccagccacacccacacccacacccacacccatgcctgtggggatcagaggtcaatagatgcagcctccaatggtctgaggctccctgactttcctcccgccttctctccgtgtgtaatcccagcccagggccaccctttggtggcaaacacagacacccctgtgtcagccatacgtattcagccaaggctttatgagtaccttccacttaggaaccctcacttctgtctctgccttcccttgcgattatgagtcccagcaatggcagctgagcactcaggatgcccactcctggctctgactttacgtcactttctcaacacgttacaggtgaagagcctgccaagtggccgagccacgatttggccccagagcccaagttctgttctttccttgggtctctgctgtctgcccaggcctgagcatggtccctcagacaggctcaggaagtatttgtggatgaatcaatgaacgaccccgtgagggcctttgcctttctcccctgccaggctgggagcccccagaagacaagtggggttgaccatgtgcctggaaggagtcacggctcctctctagaccggaactccccactagagcgatggggtgccacagggtatcccagcaggcccggcaagcacatcacaggagcgtggagaagcgggaccagccgtgcccccatccctgggagccctgcccccagccttgtctaaggcctcacttgccccatatctggtttggggagcaggtttctcaccccaatatgattctgttctctgccccctctgccctcctaccccacacatcccagcgtggatggacgagacttcgcccctgcctcctgcccgggcccctgccatgggaaggggacgcattattgctctctctcagggctattcagacaccaactaatttatttccctcctgcccccttccttattgatcaatgctttagctgagtggctgttaaatgacttgttcccatagcaaccatcagatacatgctcggatctgatgtgtctgtttcctgagccagatcgcctcctaagagcttggagagaacaaatctcctttcatatccgtcgctgtcttctgaaaggcacaggatattgttcagaacaagtcattttttaaaacaatattaaaaaaagaactaggtttttcaacagatataaagttgtttcataaggtgcatcattcttaagaagtattaaatcagattttaaaagctttgaccaagttaatctttcttctgcctacttttccttctgcacagggggaagtatggaaacggtctctgcataaagatactctgctgcatcatttataaaaagaaaaattgaaaacagcctaaaagcacaatagacgattcaaatgatctatggttcacatacctgtgagggttttatagagatgctgaaacgctgcttagaagagagaaacacacatgtcaacaacgtgaagtgaaaaaaaagaaacaagattaaaaactgtgtctgcacgggtgagcataatgaatggaaaacaaagctaaattatgtagaggaaaaaatactcaggaaaacaaacacagtgaaatgttgacagaagtgtttcttgttggcagagccatgggattttcttccttattcacttacttaatacatatttattgagcacctactacgagcccagccctgtctgaggcattaacagcacaactgctatttctactgcctatattttcccaaatgtgtttaaaactgttttaaaactatgtatttttttcttatttttgtttgtttgtttgtttgttctgagacaggctcaagtgatcctcccacctcagcctccccagtagctgggactacaggcgtgcactactacaccccactaatttttgtattttttgtagaaacagggtctcgttgtgctgcccaagctagcctcgagctccgggcctcaagcaatccacccacctcagcttcccaagctctgggattacaggtgtgagccaccgtgcccagccaagtataattttttttaatgacagggtacatgtttcacctgccacgttgccaacaaataaacataagacgctctgttggtgaggagaggatataggaacaccagccccgcctggcagaagaatgaatgaccacgaccaataaaggaccagttatcaacacttaaaaccgacatactttttcccagcaattccacctgtagtcattgtccctactgggattctctcccacctttgtcgtgggatgtttacgaagcttgtttaccgtggcatgtgactgctggaaccccgaatggtcctcgccaggggatggctacccagatcgtggttcagactcaggaaaacactgagccctgagaagaacgaggcgatctgccagtgtgtggaacactaagctgaggtccctaagggacagagcaaggcggatcacttgagatcaggaattcgagaccagcctggccaacatggtgaaaccctgtctctactaaacatacaaaaattagccgggcgtggtggcgggcacctgtaatcccagctccttgggaggctgaagcaggagaatcccttgaacctgggaggtggaggttgcagtgagccgagatcatgcccaagatctctgctcttcccccgtcttgccttagtgatcctgggcatgtcccttcacctctgcggcctcagtttctcatctgcacagtgaagatgctgatgcccgcctggctgatgcccgcctggctgcttcctggacagatttcccaggatgtgctgtgtgacaggccttccacacaggccctcaggcaccttttcttcttcctgagatggaaacaacaaaaaagttggtgcatggtcaccagcgatccccaaactacgacctctgccctcttttcctgcagacccctcaaaaatcacgaaaggggcccttgcaatagggggtctctatggactcaaacaaagggctttccctgggaggggctgccggcctttgcctataacatgcgtgatgtagtttttaagactagcaaaagcccagcctggcattatctagcattgaggtacagcgtctcacggaaagttcttttttattccccaggctgtccccttctcctccattcccggataagccttcactcacctctgcacctcaccagcatccactcagagagacccagcccctcaaacccagccagcagggaccacgctgcacattaagtttgctcaactgctccaggttatttgaaaacttatgaaacctttttcttaaaaaaatcaaagtcccattgtgagagggaatccagtactttcttaaaagtactaactcagcagctgcaggaatcttcctgacctaaagaaagaggaaggagaaaaaacacaatcacccctggcttctgacacgcatactcctggctggattctagattagaacaaaggggacataggtcacggagccatttctgtgcctagacaccacctttgattttgcagggtggcgcaccagggcttagccacaagggggtcgtgattcagtgggtatgaactccagtgggggagtgcggggagagacagcaggccagtggtccttcggggaagatgcgggagggggttcttttttaatttttctggtctgttccacataactgaatgccagggacccaacctggatgggtagggggtgccaggtgcagacctgactctgcactaggaaggaatgcttgtcaccaccggcaggcatgtgtgcttctcagcccgtcccagaggacaatcccgaaccactgatccaaagccttaaaaccctgcagaacttttgacccaggccccactgctaggaatgaataacatagtaaagataggtgggacgattgagctaccagcgtgtttatgactaccacgttttcagcaggtgaagtgcaaagtgcctaatgttcacaagaggggctgagttgagcaaaagcaaatttcagttcagccataccctaaaatatgaatacaaatattgccgtggctaataccatgaaaactcagtctcatcaaaccgtctagcagattacaagcactctggacagtatgttactatgcagagacataggaaaatgtctacgaagaaatacaccaaaatgttaatgacagtcatctctgagtgacttctctttgttaatatctctgcatgttctgatgtttcccacaataaactgatgtatcttttgttgatttcagagcgtggccttgaggatgttccttcacctctctgagcttcaggctcctcacctgtacaatgaagacagcacctgcctcatggatttgctaatatatgcaaaatgcatagcttgctgcctggaagataataagtacccaaatgttagctgtttttatttttcgctcaattttctacatataaacatgtcattgtgctccgtgctggggatatggcagtgacagctaaactccagaagagaaagattaaaccaacactcacagacgattaatccgctgccgtgaggaccaatgatgtattcattacagttagggatgctgtggtggggggcacgttgagagcatttatcaggggaactttgttgagagttttgatcattatcttaagagcaacaggaagcctgacattgaaggcttcaagcagagctgtgaaatcagaagttcatggtttaagaactcaccatatccacaccgtggactgagaggggccccagggaggtgccttcccaggaggctgctgtgggggtgcgaaccacggaggaagtgctgccacggcagatggggcgaagtggacagaccccagccccttcaggaggtgcagtttgcaaaatctggacacagtgatgcctcggaggggcttgtggcgggatggtsgggtgaccccagacctctagtctgatgtagtgcgccgatggttcctggatacagaggactcagtggggagcaggtctggggcgttgcggagtgtgtctaggggagtgtgtctggggacatgctggttttgggttgcctgggcgggggaggagggtgtccaaggggatgtcctggaagcagagcagtctgtggtcgctttgaactcgggatccgcgagaccccaggggttcacctccattgcatccgggagagacaccggttaggggatgcaggactccccagcgctgggagcgcgaggcctatctaaaggccagacgttctcagagtccgaggctcgggtacaggtgttgcgcctccgacgtggaggggcgcggggctgggagcccaagccaggtgcgcgggtggcctcgctggtacacgaggcggctcggtctcagagggtcagtgggggccggaccctcagcgttggtggccgctttcctctagggtgggcgtatggccgcctcccccaggcagtcctcctgccttgcccgcgaggccagctcaaaagcctttatgcccgggccgcccgccaggggcgcccttcccagcccgcgctcgcccgctctgcctcgcccacgctcgcccccacccctgccctgagccctgcatccygggmagccccctctgcaggtactcactaaacatcgtggaatgagggaaacagagacccggagagaggagcgcggggagaagagagcccacgatgttcccagcccttctcycagtgagatcatgagtcattttatgttccagcgtctatgcttcaacaccttccagattttcctccgtgagctggcatctcctccgtgagctggtggagtcagaaaccagcatttttctatcactgtttctgaagatgtgctgaatacgaaccaaagaccagggcgctccggggaggggaccgggcgggctctagctttgcgaggtgccagggggtgttggtaggggccgtgcctgctgctcccccagcgtggggcggtcctggcggttttctgcttgcctcctgggctcccagacagcttcctccagcccagcttccctggccctagaaggagtaagcaggcaatccctgggatttgcttaaaccacccacacccccaaaaatgtgtgtccccctttactgggaacgtgtttacagctgtgttatgtgggggtgtgtcccatgcccagcgtgggcccctggtggtgagtagtgttgggtacagctgggagcctggactccacctcagctctgtccctggtatgtccagggccatgcccgagcctccttttccttgaatgggactcaccaggtacatctccaaaggaggttgtgagcattaagtatccaggacttgccagggtgctggcacacagtaagcgctcaataagtgctggctactgtgagaataacgtgaagggaactggatggggtgctgggccttgctttccccagttgcccatactctggccctgtgtggcttcctcctttggcccggccagcgtggatgtggttgaggatgacatatgtctgtggaaggccagctgacaggctctgggacagccatgacaagttaatgaattccgctgtggttactaaggcacatgtctgggmcacgaggacttctgtctgccgcactgacctttaaaagagcgcctctaatacccaccaatcactcatgctctgattgaacattcagaagatgaaacctgtctgagctgagagtgatcastcatccctgccgccccgtcactgtcactcctttctgaatcataataaaactttgcaaaactctttggttcactcagcagcctttgctgtgaagacgggggcactttctgacatacctggcggtgagggccagccccgtacgctccttcacccaccccagcccacaccgggcaccccttgtggggagggggttccagccctgcctgcgtacatagcctttattttaatcctttaataaccttctcgttcagctttccatctatccattgaraaaacatttatcaaggatcacctcagtttaaatgtctttggccacaaggaacataaaacctgtctcaagctaaaaccataaaaacatggatcatttcatctaacaggaagtctagaagtggaatggggttcagggtgtgtggtagctgggtgtggtcctcaaagaccctggtgccttccatctctctgctctgttttcctacctctctacctcagcgctggcttcaaatgcaaaatggaaccaagatggtggccagcactccactgtagctggccccgacacctctctcagtgactctttctctttgggagtaacgaatcctaaattcagtcactcttattctggcacctaagattgtatgggtagcccctctccagagagtgccctagatgctacacccaggggcatgaccttgaccttcccatcaatcagccaacagtcagatttcatctagctgccagcttttttagtgaagttctttattctgcaaagatatttagttttctttttgattagctcttattttaattcccgccttagaggtctatattttgtttctttatcttagtggtaatgactgttagtgttaggtgcttccaaataaagcataattgattttgttaattgatatttacaattagccagttctgattcctttttttttttttttttgagagggagtcttcctctgttgcccaggctggaatgtagtgccatgatcttggctcactgcacttcctcctcctgggttcaagtgattctcctacctcagcctcccaagtagctgggtctaccagcgtgcgccaccatgcttggctaatttttgatatttttagtagatgaagggtttcgccatgttggccaggctggtcttgaactcctgacctcaagtaatttgcccgcctgggcctcccaaagtgctgagattacaggcgtgagccacctcgcccagccaccagtctgattcttaacaaaagttcataatgaattattatttcagaaatttaaatcaatttgttttagaaacttaaaaacaatggttaggttttttgtttttgtttttgtttttgttttgagaccgagtctcactctgttgccaggctggagtgcagtcacatgatctcggctcactgcaacctccgcctcctagattcaagsgattctcccacctcagcttcctgagttactgggattacaggcccccgccaccatgcccagctaatttttgtatttttagtagagacagggtttccccatgttggccaggatggtctcgatatcttgacctcccaaagtgctgggattaacaggcatgagtcaccacgcccagccaggtttttttaaaataggaatttaacatactttaagcaaatcaatacattaatgagggactatcagcatttacagcaccaggaaatctatcttttaaaaaggttcattattatacatgtgtgtagataatagtcacattgcatgccattttcagcaatttaattcctgaattaaatgaaaatcaacactttaatacatcctattttatttagtccatgcttcaatttttttatttttgtttatttttaaacttttaataatgcagacagcctttttaaaatcaatcttcagaagctgtaaaggcctctggtctccttaagcatttcatatccaaattgatgtacttttacagatatttttatgttctctgtaattgacaatattttaattaagactggaaagttatagtcacaagacaaccaataattccccccaaaagtctaagtcgttagttaggcaacataatgagaactatcacacattgggattcgtgtgctcctgacaattatcccttttctgccttaaagtcttatttggatgggagaattatccagagaggcaagggcgccaagtggccggcaccacctcaccacgcaatgtgctttttgcccagaaaaaaaagctgtgaccttttctaagcatccacaagcacgaattaagaaacaaagttcttggctaagatcgattgccccagtatccgatggagcccaaggagctggttacaaggtccagcgattacaacctaaagccgaaatgactcacgtaattgcagaatcgctcattctaacagcctgattggaaattgtcaacactgtgtctgggactaatgaagcaaaggaaatggaaaaggtgacattttcaaataatattattagtaaacgaattgacaacatgtcagatgacaaagatgacaccaatccaaagtcttattaagtcaaaagaagttttcattgcagattgatgaatctatatattaatacattactaattgggctcagttaatagcactaattcgaatcccaaaagaaaaaggctggggaggacactgtttgttcttttgagtagtcccaaaacaaattactgggaatgaaccattcaaactggacaattaatacttcragacacatagctcatggtggaggccctgctgtgttgcatacagatgtggctgtaatgatggaaggaataacagctctccaccaagagtttgttctagaaaaccctgagatgccagtaatgcatggcattattcacagcctctggtatagaaagtttgcgtgcagatctgacatccacgttaaattacatgatcaaatgactgactctaataaaatccaagctgtgacagaaccgtctgtttcaatgttatgtgaaaaaaaaaagtgtcatcagaatactgggctcggctgttccatgccaaagtggctgtccaaagaatgagacttgtcgagagcttaagagctaagagaagaaatgggggtggaaaagtgtaaatgattctcacttagcttctcactcggcttcaaaaaatgatgtacttaacttgacatttttgagcacctgaatgaacttaattggaaattgcaaggactgtcaggccgagctgtccttccaccattcgggctatgaaaagccgtttcaaatgtgcaagaacccaggaaatattgtactcacaagcccttcccaagaaagctaccagaaggctggtggagaacattaaatatgtataattgtaggtctcagactaacagaaaaacagagaccagagtagaagaataatagataactattatatgttctgacaaaatagaaataatgaacttaaaatgggaggaaaaaaagagagaaaggggaaacagaacaaactcatggattgtcacataaataataggtggcagacaaaggatgtcacttcatgctgacaaaccaaatactattagtttgcactgtgtgaaactgacaatatctgaccatcttttccctacaaaaatgctaatcctatattgctcaagctaattaaacattacaaaggatattagaataaagacagtcactcaatcaaaaacgcaaacatgtctaaattgcaaaagaaatgtaaaaacaaaaacacactacaatgtaggtaaaccatgaaaatactatgcttagtgaaataagtcaggcataaaatgacaaatgtctgatttcacttatataaagtacttagaacaggcaaattcatagagacagaaaatagaatagaggttactatgagctgtggggaaaggggagatggggagttattgcttaatgggtacagagtttctgtttgtggtaataaactattttggaaataatggtgatagttgcaaaacaacctaaatgtacttaacaccactgaattatacacttaaaaatggttaaaatgataaattttatattatgtgtgttttaccatatgtttgaaaactaatgtaataaaccaaaaaccactgacttgtacactttaaatgggtgaattgtatggtatgtgaagtaaatctcaaagctgctttttaaaaacataacaacacagaaataaaggaagttatgctttaaaaaaaataagagcaaggaaaacagacaacattaaatattgagaaagaaacaataaatattatatamaataacatagtagaatggagaccagcatatcagttatagcagtaacatgaataggtttaactcacttactaaaagaaaaagattttcaaattggcttacatagcaagccaacactctaaacacagagatttagactgaaaatgaggaaaatggccacaaacaagcagggatttgactctgcttatttatggccatcatttttcagacaaggtagaattcaggccagaaagcatcaagcgtgaaaaagatgttacattattaggccagtggaaattgaacagttaagaatacctgtgtggcaagaagcacagcaaccactttataaagcaaaagctacaggaaatataagaagaaatagacaaaaacatactactaataggagacttatacactgctcctagtcaaatgaacaacaacaaaaaagcaaggttatggagtaactgaacagtataatcaataaggaagatcttctggttatgtgtaaaattcatatcacaacaaacaaagatataccttgttctcagatatgcatagaacattcaccaaaataaacacacacacagatcacaatactcttcataaagtagaaattatacaaataatccttgttggttayagtacattaaaactagacattaaaaactaattcaaaaagcaaattttttgcctgaaaatttaaaatctctctcaaataactgtcagctgaaagttaaaatacaaatggaaattgcagagctttttttaaaaaaatataatggcaatgctacatatcggcattttggggatactgtaagatggttatcaaagaaaaattcataacctcaaatactcatatcagtaacaaagataagtgaactaactttccaattcaaaaaaattagaaagttaacaaagtaaaccaaaagaatgtgcaatagggaaataacagagataaaagtagcaggaaggtaaaatgatacagccaatttgggaaaacagtctggcagttcctcaaaaagttaaacaaaaaaaaaaaaaattaccatatgacccaacaattctgctcctaggaatataccccaaagaaatgaaagcatatgtccacacagaaacttgtacatgaattattcatgatgcccaaaagatagaaacaacccaaatgtccttcaatggatgatggataaacaaaatgtggtctatccatacaagggaacatcactcagccataaaaaggaacaaagtgctgatacctgctacaacttggatgtacctcaagaatgttaagtgaaagtagccagacacacaaggtcacatattgcctggtttcttttatgtgatatatgcagattagacaaatccacggaaacagaaagcagcttttctaggaaagtacaatttaccgaaattgatcccagtaaagataagaagttgaagccatctagttccagaaaagaaatagagaaaattgtaaatatatgtaaaaagaaatagaataaaacagaagccaacaaaattggttaactataagagtagacaccttaaatacaaatttgtaaatgctcacctccactcatagtaagggaaaggaaagaaaatgagacttctctgtaccttttttaactattttgacttttaaatcatgttaatatattatacatttataaaataaaattaaataagatttgggggaacacactgaaatcaacagaaacaagcggagataactgtatatcagtttgatatcatgaccgcatagaagaaaatgataataactacaaacactttttgaacacatcgatctgtttgtgtagaagaagaacttaaagaaatcctggactttattgaaaaatttgctgttggtagtggatttggggctgcagtccctaaactattttctgttcattgtaagattgagcaaaaagtaaatatatggatgttattgaaaagcagggttcttttggagagaagggggattcaaaaatgaaacgggaggaggggaagaacttcaagatgttggaatgacattagaagtactggtatgaaataatttttgagtatttactttttatctgtctccactaaactgtcctagaagctgtttaataggcctggggcaagggaagtaaaaaatatttgtgccagaaagtaaggaagcactcaaaactgctagagacatgwcaaaagttttcaagaacacttgaagaggctatcgtctggaaaatttgtaaaaatgttatcctcaakgtactataatgcattaaattttaaaaagaaattctgaagggcagtgggattctgactctagccatgacagaatgacttgtagagctaatcctcttactgacaacaactgcaaaagatagttaaaacggccgggcgcggtgsctcacgcctgtaatcccagcactttgggaggccaagttaggcggatcacgaggtcaggagatcgagaccatcctggctaacacggtgataccccgtctctactaaaaatataaaaaattagccgggagtgktggygggcgcctgtagtcccagctactcgggaggctgaggcaggagaacggcgtgaacccgggaggcggagcttgcagtgagccgagtagagatcgcgctgctgcactccagcctgggggacagagcgagactctgtctcaaaaaaaaaaaaaaaaaagatacgtaaaacatataagacaattatatgaaggcattagagaccagccaaggccaacagaacttgaagggttatgaacactgagagaaggtaagtacatgacatacatttcacaaatatcctcacattttccataagggcattttctacttcccaattcagaaaaacaaagtccaagaagaaagcagaagtctttgcaagtttaggagacagaagttggagtttagagctgcctaaccatctgggacttaggggataaaattctgaggtggtgggaaccatgaggaagtaagcataaaactctctgtacaattcaaaytagagttttataactagagtgttaaacgtaatcaccacagtaaccacaaataaaatagctaaataatataccaaaaaaatggaaatgagaaagaagtttaagtgtgtcgtcaagacgaaaaagaaacgaaggtaataagggacaaaagagctacgaggcttagagaaaacaaatagcaaataacaaaatgacggaaataagttcttccttcttggaaactactttaaatgtaaatggattaaactctccaatcaaaagtgattggcagagtggatttaaaaagcacgatccaactatatgctgtccacaaaaggctcactttccatccaaagacagaaataggctgaaagtgaagaatgtaaagatattccatgaaaataataaccaaaagagaccagtaatagctatactaatatcagacaaaatagattttaaatcaaaaaagcttataagagacagaaaaagacttatatattagtaaaccattccatacagaaagatgacataaacagttataaacattttcacaactggtatataaagcatcaaatatgtagagcaaaaactgacaaaactgaagaaagaaatagatctataacaatagttggacaattcaatatcccatttttaataatggatagaacaatcagacggaagataagtaaggaaatataggacttgaacaacacaataaaccaattaaatctaatagacatgtacagaacrctgtgcccaataacagtatacacattcttctcaagtgttcacgagatatgttccaggataaaatatatgttagactacaaattatgccttaattaattttaaaagataaatataatacaaagtgtcttctctgaccacaacagaatgaagttagtaatcagtcacaaaaggaaaactggaaatttcaaaaatttgtggaaattgaacaacacactcttaaacagccaatggatcaaaggaaaataacaagagaagttagaaaatacttagagatgaatgaaaacagaaacaaaacacaccaaaacgtatgtaacacagcaaaatcagtcctaacagagaaatttatacctataaatcttcctttaaaaattaagaaagatctcatatcaacaacctaaatttacaacttaaggaactagaaaaatgaaaacaaactaagcccaaagctagcagaatgaggaaaataataaagatttaaaaatttttaaagaaaaataataaagaaaatcaacaaaaccaaaagttagctcctcaaaaagatcaacaaaattgacaattctttagctagatagacaaaaaaaaaaggagggagagcaagagcactcaaattattgaagtcagaaataatttctaaattactgggagtattactacaaattctacagaaataaataggattgtaagagagcactatgaataattgtacatcaacaagttagataacctagatgatatagacaaatgtctagaaacccaaaacctgacaagactaaaatgtgagaaaatggaaaatctgaataaacgtataactggaaaggagatttaagcagtaatttaaaatcttctgacaaagaaaaactctggacatgatggcttcctaagtgaattctaaaaaacatttaaagatgaacaaataccaattcttctcaaacattactaaaaaattgaagagaacactcccaaacttattctatgaggccatcatatgctgatatcaaagccagacaaagataccacaagaaaactacagaccaagattccttagaaaattatgcaaatttcctcaacaaaatactagcaaactgaattcagcaacatattaaaagaattatacagcataaccaagttgtatttattcctgaaatgcaaagacatttcaacatataaaaatcaatcaatataatacaccacactaactaaaagggggaaaaaaagacacggtcatcctaactgatatagaaaaagccttgtataaaactgaacacattttcatgttaaaaacactcaacaagtcagaaattgaaggaaattgccttaatgtaataaaatccatatatgaaaaacccacagtaaacatcaaattcagtagtgaaggactgaaagcttttcctctaagatcaggagtaaggtaaggatgctactgttaccacttctattcaacatagtactggaagtcctaactagaacaactgggcaagaaaaaaaggaatccaaattggaaataaagaggcaaaattatccctgttcacagatgaattgtatgtagaaaactctaaagattccaccaagaaaaatatctattatagcactaataacaaattcagcaaagtaacaggatacagggtcaacaagcaaaaattagggcatttctgtacactgtcattgaacaatccaaaaaggaaattaagaaaataatttcattaatggcatcaaaaagagtaaaattcttaagaattaacttaaccaaaggataaaagatatgtacaatgaaaactataaaatattgctgaaaggaattaaagaagacataaataagtggaaaaacatcccatgttcatggattggaaggcttaatgttgtcaggatgtcagtactactcaaaataatctacagattcaaggcaatcctgatcaaaatcccattaatgtttttgcagaaatagaaaaagtcatcctacaatttatgtggaagttcaagggatccctaatagccaaagcaatcctgaaaggaaaaaaaagaacaacaaagatggaggaataacacttcttgatttcaaaatttgatacaaagctatagtaatcagaacagagtggtactgacataaagacagacatgtagaccaatggaatagaacaaagagtccaaaagctttgcatatatggtcaaattattttctacaaggatgccaagaccactcaatggggtaaaggcagtcttttcaacaagtgatgctaggagaactagatacacacatgcaaaagaatgaagttgaacccttacctgaaaccacatacaaaaattaactcaaaatggattaaagccctaaacataagacctaaaattatgaaactcctagaaaaaacatagggcaaaatcttcataacattggatttggcagtaattttttggatgtcataccaaaagtacaggcaacaaaagaaaaaaatagaaaaaattgactttatgaaaattgaaaaattttatgcatcaaaagacataatcaacagagtaaaaagaaaatctacattacagagaaaatacacaaaactctttaaactcaacaccaaaaaacaaacaacctgattcaaaattgagcaaggatttgaatagacatttctctaagaagtccacaaatggccaataagcacagggaaagatgttcagcatcactaatcattagagaaatgcaagtcaaagacctcacacccattaggatggctatttaaaaaaaaaaaaaaaaaaaaaaaaacagaaaataaaagtgttgacaaggatatagagtgattagagcctttgtacactgttggtgggaatgcaaaattatatagccactgtggaaaataatatagctgtccctcaaaacattaataatagaattaccatttgatccagcaattccacttctgggtatatacccaaaataattggaagtaggttctcacagagatatttttacagccatacaaatagtaccattattcacaatagctaaaacatggtagcaactcaagtgttcattgattaatgaatgaatgaatgaatgaatgaatgagcaaaatgcattttatatattactggaatattgtttgactttttaaagaaaataaattctgacatacgccacagcatggatgaagcttgagtgcattgtactaagtgaaataaaccaatcacacaaagccagtcacagaccataccttaggagtaaggggaaactgaaataggccaaacctaacagagcttaaaactaatgctcagcaagatcaaggtggcctgttactctgcatgccagaagaaaaagttagctctctcaggaggaaaataacgttgtccatagtctcttcatatttacacttataagggctgacatccaaacaaaaattatgaagcatgctgaaaagtggggcagggttctgggagggwaacaaaatggctaaaaaccaagagatgaaaacaaacaatagaaacagacccacaggtgatttagatagttgatctatcagtgaagaaattttaaaataactatgattactatgttcaagaaaacagataaattcactaaggacttggagtttataatcttacaatattctaatgggaattctaaaaatgaaaaatattagaagaaaaaattaatagatggtagtaggagcaaaaggaaagagaaaatccagattgaatcacagaaataaaaaatctaatgagattggagactattattctaagtgaagtaactaaggaatggaaaaccaaatatcataggttctcactgatatgtgggagctgagctatgaggatgcaaaggcataggaatgatacaatggactttgggtacgtgggggtaagagtgggagggggacaagggataaaagactacaaatgtgatacaatatatactgctcaggtgatgggtgcaccaaaatctcacaaatcaccacgaaagaacttagtcatgtaaccaaataaaaactgtacctcaataacttatggaagaataaaaaataaaaaaactaatggagagagtgtctcatacacacagaacagactgcagcctcaagatattcataaccagagatgattgaaactaactagaccaacaacccgcaactgacccagttcctaatcagttcttaatcctatcttctttgtggccttgtcaaaaattagttgattgtacatgcttaggtttatttctgggctctctattctattccattggtctgtatgtgttttttataccagtattatactgttttgatactattgctttgtaatataatttaaaatcaggaagtatgatgcctctggctctgtttttctttatatatatacacacacacacacayacacasatatatgaaaagaatatgtatacacacagttttttagttttaattgacaaataatgatggtgtatattaatggagtacaatgtgatattttgtgacacgtatacattgtgaaatgataaaaatcaggctaactaacatatctgacatctaactttttttttttttttgagacaggctctcactctttcacccaggctggagtgcagtggtgcaatcatggcttaccgcagcctcaacctcccaagctcaagcaatactcctgccttagcctccagagtagctgggattataatgccaccatgtctggctatttaaaaaaaaaattgtagtgtctcactgtgttacccaggctggtctcaaattcctgggcttaagcaatcctcctgtctcggcctccagagtagctgggactacaggcacatgtcaccatgggtggctatatttttttaatttttttgtagagatggggtctcactgtgttacccaagctggtctcaaacttctggactcaagcaatccttccacctcagcctcgcaaagttctgggattacacgtgtgagatgccacacccagccattatctttcattctgttaacgtggtatatcacattgattgttttgcacatgttaaaacaattttgcatcccatgaaagatcccacttggtcatggtatatactctttttgatgtgttgtcgaatttggttggctagtatttcattgaggaattttgcatctatgttcatcagagatattggaatgagaaagacaatcactaacactgaaatgatatcgatgttgggattctccaacaaggatttaaagtggttcatcataatgtgcaattataaacatgcttgaaacagatgaaaacatataaagtctcaacaaagaaatagaaaatataaagaagaaccaaatggaaattcaaggattagaaagtataataagccaaaatgtaagaactcactgaatgggatcaacagcataatagagaggacagagggaaaaaaatcagtgaacttgaagatagaatagaaatcagtaaatcttaacagagagaaaatggaatgaaaaatatgaatagaacttcaaggacctatgcaatgataacagaaggtctaatggtctaagcgttagagttccagaagaaaaaaagaaagaggatggggctaaaaactattggaagaaataatgatggaaactttctcaaatttggcaagaaacataaatctacaaattaaaggagatcaaactccatacaggataaatgcagaaaaatccacaccaaaatgcatcataatcaaacttcagaaaactaacaacaaagaaaaaaatcttcacacactgagaaatgacacataacctacaggggaaaaccattcgaatgacagtggatttttcatcagaaaccatggaggctataaggaagttatgtgatatttttcaagagaaaataactgtcaacctttaattctacatggagcaaaactgtcctttaggaatgaaagagaaacaaaacattgtaacatgaaagaaaactaagagaatttgatgccagaagatcaaccctaatgggctggccaaaggaagttcttgaaacagaaagtgataaaagaagtaaccttggaacatcgsggggagaaaagggaagaatataaggagcaaaaaatgggtaaayacaaaagagtttccttctcttttgagttttctaatttatatttgatagtcaaaccaaaaagtataacagtgcctgatgcagacatcaatgaatagagagaaaatgttaaggcaattctattataaacaggggaggtaaagaatgcaaagggaagaaggttttacatttcactcaagctagtaaaatgttggctccgacagatctttgtggtatgaaataggtctgtaacttgattgcagtagtrgttacatgaatctacatatgccataaaatggtatagagctatacacacacatgacaccaaatgtcagtatcttggttttgattttgcactataattatataaagtgtaactattgaagaaattggataaagagtrcatggatctctctgtgctatctttgcaacttacagtaaatctataattatttcaaaataaaaaggttttttttaaaatatgaggtaaaataaagacatttttagaaaaaacaaaatctaaatcatcaccaacaaaccagcaatacaagaaatacttaagcaaattaatagccccagatgggaacacagaatcatgaaaaagaatgaagagtatgggaaagagttaataagtgggtaaatatgtatttacattatttataaataatgtatgtcaactatttgagacaaaaatattaaggtgytatgtgatcataaaaatgaagcaaaaatatatgaaaattaacataaagagcagaaggggagccaggcaccgtgcactcacctgtattcccagctacttgggaggctgaggcaggaggatagcataagcccaggagttccaggctatagtgtgctatgatcatgtctgtgaatagcctctgcactccagcctggacaatgtagtgagactccatctctttaaaaaaaagtgaaaggggataaataaagttaaatttttgtaagattctcgcactctttgggaagtgataaaagcactaacttaaggtaaactataataagtcaagaatgcacattgaaatcttttgtctttggaatccactaaaaatgatataaaaatgtctgcctaaagatctgatagatctaatgtactgattacttctatctgattacttctaaataagacaggaaaagtcaaataaggaacaaataacagctggaacacacagaagacatagtagtagaatggtagacttaaacccaactacatcagttaatttttattaaatgtaatgaaataaacattgtctggataaaaatcaacacccaactgcatgctgtttaccatgtccgcactttatatataaggactgaatgacacagaaaggttgaaagtgaaaggatgggagaagaaaaaccatgctgttgctaaccaaaaggaaactggaatgactacaatatcacagcacaaagttaacattaaggccagaagtattactagaaacaaaggtattccatgattattaaagaatcgattcaacaggaaaacattaaaaattctaaaataggtcaaagaagaaatagcaggggaaattataaaatactttgaaatgaaaatgaagatacaacataccaaactcatggggtgcttagaggaaaatgtatagctctaaatctatttataaaaagaaaaaagaagtcaaataacctgccaccttaagacactgaaaaaagaaacacaaactaagcctagagcaagcagaagaaagacaataaagattaaagaagaaactaatgaaatggagatagaaaatcaatagaaaaaatatcaacaaaaccaaaagttagttctttgaaaagattaataaaattggcaaattcttactcgactagccaaagaagggataaatttcaaattactaaaatcagaaatgaaagagagtgcatgactgttagccttagtagaagtaaaagaactrtaaaggaatactacaaaaaactatatgccaataaattagacacattggataaaattgaaatttttctaaaaagatgcagactaacaaaatagactacagaagaaatagaaaatctgactagacctataacaagttaggagatttaattagtcatgaaaaaatgtcaccaacaaggaaaagccaagacttaggtgacttcactggtgaattccaccaaacatttaaagaattagtgccaattcttcacaaactctttagaaaaatagaagaggagagaaaactacctaattcattctatgaaattaatattcccctgataaccagaaaaatacatcacaagataaacaactacagacccctatatcttgtgactacagatgcaaaatccctccacaaaatactaacaaacaaaattcatcacctaaaaaaaggatcccaccataaccaagtgggatttaccacaggaatgcaaggttgatttaattaattaattaagaaattaattgatataaaacaccatatcaatagaatttttaataacacaaaaactacagtattatctcaatagatgcaggaagactgtytgacaaaaatccagcaccctttcatgattaaaaaaacacacacacacacacttaacaaactaggaatagaagagaacgtttcatagatactctttgaggggtcctcaatctgacaagcatctatgaaagcatctatgaaaaacccaactcatactattggctaatatcacactgaatggtgaaaggctggatgcttttccctaagatcagaaatgagacaagaatattcactcttgtcacttctgtttaacatagcacaggacattgtagccagggaaactaggtaagaaaaataaataaaaggcatccagattagaaaggaagaagtaaaacaatctctatttgcagatgacatgatctcatatgtagaaaatctaaggaattcattgaaaatttgtcagaactaataaatatctccagcatctttaagattaacagggtytaatttgtgaattatgtctttcatcaattttgaaaaaattattgagcagtatcacttcaaacatcacttcttccccacccctctctaggacttcaactaaatgtcatacctttcattctttctcacgtgcttctaatgttccttctatattttcctctttttttccctctatatgtttcaattttaatacattctattggtctgttatctatttcattaattctgtcattggctttgtctaattctttgttaaatccttctagagagttcttatatttcaggtactgtattttttatttatagaatgcttgtttgattctttttatggatttcaattctctcttgaaattcaccaacttttcacgggttttctccatcttctttctgttttcttgagcatattaatcatggttaccttaaaactgctatctgctacctccagtatctagatcaattttgattcattttttgttgggtttttgtcttggatctcagttatttataatagctctctattataaataatgtcctcatcattatacctatacatgcctatcatgtttgggcatttggggtggtcctagttggcttgcttccacaggggtgacttctccctttctgcttgatttgcaccaaagatgagtcttagttgctgtctrrtgcacaagcagttttttctggcaccactcttctcttctaagactgattgtgggaggagactagtggcatgaaccagatacagtcaggggtcagatgaatgactgaccaggagggtcttcatctagagaccattctcaggatttggaagattgctccccctttcttatacgtgcatctagtccgcatcagtttccaagtgtttctttcataagacaatgccaggtggcattgtctcctggaaatccctgggttggaaatccccaggtcaggctgcatcatgttgctaagtgacatgtattagccctgtgagatgcttaagtgggccttatggctaccattaatctgatagccatgatatgcctcttacagtatactataatctttgtttaatatgatcttatttttctagtttaaggtggaagaagaggttattgatttgagaattatcactggtaatttatgtttattgctacaattccccayccccactgtggtgcttttacagcatcccacaaatctaatatgttgtgtttttatttgcattaagtttccaatattttctaatgtctgttttgataccttctttgatctatgaattatttacaagtatgttgtttagtttccaattataagggggttttccaaggattcttctgctactgatttctagtttaattccactgtggtgaaacagcacacagacatttcgcatttcattgcactttgcttcattgagattcacagatcttgtgttgtttacaaattgaaggtttgtggcaaccctgcatcaagcaactctatcagcacaatttttccaactgcatgtgcttgcttcaagtctctgtgtcacatttcagtaatcctcacaatatttcagaatttttcattattattatatctattttgttgacctgtaatcagcgatcttttatgttaccattttaattattttgggggcaccacaaactgcatccgtgtaaaacagcgaacttaatcgataactgttgcgtgttctgactgctccaccgaccagccatactcccatctctccccctctccttgtgtcgctctattccctgagacacaamagtattgaaattcagtcaattaataaccctacaatggcctttaagtgttcaagggacagaaagaatcacacatctctcattttaaatcaaaagctagaaataattaagcttagtgaggaagatatgtcaaaaaccgagataggctgaaacttaggctcttgcatcagaaacagccaagttgtggaggcaaaggaaaagctcatgaaagaaactgaaagtgctactccagtgaacacacaaaggataagacagtgaaacaggcttattgctgatatgaagaaagttttagtgttgtgagtaaataaaaccagccacaacattcccttaagacaaagcctaatccagagcaaagccctacctctcttcaattttatgaaggctgagagaggtgaggaagcagcagaagacaagttggaaaccagcagaggttggttcatgaggtataaggaaagaagccatctccataacataaaagtgcaaagtgaggcagcaagtgctgatgtagaagctgcagcaagttattcagaagacctagctaagatcattaatgaaggcagctagattaaacaacagattttcaatstaaatgaaacggccttatatyggcagaagatgccatctagaactttcatagctacagaagagaagtcaatgctggcttgaaacatcaaaggacacgctgacactcttggcaggggctaatgcagctggtgactttgagttgaatccggtgttcatttaccattctgcaaatcctagggaattatgctaaatctactctgcatgtgttctctagatggaacaacaaaacctggatgacagcacgtttacagcatggcttactgaatactttaaagccactcttgagacccatgctcaaatttctctcaaaatattactgttcatgacagtgcctgtagtcaaccaacagctctgatggaggtgtacaaggagattaatgtttttatgcctgctaggacaacgtccattctgcagcccatgagtcaaagcgtaattctgactttcaagtcttgttatttaagaaacacgtttcataacactatagctgccgtaggtatgcttcccctgatggagctaggcaaagtaaattgaaaactttctggaaagaattcacaattctagatgccattaagaacatttgtgattcatgggaagaggtcaaaatagcagcattaacaggagtctgggcgggcacagtggctcgtgcttgtaatcccagcattttgggaggctgaggagggcggatggcttgagtccaggagtttgagaccagcctggacaacatggtaaaaccccatctctactaaaaatgcaaaaattagctggctatggtgccgtgcacctgtagtcccagctactttgggggctgagatgggaggattacctgagcccagaagtcgaggctgcagtgagccaagatcacaccactgacctccagcctgggtgacaaagtgagaccttgtctcaaaataaaacaagagtttggaagacgttggtcccgaccctcatggataactttgaggggttcgagacatcagtagaggaaggaactgcagatatgatagaaatagcaagagaaccagaattataagtggagcctaaagatgtgactggattgctacgatctcatgagaaaacttgaacagatgaggagttggttcttatggctgagcaaataaagtggtttcttgaaatggaataactcctggtgaagatgctgtgaacactgttgaaatgacaacagaggatttagaatattccataaacccagttgataaaacagtggcaggctttgagaggactgactccaattttgaaagttctactgtgggtaaaatgctgccaaatagcatcacaagctacagagaaatctttcatgaaaggaaaagtccatcaatgtgacaaacttcattcttgtttcatattaagaaattgggccaggcacaatggctcatgcctgtaatcctaacactttgggaggccaagtggggaatatcacttgaggccaggagttccagaccagcctggacaataaaaagagaccttgactctacaaaaaaattaaagaaatcagccagacacagtggcacatgcctgtagtcccagttactcaggaggctaaggtgggaggatcccttgaacccaggagtttgaggttgcagtgaactatgattgtgccactgcatgctagcctgggtaaagagtgagaccctatctcaaaaaaaaagaaagaaagaaattgccacaaccactgccagtaaccaccaccctgatcagtcaacagccatcaacatcaaggtaagatcctccaccagcaaaaagactatgacttgctgaaggctcagatgatagttagcatttttagcaatgaagtattttgaattaagatatgtacattgctttttagatatcatgctattgcacacttgaaagctacagaatagggtaaacatacttttatttgttcagggaaaccaaaaaaatcatgtgactcactttattgcaatatccattttattgtggtgatctggaaccaaacccacaatacctcagaggtatgcctgtattgatatgacttgaatcattttaaatatgttgagatttgttttatagctcacaatatagtcaaatatggtaaacattctgtatttttaaaaaagtgtgtcctcctgttgttgagtagagtgtcctataaatgtcaattagttcaagttatcaatagcattgttcaagttttcatattcatactgactttctatctaattgctctcaaaaattattgaaaaagaggtattgaaatctctgattttcactgtgtctatttctccttctggttctatcagattttcttcatgcattttagagctcttttgttaggtgcattaacatttagaattgtttttgttctcttggtgaattgaaatctttatcattatgaaattggcttcctagccatttgtggtggcccacacctgtaatcctagcactttgggaggctggggtgggtggaacactttgagctcaggagttcaaggtcagcctggacaacatggagaaaccctgtctctacaaaaaatacaaaaatgagccaggcatggtggcttatgcctgtggtcccagctactcaggaggctaaggttggaggatcacttggctcgggaagcggaggttgcagtgagccgagatggcaacactgcactccagcctgggtgacagagcgagaccctgtctcaaaaaaaaaaaaaaaaaaagaaagaaaagaaaagaggagagagagagagagagaaagaaattagtgtccttatccttggtaaaaatcttctgccttaaatctttttttatattaatccagttattccaggcttattttgaatagtgttagcatggcatactgcttttcattctcttacttttcatctatttctgtatttaaagtgcattttgagccaggtgtggtagtgcacgcctgtagtcccagtactcaggagactgaagtgggaggattgtttgagtccaggagttcaaggccagcctgggcaacatagtgagaacctgtctttaattaattaaaattttgaaataattgactaaaaataaaataaagtgcattttgtatagacaggagatgcttggctcacttttttatccagcctgtaacttttaattggaagtttagataatttatatctaatgtatttataattttgattagacttaagcttatcctgctatttgttttccattagttctatctgttctctgttatctttatcctcttttcagccttcttttggattacttgaatattttttattatgtcgtttttatctgcttttttggcttggtaggtctcattgttctattatttttgtgattgctttaagaattacagtatacatctttaatgtatcacaatctacctttaatgatagatattataccatttcacgtctaatataggaaacttgcactagtacgcttctattttctccttatgacctttgtgctattgttgtcatacatttttcttctataaatgtataaaaccaacaatatgttgtcattctttttatatttaagatgtgtaaacaatttttaaaatcttacatatttaccatgtagttaccatttaagatactcttcattcttttgtgtatatccatatttctacatggtacaattttccttctacttgacattttctttaacatttcctgtagtgcaggtctgttggtcatgaactccttcagcttttgtatttctaaaaaccttttaatttttaccctcatttttaaagatattttcactaagatagaattctaggttgcaggttttttattttagtactttaaagatgttgctccactgtctctttgctttttcctcactgtttccaataagaaatgtgctattatttttatcttttttcctatgtacataatttcccacccctgacctctggctgctttttttttttcttgtttttggggggatggggctttgccatgttgctgaggctggtcttgaactcctgggctccagcaatcctcccacctcaacctcccaagtagctgggattacagatgtgcactaccaaggctggctctcctctggctgcttttaagatttttctcttatcatcgattttgagtaatttgattatgatgtgctttggaatagttttccttaggtttcttgtgcttggacttcgttaagtttcttaggtgagtttacagtttttatcaaacttagaaaaacatttagctgttattgcttcaaatattttttctgttccctctctctcttctctttggaactccaattatccgtattactcatatattagaccactttgaatttgtcctacagctcactgatgctcttttatttgggtttattgtaagtgaaatgttgtattggtgcacagtgttccataaaatgaaaggttgctatctttgttcctcttagaaagagaaaataccctatcagattctctgtcagagcttgcctccagcttctgctaaaagtgcttctcagtattaactatttttccaatttcttccttgtggtaaaatacatataacacaaaatttaccatctcaacaattttcaagtatacagttcagtggtattaaatacgttttcaatgttgtgcarccatccatctccagaactcttttcattgtgtacaactaaaactctataaccattaaacagtaactccccatttccaccttcctctagcccctggcaamcactatcctattttctgtctctgtgattttgactactctaagtacctcatacaggtggaatcatacagtattttttttgtatgataggctttgtgtgatgggcttattttgctgaacataatgttctcaaagttcatccattttgtagcatatatcagaattcccttcctttttaaagccaaataataatccattatatgtatacagttgttcatccatatccatgggttctgcatgcatggattcaaccaaccacagataaaaatatttgaaaacaattgcgtatgtacttaacatgcacagactttttccttgtcattattccctaaacaatacagtatacctatttatataatgtttacattatattaggtattataagtaatctagagatgatttaaagtacatgggaggaagtgtataagttrtatgcaaataatacactattttacattggggacttgaacatctgtgggtttttttatccacaggaggtcctggaaccaatcccccatgtataccaacggacaaccttatacattttatttcttcattcatctatcagtggacacttgggttgcttccacatttcagctattgtgaataatgctgctattaacatggttgtataaacatttctttgtgaatctactttcagttattttagatacatacccagaagtggaattgctgaatcaaatggtaattctatttttaatgttttgacagattgccatactgtttcccacagtggctgtaccattttacattcccaccaagatggtacaagggctctaatttctccacattcttgccaacacttctcattttgtgttttttaaaatagccatgtaatgggtgtgagatggtgtttcatcataattttgatttgcatttccccaatgattagttacgttgagcatcttttcatgtgcttattggccatctgtatatcttctttaaagtaatatctatttgagtcctttgcccattttttgaagcaggttgtttggttttgtttgtcttgagtttgaggagttctgtatatgttctgaacattaatatcttatcaaatatatgatttgcaaaatagctgttgattgcctcttgatgcacacaatttttcaattattataaagtctaataagtctatgttttcttttgttgcctgtgctttttgtgtcatatccaagaaatcactgctaaattcaatgtcatgaagattttgccctgtctcttttaagagtcttataattgtaggccttacaagtaggtaatccatttcgagttaatttttgtatatagttttaggtaaggatctgacataatttggatatttgttccctctaaatctaatactaaaatgtgatcctcgatgttggaggtgagacctagcgcgagatgcttgagtcacgagggcagatccctcatgaatgtctttgtgccctcctcatggtaatgagtgagctcttgctctattagtcaccatgagatctgattgttaaaaagagcctggcactttctcctctctctcttgctctctctcttgtcatttgacacactagctcctgtttcccttctgccatgagtaaaaacttccgtaggtctcaccagaagcagaagctggtgccatgcttctgtatgaactgcagagccataagtcaaacctcttttttttataaattacccagcctcagatattcctttatagcaatgcaaaacagactaatacagagtccaactttattctactgtatgtgactatccagttttcccagcaccatttgttgaaaagacagccttttctctactgagtggtctgacacccttgctgaatctaatttgaccatatatgcaagrgtctcttcctaggctctgtattctatttcattggtctttatgtttttctttatgccagactaaagtgttttgattactgtagctttgtaataagttttgaaaacaagaagtgaaatcaggagtgctccagctttgttttcagtattgctttttgttttcagtattgttttagctgttggggtcccttgagattccatacaaattttaggatgsgttttttctacttctgcaaaaacataattgggattttaatcaagattgcatttaatctgtagattattttgagtagtattgacatcttaacaatattaattcttccagtcgtgaacacgggatgtgcttttatttatttatgtctttaatttctttcagcaatattttgtagttttcattgtacaagtctttcacttctttggttaagttaattcttaagtattttatttttttcaatgctattacaaatggaattattttcttaattttctttttggattattcaatgttagtgtatagaaatgcaactgatttttgcttattgactttgtatcctgttctttgctgggtttattagttctaaaaggttttttggtggaatctttatgattttctacctataagaccatatcatattgaagcagatcattttacttcttttctratttaaattgtcttacttgtttttcttgcttaatttctctggctaggacttccagtaactacattgaacagaaatgacaaaatgagcatcttaaccttattccagatcttagataaaaagcttttagtctttcactattgagtatgacattcactgtgagttttttrtatatggattttattatgttgaggtaatttccttctattcctagttttttatgtttttgtcatgaaagcatgttgaattttgtccggtgctttttctggaccaattgagatgaccaggttgggtttttcccttcattctgttaatgttgtgtattatattgatcaattttcatatgttaaagcatccttgcattctaggaataaatcccacttggtcatgatgtataatctttttaatatgctgctgaattcattgtcagttctggcttggatttaattaatttctctcctcattataggttgtatttttctgctcttttgcatgcctgttaatttttgcttagatgacaaacattgcaaattttatctgattaagtgctggatattttctcagtcctataaagagccttcaactttgttttaggatgctgttgaggtcctcagaaatattgtgatccttttgggtcttccttttaagacttgttagatagactagagcattgcacagtctgggtctaattacttcccactcctgaggcaaaatctttctgtgtgctctatcaatgcccaatgaatacttaaggctgtccagtatagctatttggaaatggcactattcccagcccagtgtgagcactaagtactattatctctaatcctttgggtggttctttccccagcctctgatagtcctctcacatgcatgcactgatcaacacccagctaaatactcaagggataccctgctcagatctctggagttctgtctctatgcagctctctcctcttaggtcctctgtcctgctaacactaggaagcacctcgccttcctcagactctcagctccatctcctcaactcagagagtccaccaasctccacctaagaaactcccaaggcagcaagctggggtaataatagggtttgccccatttatttctcatgtctcaaacatgactatcctttggtgcctgattctctcatcatttcatatattttgtccattctttggatgattcaggtggtaggatatatctgattcctgtttttcgatgtttattagtagtccctggctattcttatttaacgtgattattgatatatttggtttaaaatatattagtaattactgacatatttgggtttaataattctttacartctttcacttgayctatatgcctttttctctttgactatctacttttgaatgaattatttttttattccatttttgtttgtctgttttgagatgggatttcactctgttacccaagcaggaatgcagtggcataaagatgtctcactgtatctaactcctgggctcaagcgaccctcctatctcagcctcccaagtagctagaactacaggcttaggccactacacccagctaatttttaaaaaattttttgtagagacaggatctcactatgttgcccaagctggtctggaactccttgcctcaagcagtcctcctgtcttggcctcgcaaggtgctggagttataggtgtaagccaatgcgactggcatttatttttccatttttttattctatgagcttgaaagttatgcaatcttgtattattcttttaatagttgccttagaggttgattataacatgcttctggacttattatgtctaataataaatgataattttatgagaatgcaaaaatcttacaatattttaactccatctattctctcacaaattataggccaagttgccacacattttcattctattcatatttttaacccaacaagatgtcattgtcctatgctatgaatattgatttattttcttttatttacttatttatctatttattgagacagagtctcactcttgttgcccagactggagtgcaatggtgcaaacttggctcactgcatcctccaccacatgggttcaagcgattctcctgcctcagcctcccaagtagctgggattacagacatttgccaccacgcctggctaattttgtatttttagtagagacagggtttcaccatgttggtcaggctggtctcaaattcctstcctcaggtgatccacctgcctcagcctcccaaattgctgggattacaggagtgagccactgtgcccggctgaatattcatttagatttccctatctattgacacttttagttgcacttcatgccttcctgcatctctgacctctygcctgggttcatcctttgacctgaagataccttttaatattttcttttttgtaaaacccaattgtattggttctggaagtattctctttagtgtagttcttctcatgccaaacatctatatgaagatatctttatctttagtcttgaagaatattttcttttcatagaaaatcccagtttagcagctatttttcttgcagcactctaaaaacattgttctaatgctgttgacttcctttatttctgttgaaaatcagctataagcataaggaaaaggggtgggcgtccaggacccaccaaaggtaggctctgggacctctcttgcttggggtggggactagtggtcttggtgtaagggcaacccagaagcattctagccttcttgagttggagaagtaaagtgcacctttgaatcatcacacttcctaaaactggattaaggcaaccatagagttctggtgccccctggtgcctggcagagccaacttatctcacacctggagggagatctcctacatcttgatgtatttctacaataagccaatgaatgccctatcacacaataagcacataaggagacaagacagactctgtaggcaaacaaaacagaatggtccacagtcacccagataacggaattatgatacacagatctcaaaataaatatgcattctttgtttatggaggaaaaagacaagattgagaattttggcagagatctgaaaactgttaaaaagaaaaaaagaagaagaagaagaagaaagaaaaaagaaagttacatccagtgcctcttaagacctgggcagactctttggtcgccttgttctggagcccttggctgtgtgttgaccacctcagggttccatagcaaaattccacaggctgggtggcttacataacagattttgcacagttctggaggctgagaagcccaaagtcaaagtgtcggcagatttagttcctggtgggggtcttcttgggggtttgcagatggccagcttcttgctgtgtctgcacatggtggagagccagggctctggtcttattaggggtctaatcctatcatggcggctccaccctcatgacctcatctgagcctaatttcctcccactgagggttagggctccaacacgtgaatgtcggaggaacrcaaacattcggtccatagcagccatctgttttgcttccaccaccccgctggtcaccagttctgtgtgggcaccgcctgactccacagggagtgggcagcgcatttcaccctaagcctgcggtggatgccgcttgtctcctacctcgggccttccctgttgccaacaaggcgagaaacaccccaggattcgctcagtacccacgcctgtgcgatccggtaacctgaggtattcatgctccacggggtgaacccctgataaatgggatttggcactgactggtaaataaattattccccattcctcctcccaaacagaatgtgctgagagtctgtcattttacagcctcttttttttttttgttttgacagggtctccctctgtcgcccaggctggagtgcaatggcgccatctcaggtcaatgcaagccaactctcgtgtttgagtgattctcctgcctcagcctcctgagtagctgggatcacaggcacccgccaccacttccggctaacttttgtatttttttcagtagaggtggggtttcaccttattggtcaggctggtctccaattcctgacctcaggtgatccgcccgcctcggcctcccaaagtgctgggattacaggcctaagccaccacaccaggccgttttacagcctcttagaaagtacgtctctgagaagtggtcatcagtcacacttgtctgcagccctgtctctgccgtatctgtgtctctccccttcttcctcactgcgccccctggatttcactctctaatcaaacaggagcgctgcccttgcttcgcactctgccttccaggggaatctgttacctagggaggccatgaggatgcaccacagctggagggcttcacacagcaggaattcattgtcccaaagttctggaagccgaagtgcaaaatcaagaagtcagccaggctgtgctccctctgcagcgtctagggagaattcttcctgcctcttccagcttccggtggatcccaacattcttcagcttctggcggaccccaacattcctcagcttctggccgcatccctcccatctctgcctcaatcttcacgcggcgttatcacctgcatgtttccctgtcgtcttccctgtatgtctgtctatctatgtccaaatttcccctttttataaggaaggaccccagtcatatggaattatggtccaccctaataacttcatgttgacggactacctctgtaaagacccaatttccaaataaggtcacattctgaggcactgggggttggggttttgacatatctttttgtagaggacacaattcaatgaaatccaatcactagggaacgctggctaagacaaaaatagagtaaaaatcccataactaaataataataaaataactgaaattacaaacttaattgattagcttaatagtgagttagactgggctaaagatgggccgggagacagaatccagaataaagcatggaataaaatagggaatttgggggcatactgaggacaaaaacaaaaagaataggggaaaaccaaaaaagctgctaaaagaaagagaagataaagaaggactgaggcatatgtcgacctttttcatatatgtaaagaaaatacatgggtgagggggcaaaacggtaattgaacaatacatgttaatggaatcaaattataatggaagagataacaccctagaatttacccaaagtgttgaaagagatcaagcacagatttaagaaactttaaaaacccgagcagaaaaagtacaagaaatgcatacctggatatagcatggtagaactgcagaaaactaaagaaaaagagaaaatatcaaaagcagactataaaagatatattactttccaaaaaagcatcattcagcctctcagtacctcccacactgaattggcagtttcttctgagaggagaagcaacccaaaatggtttgtcacgtctgccaaatttggggccagtatttcttcactattttattatgtcctaataccttcaagtagatttcttatttagcttttctggctgtcttcaaaagaagagctaaattacctacatttcatgtttaccagaagctaaggtgcaaattaattttaatgcttaaaatatctaaatgatggcatcccctataaaagtgttctaggccgaaatgattttacaaattagttttagattacattccaataaggataatttttatgttagtcaaagtattccaagccatagaaaaaaattagaaatttcctcaattcaatttatgatgctaacacaccttaatatcaaaactttcttaagttatttcaaaaaataaatgaacagttttcatttcttatgatagatggaaaaaacaaatatatattaaaatcatacactatggtcaagtagtttttattctaggaaaagaaagatatgtcaatataagacacagccacacagagactacacagctgcgttctcactggtgacagaaccactgcacaccaccagcaagcacccttctacctccctgtaggggaaggtctttccatagtgaaatcagtctgtgaagtctgcaagaggtgactccatcaaatatgcagacatcaatgaaaggcaacaagaaacatgtaaaaccaaggagatatatcaccaacaaaagaacacaataatctcccaaaactgaccacaaataaatgaaaaaaagccactgcactccagcctgggcgcagagcaagactccatctaaaaaaaaaaaaraaagaaagaaatgaaaaaaaactgacaaataattcaaaattcaaaataatttaaggaagctcagcaaacttcaaaaaatacagagaagtaattcagtgaaatcagaagaacaataagcaaccaaaatgagaaatgtaacagaaagattgaaattttttttwaaaaaaagcaaacagaaattctggcacagaagaatacaatgaatgaaattttaaaatgtaatagaaagcatcagtgacagaatgatcaagcagaagaaagaatctgtgaacttgaagacagattatttgaaaatatacagtcagaggagaaaaaagagtgaaaaagaatgatgaaaacttatgggactttggggagagtatcaaaagagcaaatgttcacattatagaagttcaagaagaagagagaaataaaggggaaggaaacttatttaaagaaataatagcagaaaaccttccaaacctggggagcaatataaatatccaggtacaagaaggttaaagatctccaatctgattcaatcaaaacaagactactcctgagacataatcaatttgtcaaaaaccaaagacaaagaaaggatcctaaaagctgcaaragaaaagaaacaaatcacatgtaaagaagttccagtaaggctaacagtggatttctcagcagaaaccttacaaaccaggagagagtgggatgatatattcaaagtgctgaagggaaaaaaaaaaacttccaaccaaaaatactttacccagaaaagctattcttcagagataaaagagagataaagactttcccaggcaaattaaagttgagggagtttatcaccaccagacctgtcttacaagaaatgctaaagggagttcttcaagctgaacaaaagtatgctaattagtagcacaaaaacatacaaaagcaaaaacctcagtggtaaaagtacgtagtacacagtcaaattcagaatactctaacattgtaatggtggtgtgtaaattattgttagtatataggttaaaagacaaaattgttttaaaatatattaatttgctaaaggatataccatattaaaaggtgcaaattgtgacatcaataaatcaaatatggggaggtgaagtctagagttgttgtacgcaaagttaagttttttattagcttaaaacagcctattataagatgttttatacaaagcaaaaacctatagtagatacacaaaaaagaaagagaaagaaatcaaagcctacctctaaagaaaatcatcaaatcacaaaggaggacagcaagagaggaacaaagaaataaaaactccacaaaacagccataaataagttaacaaatggcagtagtaagtccttacctatcaataattaccttaagtggaaatagattaaaatatccaatcaaaaaacagaatgttgtatgggttttttttaaggacccaactatatgctgcctacaagagactcacttaacctaaaaagacacacagattgaaagtgagaggatggaaaaagatattcatgcaaatgaaaaccaaaagagagaggaagctatacttataacagataaaatagaatttaagccaaaaaactgtaaattgagacaaagaaggtcattatgtaatgatataaagggattgatacctcaaggagatataacaattatgaatacataggtatccaacatcagaccactttaatatataaagcaaatattaatagatccgaagagagagacagactgcagtatgataatagtagggaatttcaatgctacactctcaacaattcacaaatcatccagacagaaaatcaataaggaaacattggcttgaactatactttagatcaaatgaaccaaacagacacatattttaggttggtgcaaaagtaattgcattaatggcaaaaacctcaattacttttgcaccaacctaaatagaacttttcattcaacagcagcagaatacccattcttctcaagagcatacgcatggaaaattctctaggatatatcatatgttaggccacaaaacaaatcttaacaaatttatgaagattggaaccatttcagaccccagtggtataaaactagaaattaataatagaggaaattttaggaaattcacaaacatgtggaaatgaaacaacatgctcctaaacaaggggtcaaagaagaaattaaaaggaaaattgttttaatatcttaagacaaaagaaaatggaagttcaacataccaaaagcaatcctaagagcaacaaatgcctacatcaaaaaagaaaaggaaagatcccaaataaacaacctcacattacatgtcaaaggactagaaaaagaacaaactatgcccaaagacaatagaagaaaggaaattaagataaagatcagagctgaaataagtgaaatagacactagaagaacaacagaaagatcaacaagcaaagatttgttttttgaaaagaggaataaaattgacaaacctgtagctacagtaagaaaaaagagaagactaaaataaataaaataacaaatgaaagaggatacattacaactgaatcacagaaatacaaaggactaaaagagactattatgggctgggcacagtggctcaaacctgtaatcccagaactttgggaggccaaggcaggcagatcacgatatgaaaagatcgagacaatcctggctaacactgtgaaaccccatctgtactaaaaatacaaaaacaaaattagccagacgtggtggcaggtgcctgtagtcccagctactcaggaggctgaggtgggcgaatggcatgaacccaggaggcagagtttgcagtgagctgagatcgtgccactgcactccagcctgagcaacacagcaagactccatcaaaaaaaaaaaagagagagagactattatgaacatttgtaggccaacaaattgggtaacctagaagaaattaataaatttccagacatatacaatgtaccaagactaaatcatgaataaattaacaatctgaacagattactaatgagtaaggagattgaatcagtaataaaaagtctcacatttgagacttttccattgagacctgatggtttcaatgctgaattctatcaaacatttaaagaacactaatactaattctcttcaaactattccaaaatattgaaaaggagggaatacttccaaactcattttataaggccagcattaccttgataccaaagccaactaggacactacagaaaagaaaattacaggccaacacccctgatgaacatagatgcaaaaatccataataaaatactggtaaacagaattcaacaacacattgaaaggatcattcaccatgatcaactggaatttatcccctgggatgcaagggtggttcaacatatacaaatcaacaagtgtgatatgtcatattaacagaatgaaggacaaagacatatgatcatctcaatagatgtagaaaagatatttgacaaaattcaacatctttcatcctaaaaattctcaacaaattagacgtagaagaaacttaccttaacacaataaagcccatatacacaaacccatagctaacatcattctcagtggcaaaaagttgaaatcttttcctctaagatcaggaataagacaaggatgcccaccctcaccagttctattcaacagagtacgggaagacctagccagagcaattaggcaagagaaagatgtaaaaaaccattcaaatcagaaaggaaaaagttaaattgtctgtttgcagactacataatcctctatgtagaaaatcctaaagattccaccaaaaaaactcttagaactaataaataaattctgtaaaattgcagcatacaaagtaaacatacaaaaataaatagtgtttctaaacactaacgaaaactacctgaaaaagaaatcaagaaaacaaccccacttacaacagctataaaaaaaaatccttaggaataaatttaacccaggggataaaagatctgtaaactaaaaattaaaacattgataaaaaattaaagacacaaacaaatggaaagatatttacgtgtatggatttaaataattaatattgttaaaataagtgatctacagattcattgcaattcctatcaaaattccaatgaactttttcacagaaatagaaaaaaatcctaaaatgcacatagaaccacaaaaatcactgaatagccaaagcaatcttgagcaaaaagaacaaagctagaggcatcacactatctgatttcaaaatctactaaaaagttatagtatggtaaacccaggggattttttaaaaattaaaaaaattaattttgttttacatttttttaaagttatagtaatcaaaacagcattttgacaaagagtccaataaaacgcaataaagaaaggacagtctcctcgataaatgctgctggaaaaactagatattgatatgcagaagaatgaaattagacccttgcctcacaccatatacaaaaatgaattcaaagtggattcttaaagacttaaacataaaacttaaaactgtaaaactaccataagaaaacatagggggaaagctatataatattggtctgggcaatgattttttgggtatgaccccaaaagcacaggcaacaatagcaaaaataaacaagtgggactatatcaaactgtaaagcttttgcacatcaaaaaaagaaagcaaccaacagagctgggaacccagaatatctgagacaggtatttaataattataattatgaagtttattttgccaaggttgagaatatcggcccatgtgacagccttgggaggtcctgactatatgtgcccaaggtggtcagagcacagctaggttttatacattttagtgtacattggttccattcagaaaggcaggacaactcgaagcagggaagaggcttccaggtcacaggtaggtgagagacaaacggttgctttcttttgagtttctgattagcctttccaaagtgggcaatcagatatgcatttatctcagtgagcagagggatgactttgaatagaatgggaggcaggtttgccctaagcagttcccagcttgactttacccttcagcttagtgatttcggggccccaagatttatttttctttcatatttccccccttttctttttaaaatcttttagagaaagcgttttagaagaaaatgagtctctggtctcaggtttcatctgatctctcatggctacgatggtttattcctaaatgggtaggttccaagttattaggaaagctcatttttagcaggttgtaaactctcatgtcctatgaagagaaaatagggggaggaaggaagaaaaacaacaataaacaaaagaacaatcctggaaaatcaatataggtcacattactctaaagtccttcagcaaagtctcaggatacaaaatcaatgtacaaaaatcacaaacattcttatacaccaataacagacaaacagagagccaaatcatgagtgaactcccattcacaattgcttcaaagagaataaaatacttaggaatccaacttacaagggacgtgaaggacctcttcaaggagaactacaaaccactgctcaaggaaataaaagaggatacaaacaaatggaagaacattccatgctcatgggtaggaagaatcaatatcatgaaaatggccatactgcccaaggtaatttatagattcaatgccatccccatcaagctaccaatgactttcttcacagaattggaaaaaaactactttaaagttcatatggaaccaaaaaagagcctgcatcaccaagtcaatcctaagccaaaagaacaaagctggaggcatcatgctacctgacttcaaactatactacaaggctacagtaaccaaaacagcatggtactggtaccaaaacagagatatagatcaatggaacagaacagagccctcagaaataacgccgcgtatctacaactatctgatctttgacaaacctgagaaaaacaagcaatggggaaaggattccctatttaataaatggtgctgagaaaactggctagccatatgtagaaagctgaaactggatcccttccttacaccttatacaaaaatgaattcaagatggattaaagacttaaatgttagacctagaaccataaaaaccctagaagaaaacctaggcattaccattcaggacataggcatgggcaaggacttcatgtctaaaacaccaaaagcaatggcaacaaaagccaaaattgacaaatgggatctaattaaactaaagagcttctgcacagcaaaagaaactaccatcagagtgaacagacaacctacaaaatgggagaaaatttttgcaacctactcatctgacaaagggctaatatccagaatctacaatgaactcaaacaaatttacaagaaaaaaaacaaacaaccccatcaaaaagtgggcaaaggatatgaacagacacttctcaaaagaagacatttacgcagccaaaagacacatgaaaaaatgttcatcatcactggccatcagagcaatgcaaatcaaaaccacaatgagataccatctcacaccagttagaatggcaatcattaaaaagtcaggaaacaacagatgctggagaggatgtggagaaataggaacacttttacactgttggtgggactgtaaactagttcaaccattgtggaagtcagtgtggcgattcctcagggatctagaactagaaataccatttgacccagccatcccattactgggtatatacccaaaggactataaatcatgctgctataaagacacatgcacacgtatgtttattgcagcactattcacaatagcaaagacttggaaccaacccaaatgtccaacaatgatagactggattaagaaagtgtggcacatatacaccatggaatactatgcagccataaaaaatgatgagttcatgtcctttgtagggacatggttgaaattggaaaccatcattctcagtaaactattgcaaagacaaaaaaccaaacaccgcatgttctcactcatagatgggaattgaacaatgagaacacatggacwcaggaaggggaacatcacactctggggactgttgtggggtggggggagggatagcattaggagatatacctaatgctaaatgacgagttaatgggtgcagcacaccagcatggcacatgtatacatatgtaactaacctgcacattgtgcacatgtaccctaaaacttaaagcataataataataaaaataaataaataaaaaataaagtccatacatcaatagacaggtataaaagtggcttatgtacgtaaaatgttgctgttattttcttccagagattaagttgtctagtggcagtttgtaaggctttaagaaagcacagcttagttttcagtgattttaaattaggaaaaatgggggaaataaggaaaagaaagaagaaaaaaattgaaaacattatcttggagatttgtagccaggaaaaattagaattcaatctagactgcagaaaataataaaaattgaaaaacattaggtaagactagaatctaacaacaggtgtaccatagtttttgaaacataatttttctctctccagtttcccatttttactaaagacaaatcatgttatgattgatttgccttgttatacttggccagattatttrtataaagtacagcaagaataatgatttttctcataggctttttaaattggctttgatggagctttgttccatagaaggaatctcagattagccttttttaaagtcgagcctagccacagatttgtaccatcaaatacctatgagttgggtgaattcctctcctcttgagatcccaagatagcctggggatcctaggcctgtcagaaagtgacattcttacttaccacaggtcaggaaccctgtacggggactatgtaggtatgaggtcagttttcctaaagggcttttattggctctataagtcaagtttgattccttaaaggaaagcctaccattccagtcaaagccttggtaaaataaccagtttctccaattgtgtcctattacaaatgaaaacagattctcattgcacttttgcaaataactatatagccataggttaagaacactcagtttccaaattctggagaatcaggtagaaacaaatatgcttcaaattttgttcataaagtatatttaattgttaaaagctgttaatagctcaaaagaaaagtttccttgactctgaaaaacaaaggatcagcaacattttaagcaaaaagtcaaaaagactacttcagttttctattagttcagtctatgcagttctgcttgatattcatgaacatttcagctttccaggagtcctgaaaggtttttctctattgtgatgtcaccatctccaaagttatcagaaacctgcattcaaaagtgcctgttagaattttatagctgattgggagcgggtaaggattcggcgggcaagcgggtgtaatccacagctatccgtggtagggcatggtagcttccaaccgcggggaccccaagagtctcccgtcagccgagtagcagccaggaaggagaggctgggatggttttttacctgttgtcccttaaatcaagggccgccgggccgaagagggatagagggactggggatttggggactcgaaaacgagctgagggaagggagcctgtggaaatagactggagtctgggtagtgtcgtttcctagagaatggtctcgaagtaacttctcggtaaagtcttcacagaacttccagaccacacttgcccactgggaggcttttaggacctgagacgtgtgcaggcttttccagccaaaatgaagtttaatccctttgtgacttcccaccgaagcaagaatcgcaaaaggcatttcaatgcaccttcccacattcgaaggaagattacgtcttcccctctttccaaagagctgagacagaagtacaacgtgcaatccatgcccatctgaaaggatgatgaagttcaggttgtacaaggacactataaaggtcagcaaattggcaaagtagtccaggtttacaggaagaaatatgttatctacattgaacaggtgcagcgggaaaaggctaatggcacaactgtccacgcaggcgttcaccccagcaaggtggttatcactaggctaaaactggacaaagaccgcaaaaagatccttgaacggaaagccaaatcttgccaagtaggaaaggaaaagggcaaatacaaggaagaaacaattgagaagatgcaggaataaagtaatcttatatacgagctttgattaaaacttgaaacaaagaaaaaaaaagaattttatagctgattataaaaccaccttctaaagaggaccaaaataagacaattgtccacggatgacaaaaggttttagggcacccatagtcaaagacacaattgacaaggaagtttgttacctctgtgacataaaataatgtcacataacaattatgattattactgataatgtacactgagtcatatcagaattataggagtttctcataattttggaacacataccaataacatatttatacaaatataagccaaagaaaaccaaacaccatttcatatttgacaatacttcctgtgtacattttataccaaataagccaaatatgccattttgtactttagggaatctaatatcttaaaggattagttagrtcagaaagagacataatttataattttattttggaaaatgtgccaaatatcaaaggcttaaaacatttgatatcactaaataggatcacaggtcattgtaaaataagtgattcacttagagtgataactcaaacatctcaaaaaaaaaaaaaaagcaaaaaccttcattctttgagagaggatacttaattttccaaacaataagccctaataaagtcagcatgaagccaattaaatgttttttaaaattttataagcaatctataaaatgttcatctgaccataagatataatttcataagccttttataacctttattaaggagtcagttaatgcttcaagaaaaacttgttaatctgacacaggggcccatttgctggtcttgcatcagtgggcctttgacattaatgtttaagttcagttcagagaaacggaacttattttatctctcaaaatcagcccttacaatctcatacacccaccttttctgcaatagttctgggccttgaggagttgaatagtttagtttctggccctgtctcaggaacgcagtttaatttgattggcactttctaccaggcctgaagatgaggctttaattgttgtcagtgtttaagatttaccaggacttggccgggtgcggtggctcacgcctgtaatcccagcactttgggaggccaaggcaggcggatcacgaggtcaggagatcaagaccatcctggctaactcggtgaaaccccgtctctactaaaaatacaaaaaattagccgggcgtggtggtaggcacctgtagtcccagctactcaggaggctgaggcaggagaatggcatgaacctgggaggcagagcttgcagtgagcagagactgtgcctactgcactccagcctgggcaacacagcaagactctgtctccaaaaaaaaagatttagcaggacttcatgtcctttttgggcgaaggagtcaaagccccacaactcaatgtcacgaggactttaaaagcacatacagaaagatacacggatgtaataaccataattttttttwaaaaaattaatctcagtttttttctaagcaaatcaaaacttaataataatggcataggaattattttgataaaacgtaaaaatctgttaggccagttaccaagaggcaaaataaaagaccttctgcagtgcactgaatattatgttggaagaaaacattttctttagacccttaagaaaacattgttagcatcaggctacaacaaacagaacccaatacgaaaaaaacttacatgagctgaaaaatgagttgaaggacagtgttattttgcactttttaaaaggggagaggaaacaaaaatgatgagatgcaataaaagttgaactttgggttataatttttttaaattaaaatatcggcctggcacggtggctcatgcctgtaatcccagcactttgggaggccgaggtgggcagatcacttgaggtcagaacttcaagaccagcttggccaatatggtgaaaccccatctctactaaaaatacaaaaaaattagccgggcactgtggcatgtgcctgtaatcccagctactcaggaggctgaggcaggagaattgcttgaacctgggaggcggaggttgcagtgagccaagcacgccactgcactccagcctgggcgacagagaaagactccatctcaaaaaaaaaaaaaaattaaaatatcttataatttattaagagtaaatcaaccccttaagaaaatttcattgttctaaccaattatttaatgtataagtgattttctttacattaaacccaatctctagaaaggtcattataatttccctttagttatagacaacttgatcatataaaactttttgggttcttttcttgttttcttttaaagctttttcggtatgtttattagttcatttaattaattcttttttttatttaagttctgagatacatgtgtagaacgtgcaggtttgtcacatagtatacatgtgccatggtggtttgctgcacctatcaacccgtcatctaggttttaagccctgtatgcattaggtatttgtcctaatgctctccctccccttgctccccagcccccaacaggccctggtgtgtgatgttttcctccctatgtccatgtgttctcattgttcaacttccacttacgagtgagaacatggggtgtttggttttttgttcctgtgttagtttgctgagaatgacaccttccagctttatccatgaccctgcaatggacatgaactcatttgagggtgttttttttttaataaatccacttattgtgactcacacagaccactcatgacatgtttggactttctgatttatcctgaacaccctcttttttttttttttttttttttttgagacggagtctcgctctgtcacccagtctggagtgcagtggcgggatctcggctcactgcaagctccgcctcccaggttcacgccattctcctgcctcagcctcccaagtagctgggactacaggcgcccgccactacgcccggctaattttttgtatttttagtagagacggggtttcaccgtttttagccgggatggtctcgatctcctgacctcgtgatccgcccgcctcggcctcccaaagtgctgggattacaggtgtgagccaccgcgcccggccaacaccctctttcttaaacaaccagtcattttattctaggacaaaatttaccgtacgagattctttctcgtataaaattatttctctttaagctttcttaccaaaaaaatacctcttttttctataactttctttacatctctcttatttcctggttccttttaccttgttttatacataacctctaaataagctttgaattagacaaaaacaattcacctttttaaaaggacatttttttagaaagcatgttttcctacaatatatttttactggaaaatacccaaataatgaaatatctactgtttaatttaactttagattctaaattatgattctaagtatgcctataggtatttatcccattaaatgtacctaattattttattttaatcatttacctagattatttgtgaaaactgtgagagtcgtcatttaaacttatgaaaccactataactgagacagtgaaaaagatctggcctaacttactccatcttgcttctaacctccaagctatccttatttattcctgggcataggccgaactaactttgggaggaacttagtttatagtttaggtttgaaacaaagatgctaactgtcctttcccaaaacaaatctcctttctgcctgtggactaggctgctaaagccacaagattagaagttatggtaattttactagataattcaagatgactattttcactaaaccaataacaatgtcttatttattaaaaattacacaagcaaagatcattcagtttggggctgagtttatagtttcgtaaccctgatgccaaattttgacaccttatagtatttggcagggataagtacgcaattgcttaatcaataaatgcaaacaaaaatgtatgctggaaattcttaagacatttctaatattactttaccaataatttsaaagctagcttatttattaaagattttacttaagtcatgtaaacttgaaaaagcatttgactagtatttccttttttctggtaaagtatttgatttaagtgcttttagtttcctttaagccaattaattagagctcttttatatatttttagtagtgaaacgtgtacacaacacataaatacataaatgtattaggcataccaatagaagtacatcttatagattcctaagacctttttttttcttaccttagactttcaaactcttgataacctgtttcattaccctggcagttgtcaggtaaatagccctaagtctgcatattgaaggaaataactcttagaagaaaaatcaaatggcaaaatttacatctcaaggtacagagagaaaaartctggtggagctagagggagattaaagatgaatgccaaatcaaacatgaaattatagaaatctatgataggattgtataaggagaccaattttatttaggtgggaactacctatcttttaactagatctctgagctctgggcagagcccacactgaatcctgggtctccaaaaagggagagttgacgctagaacacgtgatgcttttacaggacacttaaaatttttttcagtcaaagacatttctaagtgtctacactacagtcttccttaaaaacccaagagtagcctctgttacaatagctattttagtcaaaaaatcaggtaacacaatacaaaagcaagcagtttaagagctgagacaaacttgtctgtttacactcttgggattccataaggaaaaacagggagcctggtgccttccccattttctttaaggaaatccaggctattataaactattttaggtccctcatgcagcagaacatgcaagagaaaggagagacagcagaagtaaatggagaaaatagaattaaatcaactgagaagaaaaacctttgctcaaaaaaagacaaggtcctaggagagggaaaaaaacaaaaacatgaaagcctcttaaacgcacacacacacacgcacacatatacacatgcacacacacacacatgcacacatacacacgtgcatacatgcacacatgcacatacaggcacacgcatacacatacacacatgcacacatacacatacacacatgcacacacacacgcacacacatatacacatgcacacacatacacacatgcacacacatacacacacatgcacacacacacgcacacacatacacatgcacacatacacatgcacacatacaaacacacatgcatacatatacacatgcacacatacacatgcacacatacacacacacatgcatacatacacacacatcttggatgttatcttcaattaagctgacttttaaccactgagctcctattaaaaaaatctttttaaacctcattaccatattttagctaggacaaattgctgctatttcagaagtacaagtatcaaaccagaaagggcttgatttaggaaccaaacccaggctgtcatagtggaaaaaaagaaggcagaaccttagctatgaaactgcagcatggggcgacagccatcgctctttcagtttggactggctagcaaaaacatagccctgttgtgtaaataaataaagccccttaagtggccaaaataaaaaatctttccttttttttttttttttyccttgtgctggctatttttctctccccaccacatcaccttttgtgtgtgggggtggggggtggaatttagccagttcagaggacctgttccccataatttggaactttccttcagatttgatcaaggaaaaacaccaaaacaaaaacaaaaacaaacaataaaaaaaattaagtgaaacaaataatcacacaatgtgtgtgattactgagtgctcaaatggtaaggagaaattaagaccagctggttgttaatcttaactttagccaaaacaaacctccattcagttacttagatagggatgggtctcaggcgaagactgctctctaccatcctagaagcaggaaaaaactcaaaactcatcttccctgttgggagtgagttcaaactccataaaaaagttgcctgccttccatcgtgatggaagcaggaaaaacttgccttccttgtgctggaagcaagtaaaactccacaaaaggagtcgtacagcaaaataaaatttagatctcgaccaaattttgggagatcagggattttccggaggggttgcttccaggcctcagcaaattgttccattggtttgagccataaagatagctcaagctggtaccaagcacgaattggagatgtgtcaaacgtcaggggcacctccactcagaatcccttcgtggttaccaaaatgtgaacccagaatatctgagacaggtctcagttgatttagaaagtttactctgccagggttgaggatgcacgcctgtgacacagcctcaggaggtcctgatgacatatgcccaaggtggtcggggcacagcttggttttacatattttagggagacatgagacataaatcaatatatgtaggatgtacattggytccattcagaaagtcaggacaactcgaagcagggagggggcttccaggtcacagttagatgagagacaaacagttgcattcttttttttttttttttttttaattgagacagagtctcactctgtcgcccaggctggggtgcagtggcgcaatcgcggctcactgcaagctccgcccgccgggttcaygccactctcctgcctcagcctctccgagtagctgggactacaggcgcccgccaccacgcccggctaattttttgtatttttagtagagacagggtttcaccatggtctctatctcctgaccttgtgatccgcccgcctccgcctcccaaagtgctggrattacaagcctgagccaccgcgcccagccgacggttgcattcttttgagtttctgatgagcctctccaaaggaggcaatcagatatgcatttatctcagtgagcagagggatgacttcgaatagaatgggaggcaggtttaccctaagcagttcccagcttgacttttccctttagcttagtgatttgggggcccaagatttattttcctttyacagagtgaagatataatctasagaatgggagaatatatttgcaaaccataygtgtggtaagggattaagatccaaaatatataagaaactcaactcaatagtaagaaaacaacctgatatgaaaatggacaaagggcctcaatagacatttcacaaaagaagacatacaaatggccaacaggtgtatgaaaaaatgctcaacatcactaaacatcaggaaaatgcaaattaaaaccacagtgagatatcccctcacacctgttagaatggctcttatcgaaaatacaaaagataaatgttggcaaggatgtggagaaaagagaaatcttgtacactgttgtacaaggtacaatatacaagaatgtacatttggtacaaccattatggaaaacagcatggaagttcctcaaaaaattaaaaatagaatttccatatgatccagcaatcccaacattgagtataaatccaaaggatatgaaatcagtatgtcaaagagatatctgcactcccatgttctacagtattacaagaatcaagttaggaatcaacctaagtgtccattgatagatgaacaaataaaatacagtatgtgtacacaatgaaatattattcagctttaaaaagaataaaatcctgtcatttgcaacaatgtggataaactgagaggacatcacattaagtaaaataagccaggcacagaaagaaaaatacgtaatctcacttgtatatagagtgtaaaaaagtcaaacttatagaagcagagagtaaaatagcggttcccagatgctggaggttgggggattgggaagatattggtcgcaggacacaaaatttcagtgaaataagaggaataagttcaagagatctattgtacatcatggtgactacagttgataacaatgtgttatatacttgcaaatccctaagacagttgattttaagtgttctcaccacacacaaaaaaaatgataagtatgtggcatgatgcatatgttcaataatttgatttagccattccatagtgtgtcacaacatcaggttgtacaccacaaatatatacaatttctacttgtcaattaaaaaataaataaaatatattgacacaggaaatatgtacttaagttccttaaaagtcttttttttttctttttttggagatggagtctcactgtgtcacccaggctggagtgcagtggcgcaatctcggctcactgcaacctctgcttcccatgttcaagcaattctcctgcctcagcctgccaagtagctgggactacaggcacatgtcgccacacccggctaatttttttgtattttaagtagaaacggcgtttcactgtgttgcccaggctggtctcgaactcctgagcttaggcaatccacccgcctcagcctcccaaagtgctaggattacaggcatgagccaccgcatccaacctaaaagttttaatttatgctacattattcaaaataataatattttcaaaacaaaagaaaaaaatgtgtgcaaaatgtttaaaggaataaaggccactgttacaactaacagagatcactgggaaaatatcaataaaaggacccatgaaaagactacaagcaacaattcctcaggtccagtgagcaccataagcatctgatcttaaagaccgaatccttccagccagtagctctttagagaagtggctgattcgaggtgcaggacagggggtgcccaacataggtcagggcatctgtgctaaaatcaaggaagaagccaaagactggttcttgccaaaaagacatggaagctggccgggcatggtggctcatgcctgtaatcccagcactttgggaggccgaggcgggtggatcacctgaggtcaggagttcaagaccagcctggtcaacatggtgaaacctcatctctactaaaaatacaaaaattagccgggtgtggtagcatgcacctgtaatcccagctactagaggggctaagaggcaggagaatcgctggaacccaggaggtggaggttgcagtgagccaagatcgcaccattgcactccagcctggttaaaagagtgagactctgtctcaaaaaaaaagacacagaagccagcttgacaccacatttgatgacaatttgcataaagcaaagttcatccgtagtggcattcataaaaagagaaagaaaaaaacggtgaggagctttttgtgaaagaatgccagttaattcacctagaagtcacggatttagaaaatcacaattttgcaaccaccagtataacaactgattcaggtgaaggtcattagtgaataacagcaccaggtaaaatatggttggatggagcagaatcatcactgccccacctacttgcctcagactctccactcactatgccccaggtgacttcccattgccatttcagcatctccaccctgagggcattttgcccacacataggggaagcggaagtgccgggctattaacaaccctctgaaacagcttgcgccaatgactgatgaaagttggtgcataaatatttcggctcccttggccctcctccaagtgagataactctaaggtgtgtgtgttacacaacttcccagcatctcccaacagtgttaagctctggtttccctgtggtggctggcttaatgacacaactttgattggctgtatccccttccaggtatcacttcttcacccaaataaacatcctgctctcaaattttcatctcaggatcaactttgggaaggatgcaatctacaaccttggtgtcagtgacagagcagaagcactgccatcttggacaaacgccaccattttaaattccagctccctttctaacctcatgcatttcaaggaaatcacttcttttctaacaacaagcagccagaaagagcagacggtaaaacacagataagacagctcaggcagggagagagaggggaaagtctcttgggtaaccaccaagcttcacacccatacaatgggacccagcaaaacagtgggtccaaataagcacattcctttcttttcaggtgcactaagatagggaagctaaaagtaaactcgggggtatgcctgcaggtgcaggaagatgtatgggaacagacacaaaactctccctcccagataagcaagacaaagagacacaggacatttcaagcctgtgataagctctcccaccctgaacccttaaatactcttagtctgtaagagagactgctcccaacctaactcggccagaaggccctctcaggtttactctctgaaataaacctgtctttgactactcagccacttttcatgtttctttcttcttcaattcttacagccaggagtaggaggcagatcctctagtgggaccctggaatgagaccactagccacagggccgctggtgttgagaggtgacaacgtgctagcagccgtcgcttgctctaggtgcctcctgggcctyggcatccactctggccatgctccaggagctcttcagcccrccactgcactgtgggggcccctctctgggctggccgaggccggagccggctccctctgcttgccaggaggtgtggagggagaggcacaggcgggaaccagggctgcgcgccgagctcgcgggccagcacgagttccaggtgggcggggctcagcaggccccgcactgggagyggccagcccacaccacctgcctgggcagtgaggggcttagcacctgggccagcagctgcggagggtgcrccaggtcccccagcactgccagcctgcccatgctgtgctccaattcacaccgggcctcagccgcctccccacggggcagggctcaggacctgcagccggccatgcccaagccccacccctcacccctgtgggctccccagcggcccgagccacctcaacggtgccacctcctgytccggggtgcccgcctggtcccatcgactgcccaagggataaggagtgtgggccacagtgcgggactggcgggcatctccgcccacagctctggcgcaggatccactaggtgaagccagctgggctcctgagtggggtggggacttggagaacttttatgtctggatggaggattgtaaatgcaccaatcagcactctgtgtctagctcagggtttgtggatacgccaatcagcactctgtatctagctaatctggtggggacttggagaacttttatgtctagctggaggattgtaaatgcaccaatcagcaccctgtgtctagctcaaggtttataaacacaccaatcagtgctctgtgtytagttaatctagtgtggacttggagaacttttaggtctagctagaggattgtaaatacaccaatcagcactctgtctagctcagggattgtaaatgcactgattagcaacctgtcaaaacggaccaatcagcgctctataaagaggaccagtcagtgctctataaaacggaccaatcagctctctgtaaaatggaccaatcagcaggatgtgggtggggtcagataagggaataaaagcaggctgcccaagacagcagcgcaacctgttcgggtcccattccacagcgtggaggatttgttctttcactctttgcaatacatcttgctgctcgttcttcgggtccacaatgcctttaggagctgtaacactcacgtgaaggtctgcagcttcactcctgaggccagcaagaccacgaacccaccaggaggaatggacgactccagacgcgccaccttaagagctgtaacactcaccatgaaggtctgcaacttcactcctgaagccagcaagaccacgaacccaccagaaagaaaaaactctgaacacatccaaacatcagaaggaacaaactccggacacaccatctttaagaactgtaacactcacggcgagggtccacagcttcattcttgaagtcagtgagactaataacccaccaattctggacacagtgtgaktggggttgtcatcaccctatggggcatgtcacagcattgccatcacaagctgtcacatatgctgaactgggagaagatacagggaaaaaaggttgtaccttcctgtattagtcagttcttgcactgctataaagaaagaccgggtaatttataaagaaaagaggtttaattggctcatggttccacaggctgtacaggaagcatggctggggaagtgaaggggaagcaggcacatcttcacatggttggagcaggaggaagagaacgaaggggcaggtgwyamccacttttagacaaccaaatctcctgaggactcactcactatcacaagaacagcaagggggaaatccaccctgtgatccaattacctcccaccgaacccctctgccaacaatagggagtacaattcaacatgagatttgggcggggacacaaatccaaaccctatccattcccatttgtgaaatgtccgtagcatgtgaaagatgccgagggaatggggagttttaagtgcggtggaggtgtctgtgtgctgtgaagtgcctgagatgtgaggcaggggagaaaatgatggctcaagtcaaccaaccactaacacatggaatgacgtaagaggcagaggcctctatgaaaacgcagaaagtgacctcttctcctgtcgatggagggcaagacctaatgctgagggggatagaattacagagaagcccaacctcatatccctggcaaatctctgccacctgcaaggctctgccaggggagatgtgggaccctaaaaccagggaaagagacatcggatgggtgcatttgggaaatttgaacacccagagtcccccgtatcctccagtcctgtggaaatcatgcacaccgcttgttaaagggtagctgcctcctttcacctaaagcccattcctgaggcaaatgctttgcacgatggttcttgccttcctcaagatctgcacagcttcctcccctmacagcttctaggacaataaataaggtaaagtctcaacttggcccatcttagattggcccaggaatcaggtcaactgtggcaaaaagcaaaaccagcgagatacgagtggtcatgggagtctgagataataaaatccaagactaagggcctcaaaaaggctggatcctgcagcttcacaattgagaggctaaataattcaccaaatttagaaaagcaaagtggaatatccttcaacctcatggtgcttaggtgacaaagacctactggagaaggccccagaggacgagtgagagttgaaaacctccaggagtataagccgacactaacaagctgcaaccactttctcctgggagcacttgccaatctgggtgcaactaagggctaataaagacgcttctagacaaaaaagaaacctaagggaatctgttgtcagtacggtctgcattaaaagaaataatagagttcctcagatcgatggaaatgatgcaaaccaaaacaacatggaaactcaggcaggaatgaagagcactagatagaatgattgtatgatcaaatctacatgaatattgactgtgccaggcaaaactagaaatattgtgtcgggtttaaaatccatgcagaaagaaaatacgttacaataataaagcaaaaagtggggaggaatcatggagttaaaaatattgtgatggattggcattattggtgaaacgaaagagtaaacatctgtactagatcacaagtcaagaatacgcactgtggccagttgcagtggctcacgcactttcggaggccgaggcgggtggatcacctgaggtcaggagttcaagaccagcctgaccaacatggtgaaaccccatctctactaaaaatacaaaaaattagctgggcgtggtggcgggcacctgtaatcccagctactcgggaagctggggcaggagaatcacttgaacccgagaggcagaggttgcagtgagctgagatcgcaccattgcaccattgtcgcctgggtgacaagatcaagactctgtctcaaaaaatatatatatgtgctgtaatctctagggtaacttttaaaaggctagtaagagaatatataacttacaagcaaatagaaggaaaaatagaataattgtaaaaattgaaaaaaagccagagaggagaaaaaagaacataaaacaagtgagtaaaatacaaaatgaataatcgtatcatagatataaacctaactatattagtaatcacaagaaaaatattaagattgtcagacgtgataaagaaacaacccaaacatacattatgtagaagagacacagccgagcgctatggcctgtaatcccagcaactcaggaggttgaggtgagaggatagcttgaggccaggagtttgagacaagcctgggcaacactgcaagactccatctctacaaaaaaaatttcagccaggtgtggtggctcacacctgtaatcccaacactttgggaggccaagatgggtggatcacctgaagtcaggagtttgagaccagcctggccaatatggtgaaaccccacctctactaaaaatacaaaaaattagccaggcgtggcggcgagtgcctgtaatcccagctactcgggaggctggggcaggagaatcgcttgaacccaacaggcggaggttgcagtgagccgagatcgcaccattgcaccatcatcgcctaggcgacaagagtgagactccgtttcaaaaaaaaaaaacaagtgctgtaatctctagggtaacttttaaaaggctaataagagaatatataacttacaagcaaatagaaggaaaaatagaataattgtaaaaattgggaaaaagccagagaggagaaaaaagaacataaaactggtgagtgaaatacaaaatgaataatcatatcatagatacaaacctaagtatattagtaattacaagaaaaaaatattgtcagacgtgataamgaaacatcccaaacatacattatgtagaagagacacagccaagagctacggcctgtaatcccagcaattcaggaggctgaggcaagaggatagcttgaggccaggagtttgagacaagcctgggcaacatagcaagactccatctctacaaaaaaactttcggccaggcgcagtggctcacacctgtaatcccaacactttgggaggccgagtgggtggatcacctgaggtcaggagttcaagaccagcctggccaacatggtgaaaccctgttcctaccaaaaattcaaaaaattagccagacgtggtgacacatgcctgtagtcccagctactcaggaggctgaggcaggagaattgtttgaacccggaaggcagaggttgcagtgagccgagatcaagccactgtactccagcctgggtgacagagcaaaactccatctcaaaagaaaaatttttttcaataatctggrcatggtgatacgtgcctatagtcccagtttcttggaaggctgaggtgggaggattgcttgagtycaggagtttgaggttgcagtgagctatgattctgcccctgcactccagcctgggtgacagagcaaggccctgtctctaaaaaaataagatgtacaactttaatgtaaatttaagatcacaaacargttgaaaaaaaggggtgagaaaaggcctagtaggcaaacacaaaatggaaagagcaggtacaactatgctaataccagataagatttaaggcaagarccattactagaggaaaagaaggacttttcaccaaaacaaagaggtcaatccaccaagaatatatcaacatcctaaatctagaggccctaaagaacacaatttggaataagtgaaacaaaaattggcataattagcaggaaaaatagacaaattcattatcagaatataagattttaaaactgctgtaacggccaggcgcagtggctcacacctgtaatcccagcacttcaggaggccgaggcaagtggatcacttgaggtcaggagttcaagatcagcctgggcaatgtggtgaatccctgtctactaaaaatacaaaaaattagctgggcgtggtagcacatgcctgtagtccagctactcgggaggctgaagcacaagaattgctcaaacctgggaggtggaggctgcagtgagccaagatcatgccactgcactctagcctgggtgacagagcaagatcctgtctcaaaaaaaaaaaactgctataactaccaaaacaaaccaaaaaataagtaaagatatgagagctaagcaacaaatcagcaagcttgacttacatgacatgtatatgaaactctgcatgttagccctactacctaggcactgaacagatgtctatctgctgaaggatgaataaatagtgttctacttgcacaatgcaatagtattcagcaatgagaaccaacaaaatgcaactacacacaatatggacaaatctcaaaccaatggtattgagagaagaagacagaagagtacgtacaaaattattctatttatgaaaagttcaaacagacaaaattattatataataatctgtagtgttagrcatctatagagagatcaccctttgggaggtttaaaaaccataagatggcttaagtggggcccctggtggtttggtaattattatctttcttgatctgcatgctggttacagaagtgtgtctatttaataaaatccatcaaactgtacacctgtatcttgtgtagctttatacatgtaacacttgaacaaaaacttttttagatggagatgctctatataatccctagaatacttctttgtaaagagtaatggcttcaagagaggtggcctaatgygatggttaggagcacacacttcagagctagcatctgtatttggaaacctayattctgcctgtctagccatgtcactatggaagatctgaaactckgatttctttcatctcacagctttttactacctcaaacgttgttcaaagattagggtaagtgatctgaatgataccatgcacatatttgtttatgttaaaagataattctttctgcaacaagttttggatattcccaataggaaaaaggggagggaggctggcaggcatagtggctcatgtctgtaatctcagcactttgggaggccgaggtggacatcaatgaacatctaggaaaacatgacattaccaaatgaactaaataagacaccaatgaccaattctagagtaacagacatatatgacagagaattaaaaatagttgttttgaggaaacacaacaaaagtcaagataacacagagaaggaattcagaatcctatcataaatgtaaccaacaaattgaaataatttttaaaaatcaagcagaaatcctgaagctgaaaaattcaactgacatactgcagagtgcatcagagtctctcaagagcagaattgatcaagcaggaagaattagtgagcttgaagacaggctgtttgaaaatagtcagaggagacaaaagaaaaaagaataaaaaagaatgaagcatgcttacaagatgtagaagatagcctcaaaacggaaaatctaagttattgaccttaaagaggaagtagagagattaggatagaaagtttactcaaagggataataataaagaactttcccaatctactgtaatatatccatagtcaagtacaagaaggttatagaacaccaggccaatttagccaaaataagactacttcaagacatttaataatcaaactcccaaatgtgaaggataatgaaaggatcctaaaagcagcaagagaaaagaaacaaataacatacaaaggagctccaatacatctggtagcagacttcccagtggaaaacttacaggccaggagagagtggcatgacatatttaaagtgctgaagaaacttttatcttggatagtaaatccagcaaaaatatccttcaaacatcaagaagaaatactttcccaggcaaacaaaagccaagggatgtcatcaataccagacctgtcctacaagaaatgttaaggggagttcttcaatctgaaagaagaggacattaacaataagaaattatctgaaggtacaaaacttattggtaatattcttaatattgtacacaaacacacagtattataacactgtaattatggtatgtaaactactcatatcttgagtagaaagacaaaaagatgaacctatcaaaaataataactacaacaactttttaagatacagacagtataataaaatataaatagaaaaaaagtttaaacgtaggggggatgaagttaaagtgtagtttttattcattttctctttgcctatttgttagtttgtttttgcaattagtgttgtcatcagtttaaaataacggcttttaagatgttttttgcaagccttatggtaatctcaaatcaaaacacctacaacagatacacaaaaatcaagaaattaaaacataccaccagagaaaatcaccttcacaaaaaggaagacaggaaggaagagaagaccccaaaacaaccagaaaacaagtaacaaaatggcagtaataagtccttacttatccataacaccattgaatgtaaatgggctaaactcgttaatcaaaacacacagagtagctgaatggattttataaaaacaagacccaatgatctgttgcctacaagaaacacacataaggacacatatagactgaaaataaagggatggaaaaagatgttccatgcaaatggaaaccaaaaaaagggtagcagtagctatacttctatcagattaaataatatcaagacaaaaatctataaaaagagatgaagtttactatataatgataggggcaatgcagcatgaggatataacagttgcaaatatatatacaccccacactggagcctcaagatatataaagcaaatattattagatctaaagagagagatagaccccaatacaataatagctggagactttaatgccccactttcagcattggacagatcatccagagagaaaatcaacaaacaaacatcagacttaatctgcaccatagaacagaagaacctaacagatatttacagaacatatcatccaatagctccagaatacacactcttctcctcagcacatggatcatgctcaatgatagaccatatgttaggttacaaaacaaatctttaaaatttcaaagaaactgaaattatatcaagtatattctctgcccacaatggaacaaaactagaaatcaataacaagagaaactttggaaactgtacaaacacatggaaattaaacaatatgttcttgaatgaccagcaggtcaatgaagaaattaagatgaaaatttaaaattttcttgaagaaatgacaatagaaacacaacataccaaaacctatgggatacagccaaaacaatactcaaaggagggtttacagcaataagcacctacatcaaaaaagcagaaaaatttcaaataaacaacctaatattgcatcttaaagaactgcaaaagcaagagcaaacaaacccaaaattagtagaagaaagaaagaataaaaatcagagcagaaataaatgaaattgaaataaaaaatgtacaaaagatcaataaaacaaaaagttggctttttgaaaagataaacaaaaccaacaaacccttaaccagactaagaaaaaaagaaagatgacccaaataaataaaatcagagatgaaaaaggagacattacacctgataccgcagaaattcaaaggatgattagagactactatgatcaactatatgccaataaattgaaaaacctagaagaaatggataagttcctagacacatacaatctacaaagattgagccatgaagaaatccaaaatgtgaatagatcaataacaagtaatgagatcaaagccgtaataataaaaaaaaaatctccgagcaaagcaaaacccaggacccaatggcttcactgctaaatcttaccaaacatttaaagaagaactaataccaatcctactcaaagtattccaaaaaacagaggaagagagaatacttccaaactcattctatgaggccagtattaccctgatatgaaaaccagacaaagacacatgaaaaaaagaaaattacaggccaatatccccaatgaacattgatgcgaaaatactcaacacaataccagcaaacaaattcagcagcacattaaaaagatcattcatcatgaccaagtgggatttatcccaagactgcatgcatggaacaacatacacaggtcaatcgatgtgatagatcatatcagcataataaaggagaaaaaccatatgatcatttcaactgatgctgaaaaagcatttgataaaattccatatcctttcatgatttgaaaaaaaaaactcaaaaactgggtataaaaggcacatgcctcaacacaataaaaagcatggctttcatgttgagatatgttccttctatacccagtttttgcatccttcaactttcatatataatatatatgtrtatatatatatatatatatatatatatatatatatatatatatawgttgatcatactaatatcatagtgaatgcggaaaaatgaaagccttttctctaagatctggaacaagacaaggatgcccactttcatcgctgttattcaacatagtactggaagtcctagctagagtaatcagacaaaagaaagaaataaaaggcattcaaaatggaaaggaagaagtgaaattatttttatttgcagataatatgatcttatacttgaaaaaaacgaaagactccaccaaaaggctattagaactgataaacaaatttagtaaagttgcagaatacaaaatcaacatacaaaaatcagtagcatttttatatgctaacagcaaacaatctgaaaaagaaatcaagaaagtaatcccatttacaatagctacaaattaaacaaaatacctaggaataaacttaaccaaggaagtgaaaaatctttacaataaaaacttttatgcaagatattgaagaggacaccaaaaaatggaaagatattccatgttcatggattagaagaatcaatattattaaaatgtccatgctacccaaagcaatctacagattcagtgcaatctctattaaagtactaatgaaattcctcacagaaatagaaaaaaaatcctaaaatttatatgggaccacaaaaggcccagaacagtcagaaccatcatgaggaaaaaaaaaaaaaaaaaaaaactggaggaatcccattacctgattttaaattatactacagagctatagcaatgaagtaacaaaaacaggatggtactgacataaaaacagacacatagaccaatggaacagaatagagaacccagaaataaatccatacagccacagtgaactcattttcaacaaagctttcaagaacatgtattgagaaagggattgtctcgtcagtaaattgtgctgggaaaactggatgttcatatgcagaagaatgaaaccagatcgctctctcaccatacacaaaaatcaaatcaaaatggattaaagacttaaatctaaaacctgaaactatgaaactactaaaagaaaacataggagaaactctccaggacattggtacgaacaaagatttcttgagtaatacttcacaggcacaggcaaccgaagcaaaaaatggacaaatggaatcacattttaaaaaatcacatcattaaaaagcttctgcatagcaaaggaaactagcaacaaagtgaagagacaatccacagaatgagagaaaatatttgcaaactatccatctgacaagggattaataaccagaatatataaggagctcaaacaattcaataggaaaaaaaatctaacaatttgatttaaaatgggcaaaagattgaatagacatttctcaaaagaatacatccaaatggcaaacagctatgtgaacaggtgctcaacatcactgatcatcagggaaacacaaatcaaaactccaatgagacatcatctcatactagttaaaatagcttttatctaaaaggcaggaaataatgaatgctggagtgttgagaaagggaaccctcgtacactgttggtgggaatgtaaattagtrcagccacttggaaaacaacatggagcttcctcagaaaactaaaaatagacagggcgcagtggctcctgcctgcaatcccagcactttgggaggccaaggcgggtggatcacctgaggtcaggagttcgagaccagcgtggccaacacaacgaaaccctgtctctactaaaaatgcaaaaaatagccgggcatggcggtgcgtgcctgtgatcccagctactcaggaggctgaggcaggagaatctcttgaacctgggaggtggaggttgcagtgagccaagatcataccactgcactccaccctgggcaacagaacgagattccatcccaaaaaagaaaaaaataatcaaaaaacaaaaagaaaactaagaatagaactaccataggatccagcaatcccactgatagggatatacctaaaagaaagtaaatcagtaaatcaaagagatgtctgcactctcatgcattgcagcactattcacaatatccaagatttggaaccgaggtgtccatcaacaaaagaataaataaaatgtggtacatatgcacaatggagtactattcagccatagaaaagaatgagattctgtcatttgcaaccacatggatggaaatggaggacattatgttaagtaaaataagccaggcacagaaagacaagctttacatgttctcactcatttgtgggagctaaaaattaaaaccatggaattcatggagatgagagtagaatgatggttactggaggctgggaagggtagaaaggggtggagggtagggacagttaaggagtacaaagatatattcagatagaatgaataagatatagtatttgatagcacaacagggtgactaaagtcaacaataatgtattaaatatttttaaaataactaaaagagtataattggattgtttgtaacaccaaaaaaatgataaatgcttgaagtgatgaacaccccatttcccctgatgtgattattacaaattgcatgcctgtatcaaaatatctcatgtaccgcatagatacatacactgctatgtacccacaaaaattaaaaataaagataaatgaataagatataaaaagcaataggggaaactgaatgaagggcatatgagaaactctttgtgtcatctttgcaacttctctgtaaatctaaaaaaaaaaatcagagtaattcactacttgtgatggttaattttatgtatcaacttgactgagccacaggtggctcagatatttagccaaacattattctaagtatgtctgtgagggtgtttctggatgagattaacatttcaatcagtagactgagcacaacagattgccctccccaatgtgggtggacctcacccaatcaactgaagacttaagtagaataaaaagattgagtaagagggaatgcctcctaccagacttgttgacctgagacattggtcttgcaggcttttgggctcagagagaaacataactcttcttaggtcttgaggctgctggcctttggatcagcagctctcctggttctccaccttgcccactgcaaatcttgggacttctcagcctccattatcacatgagccaattccttatagcaaatctatatctatctaactatctatctatctatctatctatctaatatggtttggctctgtgtccctgcccaaatctcatcttgtagccctaccagggcactgcctagtggagctgtgagaagagggccaccatcctccagatcccagaatggtagatctactgacagcttgcaccatgtgcctggaaaagctgcagacactcaacaccagcccatgaaagcagccaggagggaggctgcaccctgcaaaggggcggagctgctgaagactatgggaacctacctcttgcatccacatgacctggatgtaagacgtggactcaaaggagatcattttggagctttaagatttgactgccatgctggattttggacttgcatggggcctgtagcctctctgttttggccaatttctcccatttggaatggttgtatttacccagtgcctataccttcattgtatctaggggcagaatgatatggtttggctctgtgtccccaccaaaatctcatattgtagctcccataattcccacgtgttgtgggaggtacgcagtgggagatgattgaattatggggcaggtctttcccatgctgtttcatgatagtgaatgagtctcatgagatctgatggttttgaaaacaggagttgtcctgcacaagctctctctctttgtttgctgccatccacataaaatgtgacttgctcctccttgccttcctccaggattgtgaggcctccccagccatgtggaacagtaagtccaataaacctctttcttttgtaaattgcccagtctcaggtatgtcttcatcagcagaatgaaaatagactaattatctatctatctatctatctatctatctacctacctatctatatctatccacctatacctatatctatctatctatatctctctatctacctatcctattagttctgtttctctctgaaaaaccctaactaatacaccatattcacagaaagaaaaaaatgagaaaactcccatgattatctcaatagatgcagagaaggcatttaacaaaattaatgattaaaaactcttagaaaactaagaataaaataacacttccatgatctgaaaaagaagtctacagaaaccatcataggaattggtaaaatgttgaaagttttctccctgaaaccaagaacaagacaaagatgtccattatcaccacctctattcaatattgtattgaaggtcttagtcagtgtagaaggacaaagaatggagatgaaaggcatccacgtagaaaagaaaactataaaactgttattatttgcaaataacatgattgtgttattagaaaatccaaatgaacctaccaataaatgattttcagtaataagtgcatttagcagcattgccgtatacaaggtcaatatacaaaaatcacttgtatttctacatgccagcaacaaatgttagaaacttagaaaagcttttgaaaaacataaaacactcttaggtgaatgaatataatgaaagatgtataagacttctatgctgaaaactacaaaacactattaagggaaattaaaccctaaataaataaagaatatatactatgttaatcattgaaaggctcattatttttagatgtgaaattctccccaaaatcatttaaatatttcatataatcacatccaattcccaggagaagtcgcttttggtggaaaatgataacctaactctaaaatgtgtatgaaaatgcaaaggctgagaataaccaaggtgatcctgaagaaggaggaggcagacgatgaggatgagaaggagaaaactgaaggtaattaagacactgtgatattggtacaaaggtagaaatataaaccaacagaaaaagagtttagaaactgattcgaaaatatacaatcccctgatttatgacaaggacacaggagaacactggagatgtgagggtcttgtcagtaaatgctggtgttaattggatatatatttgggaaaaaaaaaaaaggtatcttcaccccctaactcaaatcatgtctaacaattgaggtaggaggtggtattagactctggaggtgaggctcagacaccagaccaaattgaggactagctaaaacaggtctagggccaaagcacctccacataagacacacccaccagtgtgccacgccagtgtaccattgccatggcaacaccagggatttaccacccctttccgtagcaacaacctgataacccagaagttaccgctctcatcctagaaatctctgtataaactaccccttaatttgcatataattaagcatgggtataaatatgagtgcagacctgcctctgagctgctgctctgggctcactgtctaaggggtggccctgctctgcaaggggcagtccctctgccactgctgtgcattgctgcttcaataaacgttgctggctaacaccaccagctcacccttgaattcttacctggaggaagccaggaaccccccagggctaagccccaatttgggggcttgcttatcctgtatcacaatctattctagacagattgtagatgtaaatagtaaagatgtttttagaaaagttttctcttttgttttcaattgagttagtttctgctctcatatggtttttctgtttgttttttggtggtttttgttttgttttgttttgttttgtttttgagacagggtcttgctctgttgcccaggctggagtgcgatggcacgatctcagctcactgcaactgccgcctccygggttccagtgattctcctgcctcagccacctgagtagctggggttataggagtgtgccatcgtgcccaactaacttggggtttttttttktttttgtttaagacagagtctcactctgttgcccaggctggagtgcagtggcacaatctcggctcactacaacctctgcctccagggttgaagtgattctcctgcctcagccactcgagtagctgggattacaggcgcccaccaccacacctggctaatttttttattcttagtagagacgggttttgccatgttggccaggctggtctcgaactcctgacctcaggtgatccgcccgcctcgagcctcccaaagtgctgggatcacaggcgtgagccactgcatccggccttatatgtattatgtcctgctttctgtttgctttggacttctgttgctcttcttttcctagtttcttaatgtagaagcttagatatttgatgagagacctttctttgtttctaatacagagctttaatgttctatctttaatgttctatatttaatgctgtaaatgcttaaggggaaatttatatagaagtgaagtgtcacaatgtctgaatattactttccagtgggttgtggggggaaggtacatatataaaaagagtgacagagaacgaacgtgacaaaagaaggcaaaatgttaacgtgaagaattatgagagattatttgggcatctcatttttccgtggatttggacatttttgtccagtccccagaggtgacagtgtggcctctatggctgccccgtgctctgtgaccggcgcatattcaccacgggtgagcccctcgagctgggccctggggagagagagggcggtgcccaagccaggaccctgcgggccggggctggaggaggcgcaggtcccggcgtccatgtgcagccctgcggccggggcgcgagatctccccgcaggcggccgctccccgccaggggcttccgggagcagccgaagcctgaacctggacgagccgcgaccgcagccggcggggggtgccgtcctcctcgccctccctggagcccggccctgggcccacgccgtgccccgagcctcctctgcggcccgcccccagttcccccggtccgccgcggccgggcatggggaggtgaaggcctccgtggggtgacagggggcgcggggccgcttgtccccagcgcaggaggagccgggacccgacgcgcaccctccggcctgctggaggctgagccgccgcagggaaagcacgtgggtgaagggcccagcgcggcggttccttgaaaaagcgggagcctggtctcagctggggcctggggcctgccccgcccatgcaggggtcgcgggagcaggggctcggcctccttcccaggccgtggcggcgccgccccggaggcagggacaggggcgagctcccgctgagccgcacttcctgggcgaggccgctgcaggcagcgccggaggcacgtgccccgagggcctcctcttctgccccagcttgacaggcagccctgggaggagtgagaagctgctggcgccggattcctgcccctaactcccttcaggaggaaattcatgaggcccaggccaagagaggaggcttcccggcaaaaagggaagggctgggcaggggcagcaggaaccacggcccgaggggtgagagcttctgggctctgagagcctgaccctgacttcccttggcccgtggacatgacctctccaggtcagattcctcctccgcagaatggaggggatggtactggcaggaggttgtaccgacctcgcaaggccatctcgagggctcgaggaaaggcctaccacgcatggcccgtggacagagctggtaaatattggctgtcactaagttcaaggccgcagggaacatggcagagtgacccaggtgtcagcacaggccttgtgcatgaggaagcgctaggggaagggaaggagacctctacacccactgcctgcacaccctgggacaggactccagaagtccccgcccaaatccccctccatctccccctctaacctaagccccaggtgctgtgccgtatccccagcacccagcacagtgcctggcacacagcatgactgcccacaggggcaggggctgcagagaacccgcagggatacagccgacctgcaggcccagtaacaactaggtttttaaaatccagaatgaggctctgcggttcacctggagacatgaagactgggtctggcgccacacacacacagcagggtctgtggtctccgtttccaaggcccccgaatccctggcagtccccagcccagctgcagcagggaccagcttccttagctggaccatgatccccctcgagcattagagacaggagctagttctgaagagcccgggacaggtgtagtgaagatgcctgtcccgtgaaatcctcccctttaatgaggaggctgcctaccgccggggccaaggaactgaaatggagcaagaaggggccgcaggcaattcaccaccagcagggcctgtgagtccttgagccccgcataaaaaagtatccagcttggcgcaatctaaggtgtaattgtaccatttggtcaccagagggcgctcaataatcatctttgcttttagtatcgcaaattacgcagcagaaaacttcctgcccattcagcacacgcaagccactgttgcatgtttcttgtgtcagctcaagtaattctcacaaccagccatgaagtatttgttgttgcccttacacagccgaagaatctgaggttcagagtatttgagtaatttggctgaggtcacacagcagtgactcttagaggcaggaccaagcccaggtcttgtctccagaggctgcactgtgcacccccatactgcttcctgttcgacctgtatgatactgcatgcatttaagttcatgttctagcaaaatatctccctgtataaggtgccaaacttttatttgaagtgctaggggtgcacacagtgcagcacagaggaaagtcctttgtttcgtcccaggagtttgggtctgaccctgtagcagggtgtgcttgtgccggctcacaagcagactattacagtgcagggtgtgtagtaggaccctctgggctccctcatccccaccagtgctcacatgctcctgatcaccaaggacagccgtcctggacctccccaagtcgtcatgcaggccatctgggaagggaatatgcccaggagctccgcctctgagctgttggaaatgcatgccccagggtgggctcagagagcaggcaaacayacagggtattgtccaggtgacggagggggtcctgggccctatctgggggctgctgtagggttagcagctgagaaagggcctcacagctctagccaaggagtcttccctattcacccaaatctggaagtttcatatggttctggagacccggctctgagaggaccccagctccagagggcggaggccacatttgcatcccccggctttgcaaagccctgccacatagcagtggactccatacatactcagaggtaaagagagggtgagaaagagaaagggaaggatgaagggagggaggctcagacagagggtggaaggggcaaagaccagcgagtccatctgggccccacaagtggacccagggagctggcatggggcgtggcttgtggaggagggtgagtctggacagcagcgggccacctgtttaggctttgtcccaggagtctgggtctgaccctgtagcagggtgtgcttgtgccggctcacaagcagactattacattttcaggaattttgcagatcagttgttaagcacagccattattaaagattaaattatattcaaaaacaggtaataaatactcaaaactttctaacattttactatactttattgttttctctgccgttgaggttatttctgtgtggtgcgtctgtgtagtagagcctgtgtgacgatgtgctattgatctcttccccacggcatagtcagtgacttcagattggtagtttgaaattggccatgacaggcagatttacaccatggaaattggcaaacactgccaatcggggctttttatccagagcagtcgttaaacatttacacgtagtgcactactgtccataaggggcagcatggtcagactgcacttttaaaaggtcttgagggcaggggaaccaagaggcgttcaagtaaaggagtgaagaatcagagcgtgacgtagtttagcgacttggaccaggacacgtttgaaagcctaagtaccttagaggagccactggctgacgtccagatggcagaaagaaagccaccccaaatcaggccctctcattcagtgctgaggagcacggtctagacggctggttcaacttttaaacacatgggaaaataatccccactgggacacagccccgccgccctggatcccagcctgccccagggtgtctgtctgctgcttctgccaccctgcagctgcgcaaatgtttggggaagggtcctatctggaggggcctcctttcaccgcccagatgcagcagggcaagcctgggcagctgtgttggacaccagccccacgctgcctccgttgccttcattctcagatgaggaggatgcagggaaacagggcaggggtgggggatgggggagggacagaaggcgaggactgcagttttggggcattttcaacatcattagccacgtcgagtagacggccggaggtgggtgggagaggtatttgggcattgctggcacgcacgtaggagctccacaggggccagtgtaggtaaagggaagaactgaggtcggagaggagctgagaacatgtggtgggggcatcggtggaggcaaagggccccccaaaacagctcgctccctggctggagatgctgtgccaaacagaaagaggaggaggacttcatcggaggaggccaagctagtgccacctagcagtgccctacacttaggttccaaaagcttggtgtcttgggttctcaggcaccataggccacagtgctcacatataaagggtatatggaggttaaaaaaaaaagcctctgtgaccaaacggtctcctcaccaacacacagctcacagctgagttctgccttaaatgcaatgaggtctgcctgaccccataatctcacattggccccaactggccaacaccagccaccacgaccaatccagaacctttgctagaccagctgaggctgcaggagagaggtcctggcttcagcgagaaggaaatgaaggatacatcagcccaagatatatcctaggtggaccagccaggtcacctaggccctgcctatagcccaggccggcacacgggacctgtccctcttcctgttggtcagcacagggatccaggaagcgagaagtggggaggtggggccttttatgcagtgactgtgcccaccgaccacacctgctggccacgcctactgctaaacgcagcccaaacagtgactcagcttccaccaatccaatcagcatccgttcctccatgggaggtgtttggagagggagtaggctcagagatgagctgaggtctggaagactcctctccaacaaacatctcaggggaacccaaacaccaagaggcaggagcacagctgctctggccaaagggagggcctcaagcccacttagtcttcacctcactaggagccagggcacactgcctgtgagaatgctgggagcccactcactccttaaaaccacactgtgaggccagattcactacccttcttgtacagaagaagagactgaggttcagagaggcccactatacacccaatggcacacagctgttgggtagcagcctcactggcctccttcactgggcttgtccccctccagtgactgcctggttagggacaccaggcatgaggctaggacaggcaccccatggatcagctccacctgcctctcaatggctcacccaaaaagataccagtaactcaaaggaagggggtgctgtggtctgaatgtgttcccccaacatttatgtgttgaaatcctaactcccaggcgatggtattaagaggaaattggtaccaagtgggggtgctactgtaacaagtacctaaaaatgtggaagcagctttggaactggaagagtttgggggtacctgccagaaaacgcctacattgccatgaatgaaccattaagggtgattctggggagggctcagaaagacaagagacttggaatcccacagaccatgttccccggggccgcctgtccacccccctcactcaaccaccgggccatccagtgctggggatgaggaaacagccgggcccctgcctgcctgtggaggccccatctggtcatctgctgtcacccatgacgaagtgcaaggaggtctatgtttgaatgtcccagaggccagcccagccactccactgagaatttcacccctcccaggcgtcacctcccttcccagcttcatgtagctccaggacacaggaaacagcattcctcctttaccctgttgcctccaccctccaccacaacacagacaccaggcaggctctttccagcactgtgttccctgcagaaccccctgccacagacccacactcattccctgaagggagggaggcaggcagaagggtggcaggaggacccccctgcacagagctgctgccccagctgcacggccagagaaggggggcagccagtgtggggaggggtggcagtcaaaggagtgccacaggggagcagcagctggggctgggtctagacactcaacagaggttgactggaagcttccactgtggctaagggacagccactcctgccttgtcccctcacaggtcaagtcctcagaggaaacacagaggacagaactcagcacttcccaactgcaatctcaccccacccagcgagatctcaccccacccagcgagatctcacccgacccaccgatatctcaccccacccaccgagatctcaccccaccgagatctcaccccaccgagatctcaccccacccaccatcatctctccccacccaccgtcatctcaccccacccaccgtcatctctccccacccaccgtcatctcaccccacccaccgtcatctcaccccacccaccatctctccccccccaccgtcatctcccccccacccaccatctctccccacccaccgtcatctctccccacccaccgtcatctctccccacccaccgtcatctcaccccacccactgtcatctcaccccaccgagatctcaccccacccactgtcatctcaccccacccactgtcatctcaccccacccaccgagatctcaccccacccaccatcatctctccccacccaccgtcatctcatcccacccaccgtcatctctccccacccaccgtcatctcatcccacccaccgtcatctctccccacccaccgtcatctcatcccacccaccgtcatctctccccacccactgtcatctctccccacccaccgtcatctcaccccacccaccgtcatctcaccccacccactgtcatctctccccacccactgagatctcaccccacccgccgtcatctcaccccacccactgtcatctctccccacccaccaagatctcaccccacccaccgagatctcaccccacccaccgtcatttctccccacccactgtcatctctcccgacccaccgtcatctcaccccacccaccgtcatctcatcccacccaccgtcatctcaccccaccgtcatctcaccccacccaccgtcatctcaccccactgtcatctcaccccacccaccatcatctcaccccacccaccgtcatctcaccccacccaccgtcatctctccccacccaccgtcatctcaccccacccaccgtcatctctccccacccaccaagatctcaccccacccaccgtcatctctccccaccgtcatctcaccccacccaccgtcatctcaccccacccaccgtcatctctccccacccaccgagatctcaccccacccaccgtcatctcaccccacccaccgtcatctcaccccacccaccgtcatctccccccacccactgtcatctctccccacccactgtcatctcaccccaccgagatctctccccacccaccgtcatctctcccaacccactgtcatctcaccccacccactgtcatctcacccgagatctcaccccacccaccgtcatctccccccacccaccgtcatctccccccacccactgtcatctctcccaacccactgtcatctcacccgagatctcaccccacccactgtcatctcaccccacccactgtcatctcaccccacccactgtcatctctccccaccgtcatctcaccccacccgctgtcatctcaccccacccactgtcatctctccccacccactgtcatctcaccccacccactgtcatctctccccacccactgtcatctcaccccacccactgtcatctcaccccacccaccgtcatctctccggacccaccgtcatctctccccacccaccgtcatctcatcccacccaccgtcatctctccccacccaccgtcatctccccccacccaccgtcatctccccccacccactgtcatctctccccacccaccgtcatctcaccccacccaccgtcatctcaccccacccaccgtcatctcaccccacccactgtcatcccaccccacccactgtcatctcacccgagatctcaccccacccactgtcatctcaccccacccgctgtcatctcaccccacccaccgtcatctcaccccacccactgtcatctcaccccaccgagatctcaccccacccaccgtcatctctccccacccactgtcatctcaccccacccactgagatctcacccaagtataatcttgcagcaccgcttttctttctaatgtcttgacaagcaggtgagaagatgctgagtgttcttggtccattgctgtggctacaaaggctggttctagtgtctcactggctgtctcctgctcaagcatggttttagcagttcccttcttatcccgggccatactagacctactgtcttccctggcttgcactatgctatggtttgaatgtttgtctccttcctcatgttgaaatttaacccccaatgtggcagtattgggaggtggggcctttaagaggtgattatgtcatatgtccccttccctcatgagtagattactccattcagcgagtaatgggctaatggatgttcttgggagtaggacttgtggctctataacaaggagagagaactgagcttgcacactcagcccctcatcttgtgatgccctgggctgccttgggactttgcagaaagtccctgctagcatgaaggccctcaccagatgcagcctctcaaccttggacttcccagccttcaggactgtaagaaataaatcttgtttctttattaattacccagtttcaggtattctgttataagccacagtaaatggactaagacaggctgtggtaacaaactaccattaaatgggtggcttaaataacagatttatttcttagagttctagggtctggggagtccaagatcaaggtgctggtagatcccctgtctgatacgagctcacttccaggtttgtagatagccaccttctcattgtgtcctacatggcagacagcagacagaggaggagcaaactccactgtctcttcgtataagggcactaatcccattcatgagggccacaccctcatgacctaattacatcccaaaggcccacctctgaatatccttgtgttgaaggttaggaattcaacacatgaatttgggggagacaaacgtttagtccataacacctataacaaccaagacacagctaccagccacatgtggctactgagccagtatgaattgggatgggctataaaatgcaaaatatacactgaaatgtaatgattctgtataaaggctgggtacagtggcttaggcctataatcccaacaatttgggaggctgaggtgggaagatcccttgagaccagcctgggcaacataggaagaccccatttctagaaaaaaatttcccagtctgggcaacatagagagaacttgtctctgtagaaatttttaaaaattagccaggcatggtgcaggcacctgtagtcccatctacccaggaggctgaggtggaaggataccctgagcctgggaggtcgaggcttcagtaagctatgatcatgccactgcactccagcctgggttacagagtgagcctcttctcaatttaaaaaaaaaaaaaaaaaaaaagatttagtaggaaaaaaggatgaaggcaaaatatctcattaataagttttattttgatggcatgttgcgatgataatattttgagcatatcttggactacattaaatatattactaaaatcaatgtcatctttttctttttacttttgaaatgtgggcactaagaattttttaacacctacgtggttcgcacttgtggctcacatgacatccctattgggcagagctagtccagaggattctgagcctttggcgccagtgcttggatcatctgagttgtaggcgccctcccctcatgcgtgcacaagcagtgaagatcttgatctcactcttgggtcgatgagttaaatgtgtgtgatactacagagggaggcaggcagcccaggtgttgcagggctgtgagtggaagcttcgggggcatctgcttctctgtcttgcaggtcttcaagtgattgtccgggaaagtctggggagaggtggggatactgcagttgcaaaccccagtgctggaggtggggcctggtgggaggtgactggatcttggggcggtttctcatggtttaacaccacccaccttggtgctcctgcttggcctcagccataagtcaaagatccccaaggcctccccagaggcagatgctgccatgcttcctgtatagcctgtggaaccacgagccaatgacacctgcttcctttataaattacccagtctcaggtatttctttatagcagtgcaagaacggactacagcactccagtgccggcctctctccaagggcagctccacttccagcctccactcttgggtcatctgggacctgtggacattcaccccaagcgaagccaagagtcccctttgggatgaataaatccaatggctgaccaggtggtgacctccaggcctggcaaagctgcctcccacgaagccctatctccatattgaggattgcaattccacatgagatttgggcggagacaaagatccaaaccatatcatgggtcagaaacctgagtatggaacaggacgtggccagtgagggccggtggggggcagcatggagagtcacactggtgagaactcatcaaggtctgtccactgggtctgagcaacaccccctgacctgcctgccccaccccaagccaagacgccaactggaggctgcatcccctccactgctggctgcagtgttgaagattgggaggctctccctcttccgcaggcatagaatttcaaattgacacagactgcagtggaaccgctgacccagcactaacctcacccatcccagcccctcggcaggcctgccagcgggtagcttcctgccccagtcacccctgcaggacaccagctctccattcctctggcacccgtgtcaacctctcgttcccacagtggctgccttggctcatgccttcacatgtttctcccttgcactctcccaggcccctgacccatctctgcacctctcagctctcctgccgctgcacctgcccacattcccgagtcagagccccctgctgcgcaccgccacctgggcagcctctcaacaggagagtttaaccgacacccagctctgggtgcactcctcagcagagccacccttggctcccagaatgcccaccctgtgacccctcttcggctggactgcaaggagtctctgtgccaacaaggaaaaggcgcccctgctggctgcaggacatgggctgtggagggaagtgtctgacccagacagtgcccagttgtaattatctcataacccgcagtctttacttgtctgacttcctttttagaccatgggaactgccagggcagatccctagacgctcaataaatgcatctttayttagaatgcacaggtgcagttatccagcgggcgcagtggaagtggggatgcaggaggtgcctgtgaatgggcagccggggagattctaatgtgggcagagagcggagaggacctgggaaggaagggaggggccgcggcactgggagtcacaggccaggctgtcgctttgagggtctgcacagagggcaggaccagaggagaccaccctgggactgcacagagccggcttgagggtccagccccttaaagacaatcctctagaggctgcagagtttcctcgagctgccataacaaagctcacaggctgtgtcccccagccacccttcacccgccgattcctgtgttgaagccctaacccccagtacctcagaatgtggctgcatttggagactgggcctttaaaaaggtgattgagttaaattgaggcccttaggttggccctaatccaacccggctgacatcctttaaaaaaaaaaaaaaaaaagaggtgattcagacacacaaagagccaccagggatgtgtgagtgcataaaaatagagcatgtgagggtgcagcgagcaggcggccgcctgcagaccaaggagagaggcctccagagaaatcagctctgccggcatctttgtctcagacttctgacctccagaaccgtgagaggacacatttctgtggttgaagccctgcgtctgtgagatttgttacagcagcccttgctggctaatatcatggcttggactagacacgaccccttcacagttttggaggtcagaagtctgagaccacggtgcaggcagggctgtgctccctctgagggcgctaggaagggcctgttcctggcctccctcagagcttctgctggttccttggcttggggcagcagaactccaatccacacgtggccctctccctgtgtgcgtgtctgtgtccaaatttccccttttggataaagacatcggtcaggtggactaggacccaccctaatgaccacatcttcacttcaatacatctgcaatgaccctgtatccaaataagttcacattctgagacgctgggagttacgactccaacacatggattttggcagacacaattcaacctgttacagactggatttctcagagaaattccggtgctgaatmactggcctccaatgcgaccacattcgaagatagggccatcagggaggtagctaaggttatgaggccacgagggtgggccctcaagccaatagggttggagtccttataccaagaggaaagacaccagagaccaccccctctctaagtgtgcacagggaagaggccatgggaggatgccgtgagaaggtgacacccgccggccaggaagagaggccttcccagaaaccaaccccacgagcgccctgatgtggacttccagcctccaaaactgtgagaaacaagtttctgctgtttaagccacccagtctgtggcacttcttatggcagcctaagcagaagaaaatgccacccagagccttatctattaaatcgtttggttgcaaatgacagaaacttaaattaaaccactttaaccagaggaaaatttctagctgggcatggtggctcacacctgtaatcccagcactctgggaggccgaggtgggcagatcccttgagctcaggagttcgagaccagctttggcaacatggtgaaacccctgtctgtacaaaaaataccaaaaaatagcttggtgtgctggcacatgcctatagtctcagctactcgggaggctgaggtaaggggattgcttgagccttggaggttgaggctggagccaagattgtggcagagtgagaccttgtgtcaataaaaaggaaaggaaaggagaggggaggagaggggaggagaggggagaggaggagaggggaggggagggaaggggaagggaggggaggagggggagggcaggggagcagggaaggagaaggaaggggaagggaggggaggagaagggaggggaggggagggacctaaggaggcatgtcacctgaatgtcacgtggagtcctgagtagaatcgtggaacaggaagacgacattagggaaaaactaagggaatctgaataaaaggtggatttaatatgtcaaaaatggtgctataatggtgacaaatgtaccatatgctgtgaggggaggggaggggaggggaggggagtaggaaggattcttagctcaagaactgaataggccaagcatagatctgggcgcagcagtctccagggctcttcgggccccacgtctgtctgtttctacgaatgcctctcccagcggccctttcctccctgggttctgtcctggagtgactctccagctgtgtgcctgtccgctcaacaacttccatagacaggaagcactccctccagaagctcagggctgtgttgagagactcacagaggccaagcagcagcttacacaggacacagtgacaagaggacacagtgacaatgagacacaggacacaggacacagtgacgacaggacacagtgacaacagggcacaggacacagagatgatgggacacaggacacagggatgacgggacacaggacacagtggatcacaggggccagacatgaaacagggaactcagaaggaacccacagagatgacgaaggacccaggaggcccctgaaggagctctcaacggcctaggctgggacaattggagccacaaaataaaacagtactgggttatgacccaaagcagaaaacaaatgtccttgagtctgtggggatacagatcaatgactggataaacacctgaagaggggagaggaggtgaatctcccgcagaagaattccacctaatgtatgcagaaacacctccctcaaggaggagcagcagaactcccagctcgggagcgtgggctgcactgacagacgcatcccaagaggacagcacaggggcaggccagggggaggagctccgtttttattttcaggggaaaccctatgaacatgatctccgccaggtggtcaaggccagaatcaacagggataagtggcgttgatggcacggacccttgaccttgatgtgatgaaatggcctcccataaccccagtctaaccatgagaacatcagacaaatcccaactgagggacatcttacaaagcactcggccacttatcctcaaaactgtcacattcaaactgtcaccgtcragaggagcctagggaggcatgtcacctgaatgtcacgtggggtcctgagtggaatcgtggaacaggaagaggacattagggaaaaactaagggaatgtgaataaagtgtggacttaaggtgtcaataacggtgccgtaatggtgacagctgtaccacatgctgcgagatgttcgcaatcagggaggtcatgtgagaggtacggaacgctctgtactagcttcacaatgattctgtgcctctagagccgtcctaaaagaaaacgtttatttaacagtatcaattttttttaaagagggggccagttggggccgaaaaggaatgttggatactcaagaaatatggatctattaaacctcacatcaaaatacattctgaattccagatggatgtaagatccaaacatatatatttttagcccaggcgcagtggctcacgcttataatcccagcactttgggaggctgaggcaggtggatggcttgagcccaagaattcgagaccagcctaggcaacacgataagattctgtctctaccaaaaaataaaaaataatgctaataattagccaggcatggtggtgtgtgactattgtcccagctacttgggaggctgaggtgggaggatcacttgagaccaggaggtggagggtgcagtgagccgagatcacaccactgcactccagcctgggcgacagagtgagaccctgaccctatctctttctttctgtctcttctctctctctctgcagatacatagatagatagatagatagatagatagatagatagatagatagacagacagacagagacacacacacatatatggagatatatatataaataatatattatatgtttatatataaatatatttatttatatatatattatatatataatatatatattatatatatataatatatatataatatatatatattatatatatataatatatatatatgaaatcatgaaggcttcatggcaggaaaatagggtctggaggcagggaacagaaggccgattcacasttcagctatgacaggaaacaccctctccatagggcatacgccttaaatgactgtgtaactttactttgatctctccatttacatcaggaatacccaaagtaaccagtgcaatcctctagggggtatttaaactcccaaaaattctgtaacttggcccttgagcccctackctcaggcctgcccccacactgtggagggttcttccgttttcagtaaatcccttccttccttccctgctttgtttgtgcgttttgtccacttctttgttcaagacaccaagaacctggacaccttctaccggtaataaaggtactaaagagaaaatggaggtaaatacttatataatcttaaaataaagaagctggctgggcacagtggctcacgcctataatcccaacactttgggaggctgcagcagaaggatcacttgagcccaggagtttgagagcagcctgggcaacataatgagaccgtgtctctacaaaaataaaataaaataaaaataaagaagttctttctacatatcactccaaagacaaaaaccacaaaagatagctttaactacagaaaatacaatactatacatatggccaataagaaaaataagatagacactaataaaaatagcaaataattatctcatactcgctgtattccaggccctgttataagtactgtattaactcatttaattcccacaacaaacctacaaggtactgcaaaggctctggtaggtgaagcaatgcacccaaagctacagagctaggaagcggtggggcagtgtggctacgcctgtgccctgaaccacaaaagtaacaggcacacggctgactggggaaaacgtgagaacattttgtgaaccatatccgaaaagcaaagattatatctttatgacggtaatatatatatgcactcttaccaataagaaaaagacaaacatctcagtagaaaaacaggcaaaggaagtcattcgcaaaggcaatccacaaaggaagtcattcagtcaatgcttgtaaaaaaawaaaaaaaaaagttcaacctcaacagttaacaaagagatgcaaattaaaacggacatcttcccaccccatcaagctgactcatgccaaagaaatcagtctccggtcgccagtctacgtaaagcgagcctggcacgttgggttcttagggaggtaccacaggatgtttacgaggggcttgcctcggcatcggtggaaggaggagagagaagcaggattggwcgagggagaaggcaaacttccatgcagacccagtgatagccccaaagaccaaacagtagcctccaagctagagtggccccgggagaccttcctgactcgggcagaggtggtccccacattgaggagtcgtwgaatgcagttgcccaggaagagtcccggctttggacagggtggctctttgcagctgaacagtctctgaagggactgagagttgaaggcaccccaagcagctggggtaacaagtccttcccggaagggggatctaggtggctcatcacagtgaagacatacaaaaatgtttattaaaagccagaggcatggtggctcatgcctgttatcccagcactttgggaggctgaggaaggaggatcaattgagcccaggagttcaagaccagcctggacaacatggtgaaaccctgtctctacaaaagaaaaaaatttaaaaattaaaattaaaattaaaagtcactaacattaaagaaatgcaaatcaaaactacaatgagataccagctcacatccattaagatgtaccataaaaaaaaaaaaaaaaaacacagaaaataagtgttggggaagatgaggagaaattggaccccttgtacactgttggtgggaattacagaggtgcagctgctgtagaaacaatatgggtgtaaggattaataccgagtgtcagcctgattggaatgaaggatggaaagtattgatcctgggtgtgtctgtgagggtgtcggcaaaggagattaactttgagtcagggggttggtagcggcaggcccacccttaatctgggtgggcaccatctaatcagctgccagagaggccagaatataaagcaggcagaagaatgtgaaaagactagactggcccagcctcccagcctgcatctttctgctgtgctggatgcttcctgacctcgaacatcggaatccaagttcctcagctttgggactcgggctggcttccttgctcctcagcttgagacggcctatcgtgggaccttgtgattgtgtgagttaatgctccttaataaactatcccatatatatatatatgtcccatatatatatataaactatatatgtatatataactatatatgtatatatacamacatatatgtatatgtatatataactatatgtgtatataaactatatataaactatatatatgtcccatatacatacatataaactatcctatatatatatcccatatatatatcctatatatatcctatatatatatcctctatatatatcttctatatatatcctctctatatatatcctctatatatatcctctatatatatcctctatatatatatatcctctatatacatatcctctatatatatatatcctctatatacatatcctctatatatatatatcctctatatacatatcctctatatatatatctcctctatatatatcctctatatatatatcctctatatatatatcctctatatatatatatcctctatatatatatcctctatatatatatcctctatatatatatatcctgtatatatatatatcctttatatatatcctctctctatatatatatcctctatatatatatcctctatatatatatatatcctctatatatatatatatcctctatatatatatcctctatatatatatcctctatatatatatcctctatatatcctctacatatatcctatatattctatatatatatcctacatatatcctatatatatatcctacatatatctcctacatatctcctatatatatatctcctatctatatatatctcctattttatgtcctatatatatatctcctatctatatgtcctatatatatatatctcctatccatatatatcctgtatatatctcctatccatatatatcctgtatatatctcctatccatatatatcctgtatatatctcctatccatataccctgtatatctgctatccatatataccctatatatatcctctacatatataccctatatatatgtcctctacatatataccctatatatatgtcctctacatatataccctatatatatgtcctctacatatataccctatatatatgtcctctacatatataccctatatatatgtcctctatatatataccctatatatctgtcctatatatgtcctatatatatctgtcctatatatatgtcctatatatatcctatatatatgtcctatatatatatcctatgtatatgtcctatatataccctatatatgtgtcctatatataccctatatatgtgtcctatatataccctatatatgtgtcctatatataccctatatatgtgtcctatatatataccctatatatgtgtcctatatatataccctatatatgtgtcctatatatatatcctatatatatatgtcctatatatatatcctatatatatgtcctatatatatatcctatatatatgtcctatatatatatcctatatatatgtcctatatatatcctatatatatatgtcctatatatatcctatatatacatgtcctatatatatatcctatatatacatgtcctatatatatcctatatatacatgtcctatatatatcctatatatatgtcctatatatatatcctatatatatatgtcctatatatatcctatatatatgtcctatatatatcctatatatgtcctatatatatatcctatatatatatgtcctatatatatatcctatatatatatgtcctatatatatatcctatatatatatgtcctatatatatatcctatatatatatgtcctatatatatatcctatatatatatgkcctatatatatatcctatatatatatgtcctatatatatatgtcctattagttctgtccctctagagaaccctgactaatacaataggtatccctccaaaaattaaaaatagaatttctataagatccagcaattccacttctgagtatataccctaaagaattaaaagcaggcagtcaaagagatatttgcacacccatgttcataacaacagcattaacaatagctaaaacatggaagcagcccaaagtgtctgtgggtggatgagtggatacgtgaaaagtagcccatccagacaaaggaatatcactcaggcttaaaaaaggacatgtggctcacaacagtaatcccagcactttgggaggctgaggcaggtagatcatgaggtcagcagtttgagaccagcctggccaacatggtgaaaccccatctctactaaaaaaaaaatacaaaagttagccggatatggtggcgggcacctgtaatcccagctacttgggaggctgaggcagaagaatcatttgaactcgggaggcggaggttgcagtgagccccaagattgcgccaccgcactccagcctggcaacagagtgagactccatctcaaaaaaaaaaaaaaaagaagaagaagaactttatgcaatctgctacagtatgggcgaacttggggacactgtgtcacaaaaagacaaatactagatgattccccttacatgaggcacccagagtagtcaaaaatatagagacagaagggagaatggtggggaccaggagctgggaggggcaatggggagttagcatttaacgggtatggaatttccactttgcaagatgaaaagagttaacggagatggctggtgatgtttgcacattacaaactgtaggcttaaaaagggttacgatggtaaatgttttgttatgtatattttaccacaacaaaaaaaaaattgaaaaaaagcagtcattgtgatatgcagcctatttctgcagactccctgacaggggtcaaatgggggttaaaaggccggacatggtggctcacgcctgtaatcccaacactttgggaggctcaggcaggtggattgattgagctcaaaagtttgcgatcagcctaagtaacacagcaagaccccgactcacaaaaacatttttaaaattagccaggcatgatggcgtgcacctgtgatcccagatatttggaagctgagtcgggagaatcactggagccagggaggtcaaggctgcagtgagccgtgatcgtgccacggcactccagcctgggcaacaaagcaagacactgtctgaaaaaaagaaagggcgttagagctctgagtaattctgacaagatctccatgcctccctcccccaactcacaccctcagctctcacatccctccccctgtctgctgtggagacctccaggacctatcccatggtgccctatacccagctatctgctacaggaactggcttgcaccagcttgcaagagcccattgttaaatgtttaaatattccacaagcctgctgttaaaccactggtagcttgaaatgagccatggtgggagtatttacaccatggaaagtgtcaaaggctacacgtcaggccaaagagtgcgagtgcactctaacagcctcagggcacagctgcaaacgctgttctcctcattcgccaaagacccaggacacccaggtcgtcacttcaccccaggtcgtacttcaccccaggccctaacccctgtaaggccattctcacctgctaatccaaccccacctccaggcctccttactcccaaaaccctcactgtttcctctggagcttgagacacgccgggagccacagctcctccttcccacagcttctctccacctgcttgctctgactggaacccgggcccctggagcatcctccgttgcagttacttccagatcaacccccaccttccccaaacccgccagccttgaagctggtgccatcacactatgctctgtgccgcctgtcctgtctggttctctgcagaccctagtcccctccgtcttgttcctacgcgactcctactcccggttcactgtcactcttgctaaatccctgtcctaattcttggcgatttaaatctccacggagatgatcctcctccttccctgacctttgctcctccaatgatcttgccttctacccgtgctcggccacctctcccacgctccttctctagatccctacgtgccatccaacagagtggccacaaamccctcaaaawgagcctggtccaaagtgagaggcactgtctgtgtaaatcacatgcgaggtttcaaagtcgtagtgtgggaaaaaatgtaaaatacttcactaataattctgaatgttgattacatgttgaggtgacatttgggatgcatttgggttaaatagaatataattgtaccttctttacctcatgtcccactccccttcttcccatgtggactccatagtccattgtgccacccctctctcctgtgcaccttcagccccctcacctttctctcatttcctcatactcgcctgggaaaaacctccaacctgctcaattacaacacagtgccagcacctgttaagctgaacgaggttgaaggaaaacacgcaaagattctgaccctccactcaggttttggcttcccccatttcagcagcgctccaccaccaccaccaattgttgatttgtcctccctattggagccaacccatcatctcccattataataattcattcattaaaaaaattaaaacttgatctctgatatggtttggctgtgtccccaaccacatctcatcttgaattgtggttaccataattcccacttgtcatgggagggacccggtgggaggtaattgaatcatgggggtggttacccccatgctactgttctcatgatagtgagtgagttcccacgagatctgatggttcaataaggggctttccccctttttgctcggtacttctccttgctgctgccatatgaagatatgaagaaggacatatttgcttccccttctgccatgactgtaagtttcctgaggcctccccagccatgctgaactgtcagtcaattaaacctctttcctttgtaaattacccagtctcgggtatgtctttattggcaacgtgagaacggactaataaaatctctctctccctttctgctctcctttatagcaagactctttggaagtatccatctgggccagagtgcagtggcatactcacagctcactgcagcctcgatctcctgagcccaagcaattctcgcacctcagcctcttagtagctgggactacaggtgtgcaccaccactccccgctaatttgtaaaaattttttgtaggccgggcgcaatgtctcatccctgtaattgcagcactttgggaggccgaggtgggcggatcacctgaggtcaggagttggagaccagcctggccaacatggtgaaaccttgtctctagtaaaatacaaaaaattagccaggtgtgttggcgggcacctgtaatcccagctactcaggaggctgaatgaagagaattgcttgaacctgggaggtggaggttgcagtgagctgaggttgcaccactgcactccaccctgggctacagagcgagactctgtcaaaaaaaaaaaaaattaaaaaaaaaatttgtagagacagagtcttgctatgtttcccaggttgctctggaactcttggcctcaagcaatccctacctcaacttcccaaagtgctgagcttataggtgtgagcccctgcacccagctggaagtatctattcttattatcttcaatttttctcctcccattttctcttgaaccttttcaatcagtatttgcctcctaccaccacattgaagccctccagtggcttccctatttcatttgggataaaatccaaagtcttggccaggtgcggtggctcatgcctgtaatcccaacactttgggaggccaaggtgggcagatcacttaagctcaggagttcaagaccagcctgggcaacatggtgaaaccccatctctacaaaaagtacaaaaattagccatgtgtaggggcgcatggctgtaatcccaactacttgaggtgctgaggcaggaggattgcgtgaacttgggaggtcgaggctgtagtgagccaagatcatgccactgcactccagcatgggtgacagagcgagaccttgtctcaaaaaagaaaaataaagccagagtcttcgcagtgcccacaagaccctacgtgacctgatctcccatgactcattgctcctcgacagccaccactccgttccatggagtagcccaggccaactgctctgcagccaaactcagggaaacttggagaacatgtgtggaccagaggaccccttcctcctggctaccaaaagaacccccaaatcctgcagcccaccagctgtgtgcccagacacaatctggagtagaggagtagacagtggcagccatcagaagccccactggccaaacacttcagcctcagaatgctgagctgctcaaagaactggttaaatgtttgtattagaccaaggttactagaatggatgtttctccccattgtattacccagcagagagtacctttcaagaaagatcagattaattaagtaggaaaatgaagacactctattttctttgcacatctgatgtattgtgagtgattttgtgaccctgctacgtgcacgcatatgcacagaaaaaaaatatcttagaatgtagaccaaaatattaacagtggttatggatgagtgatggatgagtgaactaactatagatttggaaggatattgtctgttttaaaagaaaatgaacactttcactcccaaacaagacggaatgtagagactggatttcctctcctgcctgaaaaagtcaaaataaattggaccaaatatataaaacaagagttctcaagacactggatgatatggttttgctatgtccccacccaaatctcatcttgaattgtagctcccataattcccatgtgttgtgggagggacctggtgggagatatttgaatcatgggggtggtttcccccatactgttctcgtggtagtgaacaagtctcacgagatctgatggttttataaggggtttccctctccacttggttccattctctcttgtccaccaccatataagatgtgcctttcaccttctgccatgattgtaaggcttccccaggcccgtggaactgtgagtccattaaacctattaaacctgtttttccttataatttacccagtctcgggtatgtctttatcagcagcatgaggacagactaatacactggatatcaggtaactaggcacaatgatttctgagaatgtggaaaataaagtgagcctgcaattaacccagcttcctttcttgagagggtttccaagctacagtatggacaagggtacccaggtggggcctggcaggctcttcgagttgggaagacagagctgagagtccagggagactctggtcacaggtaggggcaggggggtgatgctgagagcccctggggcatgcctgccctctacaaagctcgtggttgaatgcagggaggtggtctgggggtggacttgggcaatggggaggctgcatgggttagagccaagctctcccctcttccagtctgtctgggcctctgcagctcccggtaactttgcactgattccagagacagtgattgctcaggtacccaggtctgggtgtaattaaaaaaaaaacaaaacaacaacaacaacaacaacaacaacaaaaaaccaaacctggctcttggtgctttcagagatggctcagagcaggaattctctagctttggggtgcatcctcagaggtgggggggggcttgctgaaaagacaggtgtatggtcccacctcaggcctgctgaacagaagctctggagcaggctcaggagtttcttttctaacaggctccccgagagatcctagcaaatgtttgcacaacactcacttggaagctatgtgaccaaaaccatgatcacagggttgtccctgaacacggtggggaaataacctctcccttaaatctcccctgcgtggtgacttagrggaggagccggaagagagcagtgcttcacaataaaaggaagaattgcttgaacggaggcgtttcaggcatgagtcacaggccgggtgtggaagaggaaagtgtgaagcaaggtaggcttcccagcacccctccatgcacagcaggggctggccagcctcagccaggccagatggagccctggagggtggggctggctgcccagctagagtgtctccttttacttccagcaggaaaaaaaggcctcctgtcaatagcagaatcatctacgttttccctgccttcctcacttaaatgctttcgaggagtgggaggaagaaattggaggctggaatgaataccctttgccctcctctgaaagcagcctgggaggggtgacggggtgtaggagcagagacttcaagtggcccccacctgccaaaccattctcagggacaggtaccagctgggawgttggcagcagccgctcccctgcaaggagaacctcccacttcctgtcccgcacacctgcctcattggaaagtgacgcacccactgtttggcctcggcagcctgatgtttctcatcacacaggaagacggtcatgctacaggaagacctcggactttgcatccagcagatgtgagttcaaattccagctttgtaatttgcaagctcagaggtggatttgctgggaagctaaacaagcttacctgcagagcccccagcttgcatgggcccctcccaagaccttaacctcattttgtattcataattttgtagtcttttcccttcaaaaggcagcccaaatttaaaagcattaagccccacaagacctgagtccacctaggaggtgggagatatcccttgcagcatgagaataataattaccacctcgtagggttgttctagagattgtcagacygagaccacgccacacacccagaaggcacccaagtcacagagcctgatattgttcctggagcgccattgcatcatccttgaccacaagatctgcgtcattggatttgtctcaaaaacttgggactctggagataaaacctcattgcaaggctacctttgccactgtatcttagcagcttttgaagcaaagcatttcaatatttagacactgtgtttctaatgggtactgggatcaaaataataaaaactcagtctgcaaagggagaagaatagaaaccagcagatttattatttcacagaatgttcctctcctctcaggtaaacatgcctaataatatctgcttaactaatgagcacccgcattgtcagtggggccttgactctgacgacgtaatgcatttctgtgccattgcaccccccacccatctcggagagcatctgaaaattaagtggggcagatgtaattatgcatctaatatgcaaggtacatgtgcatgtagaagtgtgcattgtgtaaacaactgtatcaaatcaactgcatgtatctgcttggctcacgtcctacaagcacaattttcattttattccagttacttcttttttttttttttttttacagagtctcactgtgttgcccgggctggagtgcagcagcgccatattggctcactgcaacctccgcctctcaggttcaagcaattctcatgcctcagcctcccaagtagctggaattacaggcatgcgccaccacacccagctaatttttgtacttttagtagaggtggggtttcaccatgcgttggctggtctcaaactcctcacttcaggtgatctgcccaccttggcctcccaaagtcctgggattacaggcatcagccaccatgcccggccttccagttacttcttgctggctaataaatcaccccagaaccaagtggcttaagacagccatgagtgttttgtaacaagcattggatgactatttcccccagccctggggactaactaggctcagcttatctgggtctttcatccagttgcagtcagtggcttgtgtttgagtcatctgaaggcttcctcactcacacagctggcattggtgttgcctgttggctgggatcccagctgggagtgctggcctctgtgtgtggactgggcttcctcctagcatggcggctgtgttctgaggcccagcgtcctgagagaggtgggcagaaggtgtattgccttttacggcctagtcttgtcagtcgtgtaagttttaccaaactcacaggccagcctggtttcaaggaagggaacatagtcctacctctcaacaggaggactatcattgccacattgtaaaaaagagcatgcaggatgggaggccttattttggccaccttggaaagtgaaacctgccacacataccttccaagtatgaatagtaaatcattgtgttttccttaaacttcatctctaaggaggcctgctggatgattatttgtgaatctagtggtcatcactgtctgtgttatgaacttacaattaatgagcatgcattttcttggacgataataatccataattctgacttcttactattcagattaatcttcttcccactttcccggtaagagtgactttgctgtatttcggggcagattcatcctccaagttacccttgctgctcctgaagctgagcagattagctccccagaaaatagcattttcccagaggtgcaggttgattttctcacgtccctctttccgcatgggaaacagactgcagttgagattcacatgcagcagccttgggctatttcgttgagaatcaaatccgcagagatgtggcatgaaaggaaagaaggcgagtgcacagcatgctctgggctttcaggtcactcagtgctcctcggagccgcaccagacacagaagacaacacaggctccacctgggggacaggttccacacggtgtggcccagcgtgacagtgagggttcctcccataaccagcacggggctctatgtaaggccattccctcccaaaggaaactcttgcgagatcatttttaaggctagtttctagtcttctagcaaccgggctgggttagaattcatgcatttttttagacttccatcctcagcactgaaggcccacttctgagtgtgctccaagctgtgcccagggcagggagatgattcagacacagctgtgccctccacaggtcacaggtgggtggagaagagtcatccctgcccacagggacagttggtaacagggaaaagggaagaacagggctaagggaacccaggaaaagcccgagtcaggtgttagagaagcaagcagccagagtgggctgaggcggggggacgcggggggacgcaaggggacgtggggtgacgggaggcctccagcaggggtgcagctgtggaaacccaaggagcgctgcaagcaacgtaactaaggctgggcggggaggggaagagatgaagctgaagtcagtggaaaccagatggccaagggcctggagagccgagccaggggtggaacttcatcctgagggccgtggcgagctactaaagggatttcaggagggcagtaataccataagattttggagttttcattttttgtttttttttggtttcgggtttttttttctgacatggagtcttgctctgtcacccaggctggagtgcagtggcgcaatctcggctcactgcaacctttacctcccaggttcaagcaagcctcctgcctcagcctcttgtgtagctgggactacaggcgcccaccaccatgccaatttttgtatttttgtatttttaagtagagacaggattttgctatgtcagccaggctggtcttgaactcctgacctcaggcgatctgcctgccttggcgtctcaaagtgctgcgattacaggcgtaagccaccaggctcagctaagatttgggttttcaaggggtggtgctggctgctgggcacrgtggaattgaaggaaagagaagtggattctggggagggcatggtggccacttcagaagctgcaggattcagagtttgagaagccccagtgtgcatcagacccagcacgttgaaatgtacccactacaaagaaaagaaactttttatctgaggaaggcgagccccctttaaatgatcaggcctagagaggcactggaatgagacagctgtcacatctcactgccccacctgagaaaagaaatctcctgaggccgcttgctgtgtgggctctaggctgactggtaccagtagctatggatgaacctaacaatgccacacactggacaccataacccgtgccctgtagttcaacaacatatagataatcactcatcaatgttatttctgtaaaccgatgagaattcctgaaaaacaatttcgcaatcgcccctttcctgatttgtcctcttgtatttaaaagctcgagcctctcttctctggagcactttccaaggtaacttgggagtgcttcctggactacagtcctcaactgtggcccaaataaactctctacctgtgttaatttcgcttccatctctttctattggtcaacaccacaatctacatttgaaatgtcattcttccatgctagaatatgtattcggaaaaaaaawtttttaatttttttctgaagttccttggctgtaatacatttcattgactctcggctgtgatctgtggacaatgactgtgcacacctacagactcactcctcatcttcgtgaggctgggataaaggtacacacggaggctggtcccacatctgtaaaggcctcacatgcatggctacgggcatctcggccctcatgtccgagctccatccmccctgccccttaatcaactctcccaaccccaccccacctcaggtccaggatgaacattccagcagtgtggtctgcccacaggggagacccagggaagaggcctgcacagtccttagaaaaaggcttagggtttgagggtgaggaatcccaggatcccagacacctggtgtgggcttcaggtgggctcgtgcccttggccytcccagctaagtggttctgctggaggaggcagaccagagtgggaccctcaaagtcacagagccctgggccgagacccccaaatgctcaactttaagggtgatactatcctcaggaatccttgcaaagtaggaaaattgaacccagtgattgttttcaagatagctttatgttaatactcaatttaaccaattaaagaaatcgacataaaatcaactaaccccatatgtggttttttttttttgtttttgtttttgttttttttggcccctgacttttgtggagacccatgagatgcttggtcctgagcctaacggatgcaggggcctggctgggacccagctgggaagctgatgctgttctccaggtgagcgctttaccaaaggctgctcggaacactgcctgcctccaaactgctgctttcctaacaggtcacaaacactttgcaagaagctgcaatccgtcatccccttctgcttgcatcccccctcacatctgcgggtgggagagaggacagagcagggggaagcaggaactctgaggctcccacctggggcacccacactttgatgggcaggaggtgctcctggcccgctgggtgggacctctcccaagaggtccatatgccaacctggacgctggggacacaccgagctctcccttagcctgacccaccttcctagaaagacagctcaggattcatttctgcccagggctttcgtcgtgcatgagaagtcccttctgccttctattttctctgctccaggaaacctctctccgcagcccgaattcatgacttcgaacttttccaagacttccagcaccaaagactcaggactgactgattttctcaatatactactcccccaactccacctttggactcccagtcaatctccctcccgctttttccccctgtaaaaaacctaaactgctcagttcttctccctcaacccccagatcacatcagcccctttgagagctccactatggtccaccacctccagcagagccacttagctgggaaggccaagggcacaagcccacctggagcccacaccgggtatctgggatcctggaattcctcacccacaaatgctaaccctaattttagaacctgatcacaaaggatttcatccttggaagaaactggtccagcaatctcgatttcgacatgagtctggaaaggatcttgagcgccacgtgggtcccactggggtcccactgggggtctcctcccagtggctcctgctccctcctggcacggctggcctttgctctgcacctccactctgctcttgtggtccctttggctagtccttgtggaggggccccaggagacagtggggaaagcacaggctccccccaaaagactccaatgtgagctcagcctagtcatgtgaccctagacaagcttttcactttcctggaccccacagcacaagtaaccgcccctgctgttatgggttgagttgtgttcccccaaaaaagatctgttgcagtcctaacccccagaacctgaaaatgtgaccatatttgggcatagggtctttacagaggtcatcaaggtaaagtgaggtcattaggatgggccctagtgtgatacgattggtgtccctacaaaaaggggaaatttggacacggaaacagacaggcattgagggaagatgatgtgaagaaacacagggagaagatgtcatctacaagccacagacagaggcccagagcagaccctgtcactgccttcagaaggagccagccctgccaatgcctcgatcttggacttccagcctccagagctgtcagacaataaacatctgctgtttcagcccccatctgtgggactttcttaaggcagccctagcaacaaacccacctgccttgttgacttcctgaaacgagacagccacacggtggtgctgtgtaaagggcaagtgccacggattcattcatgccatgagcaatcattgagcaccaacagtgtaccagggaccatgcctgagcactaggggtctgcaccaccaacttatataaagtcctttacttgcttcctttacataagttattctcccagccaccatgtaaacggaatcatctaagactgctacagtcctcacagctcctagctaatcattaagcacattgtaggtgcttaataaatgcctaaataattgacttaatacagattcgtaatggctacaaattattcagtgtacaagtctgaacgtgggtgtgctgaatattttacagtcttcagcaacatccagaagaactaatcatagtttgggtccaaaataacctcatttatttagcgccacgacaggcttggcctgttctgtagggtgtagaatattgagcccgaagggatggcatctcgtttgctttcatgacctcctcccctcttgcatggatacagatcatggctttagacaatttttgaggtgaggttacattttctgggtgtagccaactgcagataaaagatattttctgtaatgcatcatgcaggatcttaataattctaggagctcatttgaaagtcattttaaactggccttttgagagttctgcattattagaaagaaagggagaggagaggggggaagtggaaagggggaggggaagtggggaaaggagaacacagagaggggagagggagaaaaggaaggaaggaagagagggagaaagaaatcagtccctacagcatgtggacattgtgtgctgctgggcagaaggttttcagcacgacaagaatgagaatgccaagcgcataaattataatgccgtcttttccctgcaaacagtgaataattatagatgccaagtgtctcagtgaaatctgctgggcatatggcccctttttgtcttcatgccacttttctttgctccttcagggcaaagaagccagcatgaattagcacctggccacagtatcctgacctgtgagaaaaaaatgagggcatgttttcaatttccagggaagtatacatccatgtttgattcaaaacatatttactgagtacctaaaatatcccaggtcctgtggaaatacaggaagggctcgtcacacaaggagtgcacaaccttaactgacagcccagcaccacaatcgtttattgagtgactactgtacaccaggtgctgtgctaggttgggggtgcagatggaggcaccaagatgaatattccatcattcctgcccccaaagggattatagattcatgaaaagggagattcataacgaatcacgtcttttcctttcattctcatagcagtctacaaaggcggcacaatcattcgcccaccttgcagatgcagcaactgtggcatgcagtttcagtcacttccttgcaaaggggactaggaagtggaggaggtgggtgtgaacatagcctggctgtgcacactgggctgacgtggtcgtctcagcacaatggagcaggaggtgagggttgtacacaggcaagcagcctgcaaggattcaggagaggacagagaaaacacttcccagaagtgcagagatgctgtccttggaatccagaggagggagtgattccaacaggaagactgacagaggcatttggaatggggtggaacttcagtaggtgaggaagttgggaaaggccagtgcagaggcaggcaagagcagaggcaggcccatgggggctggggatgccagggaggatgaggggccytgcgggatgcagagggagtggaagcaaagttggagctcagagggtcctgctggcctgctgaagagctggatgcatcttatttgtgctgtcttagtcagtttcacactgctataaagacactacctgagactgggtaacgtataaacaaaagaggtttaattaactcacagttcagcatggctggggaggcctcaggaaacttacaatcatggcagaaggtggaggggaagcaaggcatttcttaccatgtgaagcaggagagagagagcatgcaggaaaaactaccagttttaaaccatcagatctcatgagagctccctcactatcatgagaacagcatgggggaaactgtccccatgatccaacgacctcccaccaggtccctccctcaacacatggagattacaatttgagatgagatttgggtggggacacagagccaaaccatgtcattccaccccggcccctcccaaatctcgtgtcctcttcacatttcaaaaccaatcatgtcttcccaacagttccccgaaagtattaactcattccagcattaactcaaaagtccaagtccaaagtctcatctgaaataaggcaagtcccttctgccttgccttcatgagcctgtaagatcaaacacaatttagctgcttccaagatacaatgggggtaaaggcattgggtaaatgttcccattccaaataggagaaattcaccaaaacaaaggggccacaggccccttgcaagtccaaaaccaggcagagcacttattaaatcttaaagctccagaatgaccttctttgactccatgtctcacatccagagcatgctcatgcaaggagtgggctcccaaggccttgggcagctccactcctgtggctttacagggtacagcccccatggctgctttcacaggctggcattgagtgcctgcagcttttccaggtgcatagtgcaagccatcagtgaatctaccattctggagcctgaaggacagtggctgtcttctcatagctccatgaggcagtgccccagtggggactctgtgcaggggctccaaccccacatttcccctctgcattgccctaatagaggttctccatgagggctccagccctctgcagacttctgcctggacatccagacatttcaaatcctctgaaatttaggcggaggctcccaaagctcaactcttgtcttctgcacacccaaaggcctaacaccatgtggaagctgccaaggcttgggcttgcaacttctgaggccatggcccgagctgcaccttggtcccttctagccatggccggagatgcagtggttgttgggacacaggacaccaactcctgaggctgcacagagcagcagagccctatgcccagcccaggaaaccatttttccatcctaggtctccaggctttgatgggaggggctgccatgaaggtctctgacaagccctggagacatcttctccattgtattggctactaactttcagctcctcattgcttatgcaaatttctgcagctggcttgaattcctccccagaaaatgggtttttcttttctacatggtcaggctgcaaattttccaaacctttatgctctgcttcccttttaaacataagttcccatttcaaaccatctatttctgaatgcatataactgaacactttcagaatgagccaggtcacatcttgaatactttgctgcttagaaatttcttccaccagatatcctaaatcatctctctcaaagttcaaagttccacagatctttaaagcaggggcaaaatgccaccagtctcttcgctaaagcatagcctgagtgacctttactccagttcccaacaggttcctgttcttcatctgagaccacctcagcctggacttcactgtccatatcactatcaatattttggtcaaaaccattcaacaagtctctaggaagttccaaactttcccacatcttcctgtcttcttctgagccctccaaattgttctaacctctgcccattactcagttccaaagtcacttacacattttcaagctattcttttttctttttttttttttgagacagagtctcactctgtcacccaggctggagtgcagtggtgcaatcttggcacactgtaacctacacctcccaggttcaagcgattctcatgcctcagcctcccaagtagctggggttacaggcatgggccaccacccccagctaattttttttttttgtatttttagtagagacggggtctcaccatgttgcccaggctggtctcaaactcctgagctcagggaatccatccaccttgccctcccaaagtgctaggattacaggcgtgagccaccgcagccagcctcagattatgtttatagcagtgccccacttccagtaccaattctgtgtattagtccattttcacactgctataaagacactacctgagagtgggtaatttataaacaaaagaggtttaattgactcacagttccacatagctgggaaggcctcaggaaacttacaatcgcgacagaaggcaaaagggaagcaaagcatgtcttgccacagcaaagcagaagaaagagcacaggaaaaactgccacaaaactgccacttttaaaaccatcagatctcatgagaactccctcagtatcacgagaacagcatgggggaagctgcccccacaatccaatcacctcccaccaggtccctccctcaacatgtggggattacaactcaagatgagatttgggtgtggacacagaaccaaaccatatcagtgctattgaaggtgcctgaggagggatgtggcatgatccagcccatgtagaggacagtaactggtaaccacaggcagaattcattacagaagggaatcaggtaagaaatcatcagagatatgggatcatttaaaacaactattgatcctccaactgggtacaccaaaagggtaactaggatgatgctatgagggaggaagatgaaacaaaaaagcagtttcccaggtagaagcatccataaggtccagggcagtgagttaagggtgccaccacttgctcacagtacgttgagtgaaactcagatgcaaaactaggtttagtataattacatatgtgtcaatgaaaaaaatgcatacaggctgggcacagtggctcacacttgtaatcccagaactttgggaggctgaggtgggtggatcacttgaggtcagcagttcaagaccagcctgtgagcatggccaacatggtgaaaccccatctgtactaaaaacacaaaaaattagccaggcgtggtggtgcacgcctgtaattccagctactcaggaggctgagacactagaattgcttgaacccaggagcctttgcaatgagccaagatcatgccactccactccagcctgggcaacagagcaagactgtctcaaaaacaaaacaaaaaacaaatttaaaaatgcatacgaaaaagtggaaacatatacacaaaatgagaacaataattgcctttaggagatgggattataaatttttttaactttcctttctcttgtttacctgcacttgctaaggtttgtgcagtaaatattttacttttggagtcagttaagttttgaaaaaggcagaaaaagcccacaactgtaacaggttcgtcctctccgtagcaaagctgattcaaacagcagtctttgaacacagtagtatcacgctggttggtatcgtctcggtagcagaatgagaacacaaaatcatctagggcaataggagcagcaatgtgtagcagagaaaatagcccaagtcaaatttatgtccagccaagaccactaatgaaagctgaaaactagcatccttgcttcctctgcccaccccatcccatcccaccttcacatacatccgcccacacccattagccagagcattcctttgatggcctaagttagatgtcgtctatgccccagggcctttgcaccagctggtcctcaggtgccagtgctctctcccagtgtctcacgtggctgactcctttgtcaggtcccagttcaaatttaccttctcagagcaaccttccctgaccatcgtagctaatatagccaacaccctctagcaggcaccccatagagtctaatccagctttgtccatagaattttctgtgacaataagactcttctgtgtctatgctgtcaactcgccacatgtggctataagcactcaaaatacggctagtgttaattaaacatggaattttacattttatttcattttttattatacataagttctagggtatatgtgcacaatgtacaggtttgttacataggtatacatgtgccatgtgggtttgccgcacccattaactcgtcatttacattaggtatttctcctaatgctatccctccccctgccctccaccccacgacaggccctggtttgtgatgttccccaccctgtgtccaagtgttctcattgttcaattcccacctatgagtgagaacatgcagtgtttggttttctgcccttgtgatagtttgctcagaatgatggtttccagctttatccatgtccctgcaaaggacacgaactcatccttttttatggctgcatagtattccatggtgtatatgcgccattttcttaatccagtctatcactgatggacatttgggttgttccaagttttcgttattgtgaatagtgccgcaataaacatacgtgtgcatgtgtctttacagtagcatgatttataatcctttgggtatatacccagtaatagtatctctgggccaaatggtatttctagttctagctccttgaggaattgccacactgtcttccacaatggttgaactagtttacactccaccaacagtgtaaaagcgttcctatttctccacatcctttccagcatctgttgtttcctgactttttaatgactgccattctaactggtgtgagatgctgtctcactgtggttttgattgcatttgtctgatgaccagtgacgatgaacattttttcatgtgtctgttggctgcataaatgtcttcttttgagaagtgtctgttcatatcctttgcccactttttgatggggttgttttttttcttgtaaatttgtttaagttctttgtagattctggatatgagccctttgtcaaatgggtagattgcaaaaattttctcccattctgtaggtggcctgttcactctgatggtagtttcttttgctgtgcagaagctgtttagtttaattagatcccatttgtctattttggttttgttgccattgcttttggtgttttagtcatgaaattgcacatgcctatgtcctgaatggtattgcctaggtttgcttctagggtttttatggttttaggtataacatttaagtctttaatccatcttgaattaatttttgtataatgtgtaaggaagggatccagtttcagctttttacatatggctagctagttttcccagcaccatttattaaatagggaatcctttccccatttcttgtttttgttggtttgtcaaagatcagatggttgtagatgtgtggtgttatttctgaggcctctgttctgttccattggtctatctctctgttttagtaccagtaccatgctgttttggttactgtagccttgtagtatagcttgaagtcaggtagcgtgatgcctccagatttgttcttttggcttaggattgtcttggcaatgcaggctcttttttggttccatatgaactttaaagtagttttttccaattctgtgaagaaagtcattggtagcttgatggggatggcattgaatctataaattactttgggcagtatggccattttcacgatattgattcttccaacccatgagcatggaatgttgttccatttgtttgtattctctttatttccttgagcagtggtttgtagttctccttgaagaggtccttcacatcctttgtaagttggattcctaggtattttattctctttgtagcagttgtgaatgggagttcactcatgatttggctctctgtttgtgtgttaatggtgtataggaatgcttgtgatttttgcacactgattttgtatcctgagactttgctgaagttgcttatcagcttaaggagattttgggctgagaacagtggggttttctaaatatacaatcatgtcatctgcaaacagggacaatttgacttcctcttttcctaattgaataccctttatttctttctcttgcctgactgtcctggccagaacttccaacactgtgttgaataggagtggtgagagagggcatccctgtcttgtgccacttttcaaaggraatgcttccagtttttgcccgttcagtatgatattggccgtgggtttgtcataaatagctcttattattttgagatacattccatcaatacctaatttattgagagtttttaggatgaatggttgttggattttgtcaaaggccttttctgcatctattgagataatcatgtggtttttgtcattggttctgtttatgtgatggattgcatatattgatttgcatatgttgaaccagccttgcatcccagggatgaagctgacttgatcgtggtagataagcttcttgatgtgctgctggattcagtttgccagtattttattgagaattttcacatcgatgttcatcagggatattggtctaaaattgccttttttgttgtgtctctgccaggctttggtatcaggatgatgttggcctcataaaatgatttagggaggattccctctttttctattgattggaatcgtttcagaaggaatggtaccagctcctctttgtacctctggtagaattcagctgtgaatctatctggtcctggactttttttggttggtaggctattaattattgcctcaatttcagagcctgttattggtctattcagagattcaacttcttcctggtttggtcttgggagggtgtatgtgtccaggaatttatccatttcttctagattttctagtttattctctgatggtagtttgtatttctgtgggatctgtggtgatatcccctttatcattttgtattgcatctatttgattcttctctcttttcttctttattagtcttgctagtggtctatcaattttgttgatcttttcaaaaaaccagctcctggattcattgattttttgaaggtttttttgtgtctctatctacttcagttctgctctgatcttagttatttcttgccttctgctagcttttgaagtttgctcttgcttctctagttcttttaattgagatgttagggtgttgattttagatctttcctctttctcttgtgggaatttagtgttaaaaatttccctctacacactgctttaaatgtgtcccagagattctggtacattgtgtctttgttctcattggtttcaaagaacatctttatttctgccttcatttcattatttacccagtagtcattcaggagcaggttgttcagtttccatgtagttgtgtggttttgagtgaatttcttaatcctgagttctaatttgattgcactgtagtctaagaaacagtttgttgtgatttctattcttttacatttgctgaggagtgctttacttccaactatgtggtcagttttggaataactgtgatgtggtgctgagaaaaatgtatattctgttgatttgaggggagagttctgtagatgtctattaggtctgcttggtgcagagctgagttcaagtcctggatatcgctgttaaccttctgtctcattgatctgtctaatattgacagtggggtgttaaagtctcccattattattgtgtgggagtctaagtctctttgtaggtctctaaggacttgctttatgaatctgagtgctactgtattgggtgcatatatatatttaggatagctcttcttgttgaattgaattgatccctttactattatgtaatggccttctttgtctcttttgatctttgttggtttcaaatctgttttatcagagacgaggattgcaacctctgcttttttttttgctttccgtttgcttggtagatcttcctccttccctttattttaagcctatgtgtgtctctgcacgtgagatggctctcctgaatacagcacactgatgggtcttgactctttatccaatttgccagtctgtgtattttaattggggcatttagcccatttacatttaaggttaatattgttatgtgtgaatttgatcctgtcattatgatgttagctggttattttgcccgttagttgatgcagtttmttgctagcatcgatggtctttacaatttggcatgtttttgcagtggctggtaccagttgttcctttccacgtttagtgcttccttcaggagctcttgtaaggcaggcctggtggtgacaaaatctctcagcatttgcttgtctgtaaaggattgtatttcttcttcacttatgaagcttagtttggctggatatgaaattctgggttgaaaattctttcctttaagaatgttgaatattggcccccactgtcttctggcttgtagggtttctgctgagagatccgctgttagtctgatgtgcttccctttatgggtaacccaatctttctctctggctgcccttaacattttttccttcatttcaaccttgatgaatctgacaattatatgtcttggggttgctcttctcgaggagtatctttgtggtgttctctgtatttcctgaatttgaatgttggcctgccttgctaggttggggaagttctcctggataatatcctgaagagtgttttccaacttggttccattctccctgtcactttcaggtacaccaatcaaatgtagatttggtcttttcacatagtcccaaatttcttggaggctctgttcatttctttttactctttttctctaaacttctcctctcgctttatttcattaatttgatcttcaatcagtgataccctttcttccacttgatctaatcggctattgaagcttaggtatgtgtcacgtagttctcatgccatggttttcagctccatcaggttatttaaggtcttctctacactgcttattctagttagccattcatctaatatttttccaaggtttttagcttccttgcaatgggttcaaacatcctgttttagctcggagaagtttgttattacagactttctgaagcctacttctgtcggctcgtcaaagtcattctctgtccagctttgttccattgctggtgaggagctgtgatcctttgaaggagaagaggtgctctggtttcagaatttttagcttttctgctctggtttctccccatctttgtggttttatctacctttggtctttgatgctggtgacctacagatggggttttggtgtggatgtcctttttgttgatgttgatgctatgcctttctgtttgttagttttccttctaagagtcaggtccctcaggtgcaggtctgttggagtttgctggaggtccactccagactctgtttgcctgggtttcaccagcataggctgcagaacagcaaatattgcagaacagcaaatattgctgcctgatccttcctctggaagcttcatcccagaggggcaacctcctgtatgaggtgtcagtcggcccctactgggaggtgtctcccagttaggctacatgggtgtcagggacccacttgaggaggcagtctgtctgttctcagagctcaaacaccgtgctgggagaaccactgctctcttgagagctgtcagacagggacgtttaagtctgcagaagtttctgctgccttttgttcagctatgccctgcccccccccagaggtggggtctacagaggcagcaggccttgcagagctgtggtgggctcctcccagtttgagcttcactactcaagggaagctttgtttacctactttgtttacctactcaagcctcagcaatggcagacacccctcccactaccaggctgctgcctcgcaggtcaatgtcagactgctgtgctagcagtgagcaaggctccttgggcttgggacccgccaagccaggcatgggatataacctcctggtgtgccgtttgctaagaacattggaaaagtgcagtatttgggtgggagtgtcccgattttccaggtacagtctgtcatggcttcccttggctaggaaagggaaatcccctgaccccttgtgtttccccagtgaggtgatgccccaccctgcttcagctcgccctccatgggctgcacccactgtccaaccagtcccaatgagatgaaccaggtacctcagttggaaatgcagaaatcaccatcttctgcattgatcacactaggagctgcagaccagagctgtccctattcagccatcttggaacagaatctctcattttcactaattgaaaagtaaatgtctatgtggcaagtggctagcataatagacagcataggccaaaccattacccacttgtttctgttttcatagcatatcactgtctgaaatgatctttctcaactgtttacaaatttacagtttgtcttcccccattagaatgtaggttttgggactggacccatctgttgttagtcataagctaatttactgtgagttagaactcatttacaagcctgtagcacatgctgttacatacctgaaattgtaggaaattttcatcttcaagtctggatttgatatctacaagagccaagagtaatgtgtgtcaagttgcataaggtagagactaatgtctgggtttacttctgtttaagacagcagcaccgaacacagggctcatgcctgtaatcctagcactttgggaggctgaggcaggtggattgcttgagcccaggagttcgagaccagcctggccaacatggcagaaccccatctctactaaaaatacaaaaattagccaggcgtaatggtgcacgcctgtaattccagctgtaattccagctactcaggaggctgaggcaagagaatcacttgaacccgggaggcagaggctatagtgagctcagatcatgccactgcaatccagcctgggcgacagagcgagactctgtctagaaaaagaaagcaaactggcaatgaagtgaagtaatagcaacaaactagggcaataaagtcatcaaaacttattattccaaaaagatactctaaaaatctgagaaaagcacatagttataaaaggtacatcaccttccaaagtaaagaactattcctcaaaaaggaaatttgtttggccataaaatttataacattcattctaagaaggcagcctcattgaatcagtaatcaaaagcctcacaacaatgaaaaactcaggcttagatggcatcattggtgaattctaccaaacatttaaggaatttacacaaaccctcctcaaactcttccacaaaattgaagaggagggaacacttcgtagctcattctatgaagctagcatgatactaaattcagacaaagacattataaagaaagaaaactacagaccaatatctctgatgaatatcagtgcaacaagcctcaataaaatactagcaaacagaattcaacggcacattaaaaggattataccccatgaccaaatgggatttattcttggaatgcaagaatggttcaacatacaaaaatcaatcactgtaacacactacattaacagaatgaaggaaaacaaccccatgattatctcaattggtgcataaaaggcatttgctaaaattcaacatattttcattataaaaaaaaacacccaataaactaggattagaagaaaaccaccccaatataatgagggttgtacataaacagccaacaactaacatcatacttaatggtgaaagactgaaagtttttcctctaggattagaaatgaggtaaagatgcttattttgccactgttattcaacatagcactggaagtcctacacagaacaattaaacaagaaaaagaaatcaaggcatccaaattggaaaggaagaagtaaaattgtttccacttgcagatgataagattacacacacacacacacacacacacacacacacagacacacacacaaacacataaaacaaatcctgttagaactaatcaatgagttcagcaaagttgcaggataccaaatcaacccacaaaatcagttgtgtttcttacactaaaaatgaagaatccaaaagggaaattaagaaaacaattccatttacaacagcataaaaagaataaaattatcaggaataaacttaaccaaggaggcaaaagacttgtacactggaaactacaaaatgttgctgaaaaaaattaaagacaactaaatggaaatacatcctgtgttcatgagtttggaaggcttaatagttaaggtgttcatgctacccaatgtgacctatatatttaatgcaattcataccaaaattctaatggcagtttttgcagaggaaaactccaccttaaaattcatatggaatctaaagggatgctgaatagccacaacagtcttggaaaagaagaccaaagttggaggactcacacttcctgatttcaaaacatactacagacatcaaaacagtgtggtactgggataaagacagatatatagaccaatgtaatagaatagagagcacagaaacaaaatgtcaaatgatttttgaaaaaggtgccaagaccaatcaatggggaaaggacagtctcttcaacaaatggtgctgtgaaaattggatatgcaatgcaaaagaatgaagttggacccttaccctataccatacacaaaaatcaactcaaaatgaaccaaagacctaaatatgggagctaaaactgtaaaactcttagaagaaaacataggggaaaagcctcatgacattggatttggcaatgatttcttggatttgacaccaaaagcacaggtaacaaaagtaaaaatagataaattggactacatcaaaatttaaaattcctgtaaatcaaaggatataattaacagactgaaaggcaacctacagaataggagagaaaatatttgtagatcatatatctgataaggaattaatatccagaatatataaagaattactacaatacaacaacaacagcaggaagaaaaaacaaataacccaatttaaaaataggcaaaggacttgaatagacattcctccaaagaggatatacaagtggccaaaaagcatatgaaaagatgctcaacatcactaatcattatggaaatacaaatcaaaaccataatgagatatcatctcacacctattaggatggctactactgaaaaaacaaaacataacaagtgttggtgaggatgtggagaaaggggaaccttgtatatggttggtagcaatataaaatggtgcaggctctatagaaaataatatggaggctcctcaaaaaattaaaaatagaattaccatatgattgaagaattccacttctgggtatgatacggtttggctctgtgtctctacccaaatctcatgtaaaactgtaatccccacatgttggaggagggacctggtgggaggtgattgactcatggggttgtatttcccccttgttgttcttgtgatagtgagttctcacgagatctggttgtttaaaagtgtgtagcacctcccccttctctctctctctcctgccaccatgtgaagacgtgcttgcttccccttcacccttctgccatgattgtaagttttgtgaggtgcccccaccccccatagccatgccttctgtacagcctgcagaactgtgagtcaattaaatctattttctttataaattacccagtctcaggcagttctttatagtagtgtgagaataaactaatccagggttatatacccaaaagaattgaaagcagggtctcaaagacatatttgcacacccatgttaatagtatggaattagaccactacttctcctgctgaccttctcatcttttccacaccccccatccccgtttccctagtttataagacaggagaaaaaggagaaagcaaaaagttggaaagaaacagaagtaagataaatagctagatgaccttggcgctaccacctggccctggtggttaaaataataataataatattaacccctgaccaaaactacttgtgttagctgtaaattccagacattgtatgagaaagtactgtaaaacttttggttctgttagctgatgcatgtagcccccagtcacattgcccacgcttgcttgacctatcacgaccctttcacatgtaccccttagagttgtaagcccttaaaaaggccaggaatttctttttccaggagctcggctcttaagatgtaagtctgccaatgctcccagccaaataaacctcttccttctttaatctggtgtctgaggagttttgcctgtggcttgccctgctacaatagcagcattgttcacaatagccaagaggtggaagcatccaaagtgtccacctacagatgaatgaataaacaatacaatacatgaatattcatacaatggaatatcagccttaaaaaggaaggaaattctgacacatgctacaacatggatgaaccttgaggatattatgctaagtgaaataagccaatcgcaaaaggacaaatactgcataattccacatttgaggcacctggagtagtcagtcattgagacagaaagtagaatggtggttgccaggggctggagaggggcaatgaggagcggttcggttggaacagatatgagtttgggaagatgaaagttctgtaggtggatggtgatgatgtttgcacaacaatgtgaatgtatttaacatcttagaactgtacacttaaaaaggttaagatagtaaattttatgctgtatgtattttgtcataattttacaaaattaaaggcagtctcattagttctctgttataacttggatgccagttcatgcagaaaggcaatctcttcaggtctcgcaggatggagtagtgacctggaagagaatcctgctcactggagcagggcgctgctctcttttgaagatgcagtggaggttgtctctttctccacacaaagggcaggaaagacgacaatggcagggtgtggggggagaggcagtgaagtgcattcagcaaactgtggagttccatccagatcaagaaattctccttacatgaagtctgtggtacagttctggctttcatgcccactgtcttctgtgatgctcttggtaaccagcagagagggcagggcaggttgtgtcatatctgcttttcgtgagtttagacaggggttctccacctcagcactattatcttttgggccagaggattctgttgtgtgtggctgtcctgtgcattgttggatgtatagtggcatccctggcttctacccactagatgccagtagccctccctacccacccagttgtgacaaccaaaaatgtctccagacatcaccaatgacccctggggggcagaatcacccgtttcagaaccattaggttaaaagttttgagactcacacagagtctgcacaaacccaagtcttctaattccagatctcccattccaccatgacaccaagttattctccacctaaggcccccttgacagccactcctcacccttctcctccctagagcaggacatcaagggatgcctcgctgggctcgctgggcttcctggccctctggctcaagtgggtcagcaaaatgggagccactggtgagagagaggaggggagaagcaagagggtggggtgtgtcttcacctgtcctggcccccctccctgcacaccgatggggactatgacaatgagttggctacaccaggctctggcatgacctctgcctccccctgcccagtgaggcctgggaacaaggacagctcccacagccacagcccctgcctgcttcccactgcctcgtccctggtgtgacccttgcatgcctctgtgcatggacctttcattcatttatttccaattaaacacttctgactggctcatctgttccagcctgttaaaaccaatcaccccaaacttaggacaagaactaaaagtcagcacttgaacacgctgcagctgattatccacaccctcccttccagcaagctctctgctgctctattgaatacgtctcccctctctgaaagcccctaatcctgctcgctaatgctcttacggtgtgcttctcccaccaccttgggttaagttatttctgtcccatcttatctcctccactggacttagggatttgggaggaaaaaagaaagggattgtatttcactccatttatatgaaaatgaattattttgtgttgttttccatttttcttcaatacttggatacaaaattttattaagatatttttagaattattttgaactttcacagtttttagaataatctatgaaattttcagttttggaaactttcacagatttctttctaccttttggatctcattgggaaagtactccaggcactcgtggcattactctcagctgttggggactaactggctcacggcatttttcagagctctacaggggccaaacaagatgcccggcttagtctaataagctctctgggtgcccttgggcctgaaaatactaacttttgggtattttcttggactcctcagaaccgaatggcacctcacttcaaatcatggtccacttgttaaacttactgagtgcttgatacgtgcctagagtgtgatccgcactcttaatatatggataattaattcaaatgtaatctgacttaacatactctctactccaactctgcaggcaaatttgtagtggaaggagtctggtgcatgaataaatagatacaaattcagtacaaaatgcgtgtttcatgacattttcatggaaaggaagtgaggaaagttgggaggagtagatgtgatgaacatctagttttcggggaggcctcagggatgcctgaaaggaagtcactacccaatccaggtagccctgggccaggagaggtgaggaggaggggctgagcacctgggggagctagtgacacagacagaggagggcccataagcacaccacaaagctggagaaagacagcagttaaagaaaggcggcataaagtcagaaacaagtctgagatgcaacagtgtctcgctctgttacccaggctggagttcagcggcatgatcacggctcactgcagcctccatctgcagtgatggctcaagcaatcctcctgcctcagcttcctgagtggctgggaccacagacgcgtgccaccacgcccaggctgctcttgaacttctgggctcaagcaatcctcccgccttggcctcccaaagtgctgggattataggcgtgagccaccacacccagctagaattagtttcttcaaatgctaggcactgagtaacacagaatgcctaagacatgatcactgcccctaggaagctcagctgaatatccaagtatgcaagactgcctggatgcccagaaggcctaggaatgacatgaagaaacctaagcccacaagccggggtctgtgagagccaagagagaaggctttctgggcagggtgaccaaagctgcagcctggcaggcagggcagctctacaccagcctcagaggagcaggcagggcctactgtgctgcaggcatcttcacagagaagacgcaggaagggcttctgagggcagacgcagggaagggtgcggggctgattctcagtcaagggccatcttctctctgccctgctcatatgtgccactgatggtatccagagtgaagcagtgaacagtgtagggctgcggctggtggctgcagtgaggtcaaagacctcagtcctctgggaacctctctgatcctccagagacctcaggggcacaaataaagcaatccaacatacagagaagacagacatggaaaaagtatgtttgggtttttagagactgtattagtccattcttgcatcactatatacaaatacctgagattgggtaatttataaagaaaagaggtttaattggctcatggttctgcaggctgtacaggaagcctggtgttagcatctgctcagcttctggtgaagcctcagggagttttcgttcatgrtggaaggcgaagggggagcaggcacttcacatggtgaaagcaggctcaaggtggggggaggtgccacatacttttaaataactaaatttcatgtgaactccaagcgagagctcacttatcaccaaggggatggcccaagccattcatgaggcatcttcctccgtgattcaaacacttcccagcaggcccacctcccatcggtgattacatttcaacatggatttgggtggggataaatatcctaactatatcagggaccatctcaaaaaagtgtcccagaggagcaggggttggaagaaaaggagttttgtgtgatgcgagcagtgccttcatgaacatggaatgtggggccatcctggaagaggtaaccctcagccacacacacacacacacacccacataatggctttatatcctatctcaatagcttgtcctgaatcccttcttttgggagcaggagctatatctatctttagcgttcctgtaaataccacagcacctaagacactgcatgaaacccagtgtgttctacgggtagtcggtaactaactgtccttaaagatggtcctccctaatgtgggcaaatgaagccagtccaatggccagtgacgtacacatgcagttgtacaggtaatggtgttgagtcagatttctctggttgctatggtttcaaggtcactggatgttaatcaggcagctttgcttgtaccctgtccctatgctttccctaaaactctaaactgacctgagaaacctctaacctgacatgcaactagtcctctatgctatatttccagttgccatcttggacacctctacctacattttgcggacacagcaacgtgtcccaaactggaatcttgttcccttgcaaacctgccctccacttgcatcccttcctcatcattcactgtgttgcccaaactacaagcatgagcattcgctttttatcctcgattctggctctctgtcgcgtcggcgatccttccccccgttgctgtggagatgcctccctggcacgcacctgaaccatagctggatgctgattgctctttctgcctcctgcttttacttccaccctcacctcctccacactcctgccaccgatgtcttctaaaatgcaaatgtgagtacatcactccccacttcagtatctgtcagtgaccctgaaatgcattcaaaaagaagtacaatatcttggcaaggtctaccagtcttaattcagcgtcgctgttccttcagtctcatctccggccataacaaaacgtcctgtgcagtgctctgtcatgcttccaagcctgacccccctcaccccagtcctgtagacttgtcacatgtcatgtccttctgattgctggttttttctatttccatgcaagcatgtgaactgcttgaggacaagggtagtgccttgttcaccatgaaatttctggcatcatgctttgcacatagtagttatccaacaaatgtgggtcgaatgaatgaattgtatgcaacaccggatcaggagatatgatacaaggatttgggtggcaaaggattgtctcagagatgcctctaagcctccctaagagttcatggccataaaccaatagtttcagagctactcctttttgatatggatatatcctggacttattaaattgacagcacatattttatttttaaaatgttattaagttaactaggggcatcgctctatcctcaaaattgttttggagacaccattaacccacttaaattattaataaaaaagccacttattccgcacaaatagttgagactgtcctgcttacctacagatattcgtctaagagccggcagacattcagatacccgcagacagaacttactttctggacctcccacaacattcctccctttagatcttttttttcttaccccgtctttcagctttctcattgcagaactgctgagaataatggaaaatgctttgcctggaaacttccaagaacaaaactccgggggctaagagaacgcgatgatttttaagctgccagttaagatgcagctccttcatcatcacaggtgaagcaccaatgcctctcgcacgtgaaatccgtacgctcctagagtcttactacctaatgcatttctgcaatctgggacgcctgtccttagcgtcttcaatagttttgggcacgaggtggaccgcggaagtattgtattgaaaagttaacgtttttcccttggacaccctctcctcacagctattaacaagctgagagaaatcaggtgactcccagtcatgcagaggtttcctcaccatttatgatcaagccaaattaaagaataaaaataaaatcctattggcgcagcggccaccaagtctttgaggcctcgcctcggtgggcggggccgacgccggaggagaggggctgcgcatgtgggcgtgacctcgcggaaggagctgcggagggcggggccgactggagaggggcggggctgtcgggtgggtgggacctcgcggcaaaagctgcggagggcgggaccaaccaggaaaggacgggactgtcgggtaggcgggaccttgcgggagaaactgcggagggcgggaccaaccagggaggggcgggctgtcggatgggcgggacctcgcgggaggagctgcggaaagctgagctggtgaggggaggggctggtcgaggggaggggctggtcgaggggaggggctggccgagggaaggggccggccgaggggaggggccggtcgaggggaggggccggtcaaggggagggcccggccaaggggaggggccggtcgaggggaggggccggtcgaggagaggggttggtcgaggggaagggctggccgaggggaggggctggccgagggaagaggaggggaggggacgggctggtcgaggggaggggaggggagggcaggggacgggctggtcgagagaaggggagggcaggggacggggtggtcgaggggaggggacggaggggaggggagtggagggagaggagggaaggggaggggagggaagggaggggaggcggggcccagcggtgtcccgcgaaactgccgctcgctcggttcccgggcctccccgtgcgcctcagtgcaaagcgtgccaggcactcttgactgcaacgagagccgcggcggtgagggggcaaggccaagaggccacggttcgcgtttcgccggctgcagaagttgttgccatacatttcaaatgtgcatttcctacgtctcacgctctgtcttgcgcctccacagcgggccacggccctgtcaccgcagtcgcagccacatgctccctcccctgagtcggctcagctctgctcagcggtcagccccgcgccaggaggccgcggcctgcctgaggccggctcgcagcgactcgggacggagggcgggggcgtgaacgggtcgcgcggagagggtggggggagcggggagcgttagggtacgtgggggcgcgtcgaccaatggcagggcgctgttgagtgcagcggggcggggccgggcgcgggggtggggcgagcggcgggcggggcggggcggccggccggggggtgggaggagaggggcggggcgggccggccgggggaggggcggagagacgccgccgctgccgccgccgccgccgccgccgccgccgtggctgccgcagcctctgggagtctggaaaaggggaagcgagagcaagcgaaagactcagtccccgggcggcggcggcggcggcggccgcgggggcgcgacggccggggcgggggcgctgctgctgcgggggcaggcggcggcaggggcggcggcggcggcggcggcccgctccagccatgccgaataaaaacaagaaggagaaagtgagtccgggcccggccgcgggacggagggagcagggagggactgccgggggagggcgcgacggcaccggggtcctgcgcccgggccccggctcagttccccgcctgacgccgcgggcttcgcgtccccgagggcggccgagccaggcatccccgggcttctctcggcctcatgcccggtgggggcggggagcccggggatcgcgccggagccgcggggcgcaggcccgggccgctgggaccttcgtgatgggccggggctgggcgtggagggagggcgcggcccggggagggggtcggaggggcgcccgtttccgacagcgcgccgtgggcttgggcgggcaggtgcggccgccgagggggttcgcagcctcgcaggctcccggaaaggagcttcagggatgggggctgtagacgcctggggagggacccctgtacgggggaaagggagcgagaagggaccccgctgagagctggtaaggaattctctgccgccccggagggacgctctggggctctcgaacactattattatcctgggtggcggcggcggtgagggctgcgagcaagggtgctgcgtttgcattcgggggggcgggtatgtttctgcttcaggtggagctctgtagcgtttcattatcaccccagaaatcctcactcatagggtttagggtgggagggtagaaagggatgtgatgtggatctcaaaatgccagaagcactgtataaaattggatttatctgttttctgcttgaagttttcaacctcaaatgcagataaaacgaaaagaatctgaatgggggttggggggcattgcactgttggaatcctaaacggtatgatatagaatttcctaatggtatgaattaaaaatatcagaagctgtagttgtataaatcacttttaaaactgcatttggcttatctgatgtttacctgtctaaaaagtgagaagactaattgactttgcttgatgtttaccaggaatcaccaaaagcagggaagagtggaaaaagttcaaaagaaggacaagacacagtagaatcagaggtaactgtcatcaaatattgactttgtattttatacacagcttttaacttcaggtagaaaaaccgagagtgataaagcctagaatcttctaaaatgtttccctatgtgaggttttttttttgtggtgtcttttataaccctcaattttagttgtttaggtatttactgttttgctttggaaaactattaatgattttatgaaaattgtgcttgcctatggggtttgtttgtgggtcttttggggttttttttgttttttatttttttgagacggggtctcactttgtcacgcaggctggagtgcagtggcgcaatctctgctcactgctaccccttgccgcccaggctcaagtgatcctcttacctcagcctcccaagtagctgggaccacaggaacatgccaccacacccaacaaatttttttttttttttaatagagtctcactctgtcacccaggctggagtgcagtggcgcgatcttggctcactgcaacctctgcctcccgagttcaagcaattctcctgcctcagcctcctgagtagctgggattacaggcacccgctaccacgcccggctaatttttgtatttttattagagacggggtttcaccaggttggtcaggccggtcttgaactcctgtcctcgtgacccgcccaccttggcctcctaaggtgctgggattacaggcctgagccaccgtgcccatcctggatctggtatttttaagttcatttcccacacctcaaacccagcaaccctcctgtatagattggtcttatgcagtctatggtgttgctatgttgcttttagctttagggtcatctccccaccgccacttccattgcaagctgccaggcaactcagtggttagttctttttcttccatcaccttgttttccttcaaaccacctctgctactgacgtcctgggctagctccctatttctgttgacggtcccttggcctctttctccaataatgttggtatttgaaaaaatttacctagttttggtattttattattgttcacattgtgtgtgtgtgtgtgtgtgtgtgtgggcgcgcgcacttgcgcgtcggccacttgtaaatttctttgcttcttggctttggcctcattgaggaacagctggaatgccaagtgagcattgcatctacttgaccaaggttgatgctgttccttcacaccgtgaagtgccttcagaggatttgcagagtcaccactttcctttgccttttcttccttgtgactaattgttgaactagagcacctagggccaagggtccaggagctgcgtggacccaggcagagccagtaggtccttttgaatccatgggtagcacataattgggttaatagagtgtcagttatccagaactggatcattgaagccccagtcttatcacaaatgacgtttatttgccagtgtcagacttcttcctgtaagccaaattagaatgagttcagttctgtctgggaaacacagttaactggcgatgatctgcagtggacttttttttagccctgcattctctcttttctatcatttggtgtattctgaacctccctcctcttcagcaggtggtttattccagcaaatctgttgccctccccaaagcaaaaagcagaaatccaaaagattccttaaatgtcaatagttaggatcatttgtgccagtctgtccctccctgtctttatagcagacaactgaggtttactgtgccatgctgggatttgacttgtttctttcttccctgtcacccttttgactaaattcatttcgatgaagatgaaatgtaggtgctttatgaaggtatatgctatatgccttttttttttttttttttggtcttttgatctttcattaaaactgctaagatttcttctccccagagctttcttgctaatgtgcctatatcctcttactttagctatattccttatacaaaggagcatcagtgtgtatatatcatttatttctatttttagtgggaagatcctggctgtaaggatgaataatgttaagtttaaacctgaaaaatctcagtagttcaaagataccaaaatcactactatgtgaaatgtgtgttttgaaagcagtttgccagccgtgtgagacctgcggtgtggcctgcagtgcctgagtatgatgccccacttgtctttttgtattttttctagtgctactgtctaagagctggagctacagagcttgaaattaccactgaaaacactgaaatgttgggcccttcactgcttcctcataaggataccagaggcaacctggcatattaagcttgacacttggcagatcactgtgtaaattgtttttcaggaatacaagttgggacacttctgttcatttgacctttgagttgacccttaaattttattattgttttttttcccctcagtcttcagctcactgcttcacttctagttccacccacttaccaaatatgattgactcatgcaggtgaattaaaccattattgcacactttttccctctcctctctctcagtattactcttaacttgaatattttaacctgaacaatttaaataggcttgacattcccatgctgctttcaagcctttttttttttttttttgagacagagtttcactcttgttccctggctggagtgcaatggcacagtctcggctcactgcaacctccacctcccgggttcaagtgatcctcttgcctcagcctcccaagtagctgggattacaggctcctgccaccatgcccagctaattttttttttttttttttttttttgtatttttagtagagacggagttttaccttgttggccaggctagtctcgaactcgtgacctcaggtgatccgtctgcctcagcatcccaaagtgctgggattacaggcgttagccaccatgcagcccctttcaagccttttaacatcatgtcaccttcacaatgaa

SEQ ID NO: 97291 - DNA, 41999 bp, Homo sapiens
caccacacacacacagacacacacacacacacacaaattacctccggagactttggagacctacaaagtcttggcactacatctcttcaaaacacagtccagtggccaaaaatcacctgcaagacattctagactttatttccttccctccaagatcatcaggcaagatccaattcatcagcctacagggcctgccctgagccctctccccctctccccttctctgccgccccacccctgcctcttctgagtctgcagggttcaaggccagaagcagagcaagtcagaacacagctacacgcaggcagactatgggttggggtgtgggtgggtctcaggcacttccctgctctcaaaggagcacctccagggagcccatctggtgctccctccagctcctcaaattcccaacaccagggttgcaaggcccagtgtcttctcacctcgttaggtggagaaccccttctttaagcaaaagatggcacggacccccgacataagacagttcaaagctgagcggctctccccatcatgcaagtaacctgcgtgccgccacgggaaacagcacgcatcccatctggactcccaccagacaactgaggcaaccgagaaggaggctggggagggacagctcgagggctcactggaggtcagcagggaggtggactgcgtctcccgagggccagcactggcttagcctgctcagtgaggtgcccgaaggaggcccaccagctctgccagcacccggcctctgcacctcagctttcagcggataggtttgtgcaacgaaatatttcatagaaatcaagaaacatgagtgaacgatgcacaccaccgcgtggatgagtctcagagactgtggagcgaaagaagccagacacaaaggttgacatttacacgcaatcctagaatgacggctctatggtggcagagaggagaaaagcagttagctttggcaggtgcccacggagggggctatgcaatggaactttctgggccctggaggtgttgcagagtttgctatgggtggtggtagttacgtgggtttctatgaatgtaaaaactcttggtgtggtagacccaagctctgggcacctcacgcatgccatgcagcagctcgatctgtgacagcgagtcctgtgttccatgatatggctgcaaacacttgacagagtgaatgccgaacctctgctcctaagggaaatagagggccaggttcctacgagcctctgctccagccttttcagcaaccaatcagtacacaatagagttatttatgtgtttctgttaatatatgtcactaaactcccggccaagagcactacaactcatgcctgtacagagcctgtccaacacatgtattttctccataggacacatcatctcaaaagcaagtattgatcttattttatctcattttcaagagatgcagactgttcttaagcaagtactggttttaggtttacaaatacattttagcgagtaggcaaatttgcaagtacagaatctgtaaataatgagattctactgtatgtgtgtgcaatattcaaatgaagaggacagagcttcctgcctgacacaagcccctgactgactgccccacccaccgtcccttctaagagcagcagcctggtcccagctcttgccttccctcctcagaccagggataagccctgaccaatgtctacctcctgcagccagacacagacaggctgactcaggtgctcttggagtttgaactgagaaatgcaagagaagcttgcaaaatgctgagaggctccacaaggggctgctgaagccccagcaggcaaagctgccagctacagagcaaaaagccaagggaggggcagggatgtgggaggaaggacctggctggaggtgactgggggcggtcgtgtccttgtcagcaagcatagagcagaacagctgcccaaggtgccacagctggaagggtgagtgggtggatgggtggatgaaagggtgggtgggtgggtggatgggtggatgaatgggtgggtaggtggggggatgggtggatgagtggatgatggctgggtaggtggatgggtggatgagtaggtggatggatgtgttggtggataggtgggtgggtggatggatgaatggatgggcagatggatggataagggtgggtgcatgggtggatgaatgggtgagtaggtgggtggatgggtggatgagtggatgatgggtgggtaggccgatgggtaagtggatggtgggtggatggatggatgggtgggtggatggatgaatgaatgggcagatgaatggatgagggtgggtgggtgagtggacaaatgggtgggtaagtggggggatgggtgcatgagtggatgatgggtgggtaggtggatggatggatgggtaggtgggtggataggtgggtgggtaggtgggtgggtggatggacaaatagatgggcagatggatggatgagggtgggtggatcagtcggtgggtaggtggttagatgggtggatgagtggatgatgggtaggtggatgggtagatggatgaagggatgggcagatggatggatgagtagatgataggtgggtaggtggatgggtggatgggtaggtggatggatgtgtgagtggataggtgggtgggtggatagatgaatggatgggcagatggatggataagggtaggtggatgaatgggtgggtaggtgggtggatgggtggatgagtggattaagggtgaataggtggatgggtaggtgtatggataagtggatggacagatgggtgggtggatggatgaatggataggcagatggatggatgagggtgggtgggtgaatgggtgggtaggtgggtgaacagacggatgaagtgtgggtgtgtgtgggaatggatggatgaatgggtgaatgggtacataggtgggcaaggtgggtggacatgggtgagcaggcatgttttcacttacttcattctgtaacaatgtcagagatcatctcagggcaccacagtaggatgcaaaataaaatctcaaaaggggaaaaaagataaaaagcattctgggtgctgaactgatgaaggaaatgaacccatggccaggctgctgctcaggtggaccccaggaagcccttctgggcctgcaagtggccgcctgctgcatgcagggctgtcctgactgcacggcggcgccaacatcaggctgggaggatttctctcagaacgcccacacctgcctgcctgtttctagcagaactcaagctgtcggtgccaaggcctgctctcccctcatcccaatcttccagcaagaggcagaggcaagctctccacaggcctacagtggcagggccactcttgcactctgtgccagtggccaggaacatgtggctccgcctgggtgtgtcacagtaccagcctgtacctgcacgaccctgttctcaggcatctgggtacctgcagctgggggccggcacttgtgtacccggctccgaggaaggaccgacacccaggaggggaggctccaggcaggccgtggcttccaggaagcagctccggaagccgcaggcagtggctgcaggtggtgtgtttctgaggccaaatcggtcctctcttcaaccccagggccaggaagcaagctcagaatagggccaggatggagtctgggagcgctggaggtacagagggttgagggtgagccactgaaggagaagaggagggggcctctgtatgtctcagaaaatcagtgctcaagccgggttgaaccctgctgccccgggcatggtgggttcaagcctgacggaaaaccccctttcagtgtccacatttccaccctcccagacctctgacctcggcctccactccacacacacacacacacacatacacacacacacacacacagacacacactcttaatcagggcccaaagccctcctctgcactccctgccgaccccagggacttctccaacctctctccaactaaatcacattcaccccaccttcttcaccctgctccggcctgtgctggcctctctggaccaggtgtgcagctcggaagcacgactgggtgcaagggagacagccccaggcaggagcggccctgggggcgctgggcctccctcccccatcagggcaggaaaggtggacccctcgcccacacctgacctcctgctccagcctctgagtaaggctcaggactctgactttcccccaggcaggtggacaggggagggggctgcaggtcaaagctcactccccaccaacctcctcacattcctccattcactggatcaacaaacacacccactgcccagcaccgctgccaggcatcagctcccaacgcagatgagtcagccccgcccgtgccctccagggtggggtggtaccagggcaggcaccaatgttcgggtccaggagtgcaccaggagacccaaagcccagcttgagggagggcaggaaggccttctgctctggaaggggccctggagcccggtgtggagggccggaggccggccttccaggtgcattccaagaattgcagagtgcctgtctaggagcagcggccgcccaggttggagggtgtccagtgagcgcctgccttggctggctcctcaggcacacccggggctgtggcctgcagctgctcctgcactggggctgagccagcaaacttccggggctggggctgctgggcagggcaaggtccgcacagggagcagacagacgcagcctgcaattcggcgcttatccccaccggagcggaggcacaccaaagccaaaggacacgcagctggcctcaaagcagaagctgcatcggggctgggaagccattcaggagcccttttctctcccctcgccctcaccctgagccctggccgccacggcccacacagcaggccctccggagagagatgtcaggactccgagtggagacactttatccgcatgttcttgaccctcatacagcccttacgggtacttattctattttacagatggggaaactgaggctccacagagtcatatccgagcctgaggccgcacagggagtgctggcgccggttctcagggcaggggttgtgtctgctctgtcacatgtcacacgggggctcccccaggcctgccttcctctgccctccctctagctgccagtggcccccaaaccccaggcctggtgcgctgcttcctgcagctctgactgagggtcagacgtcagaagggacttccagagctggggtctggctctcatccaaccaggctggctttcagagccgactatgggcacgccccatgctggtcaatgtcggcggtggggggatgggtgcccccctcaatctaggagacagatgaggccggacagcagaggggtggcagagaaaacccaccccattgcgacacctccgcggccctcatgcagctgcctccaccaaccggcgaagtgcggctgcccaagaccgccgagaccccatcaagggtggaagggggtcaggcagggctgcggagaggaggccacatgggtggcctggttgatgggtaggctctctctccccaaagcctgggaagagccatctctgctgagggatccccgaacgcggggactccggatccggctggctggaacgggagtcccgggccggggcagagagaggtgagcggcgcctgggaggccagtcccaccggaggataggggtgtaggtggacgggaggcggtggagggcagggacggggcggacagtgggggctgaggcgggagacggccccgatctgcgcgtcccacccccatctccgcccaccaggagccaggccagcagggaccgcgagggggcggccaggttattcacgggagtggggagaccccttaaagcgccctcagggaccggccacagtgggcggggccacccccagccacccacctccccccccaggccccgcccccggcccgcgctcgctccccacgtggccgctgacgggcggggcggcacctcctcttcctcccgcccgccccgcccgccccgcgcccgccaggagccaccgtccgagccttgcggagcgcggcagtgggcgccggctgcccgcagcccctgacccggccccggacggagcgccggccgcaccaccgccctctggccgttgcctcaccgggtaagtccttggcctcggggtccgcttggagcttcaggggaaactgagtccgggaggaggcaggggcgtgcttgggtccaggagcgaggttccgggctgcggcrtgtgtgcccaggtggcggcgggcggtccggcggcgcagggtacagttcccgggcggggaccccagggcgcccctggcccccccggctccgcgcgccccgctcgggactatggtcctccgcgccgaggcaccgcccgagcgcgcactggccgcagagtggtgggcccagggtcggccgggcctactcccagggcaggcgggatttccgcgcctcgcggctgccacatcctraccatgaatcagccacagttgggaaaataaacttcaacttcgggtccgccgcccgggtggcaccccgaggtgcgcgccggcctgcggccccaccctgactgcttggcttccagctgcccacgcgcaggtgggcgcacagggagcccttcccaccccgcaaccgctggcaggcttaggggaatcagcctccatcacagctctctgttccttttgggtggggtaggatccaatccctgtacgcccccagacccacccgtcaaccctctaactggggagtcgccccaggagtgaccatgactaaggaggggaaggcggggtgaccagctgtgtccctgaccgtccccagtgccccctggggagcacaggcgtggggggtggtctgtctgtctgggccttctggggctcaagctccccacccagggctcccgcagctcagctgtgaccacagcattactgcccactccagctggacacaccaggaggcagagaggcagagaccctgcccaggcagggaaccaggaacccaggaaccaggccagaggtcaggcacacccagaaggcgctggacgtaggaaattcccttactgccagccctgcccctccgtctggcactggaatggagcaggatacttgccctcttccggcctcagtttccacatctgcactctgaagggtgggacagcagctcaggctgggacctgctccctgccgccctgcactgggaaggtggggtcccagagcagtgcctcagaccccgagggtgccacccagccaggggcttttggggtgtcggtgctcagcccccagtgcagcaaatagtagcattgggttccaggcctggggtctgagacctcacactgctcccacccctaccagggcagcagcaattttctgttctaaaagccaggttggtgcagtgggccctgcccaggccctgccctcccatccctggactgtcatgggccctgcagcccggcaaaggggatgtcgctagtggggacggaccaagtggccaggtgcgactgtagcctccacagccagggctcctgagttaaccttcaggtgagcgcccactttgtggaggagctgacggctgtcaagcgaatgacacacaccgcacatgtggggacgtggaagctcctacctgaaatagactctgcgccttccatcaaagtgcagttacttcctgggttggaaaagttatgcggttcatgcaggctgcgggaggggtgggtggtgactggaaagtgatgcggtgctgcctgtgggtgtggggcaggacgcagctggcccagctctggacggggacagtgaagtaagctcaagcccctggctttttgctggtgcctggaggtcaaatttccctgtagtcaggaatgagacctgactccctgctgccagcccctcccctacctccatcttgcaaacagcaggtgtctgataggtgtgtggttcatggcccagtggacacattacattggagaaggcacacccacctctgttttcaggatggtggacgggaaggccgggaggtggaggccacataggagccagtctctggagggtggtccccaggggccacagcagacccaggcctagtggacacctaaagtcaaagactaagttctaccaayggtgggaaggagagagggcaggggcacgggctccccgtcgctggaggggtgagcagggtccaaccacctggccccctgttagagaggcttccactcctgccagcctcaccctaggagggagagtcctgcctggtctgcctctgagcacccagacagcctgggtcctgagctggggtgaggtctgctcacacagctgccccccagcccagtgccggtataccctggcaaccaccaggccaggagagcagggcagaccggtggtgcctgtcctctcctgaggggccgtcctctctcacagccctttctaagctgtaattaaataaggagccacaggggttgcttagggtcgcccctctgagggctcatgtcagtccccgagggccagcctcaggccgggtctgtccactcaccattcacgccagcctgggcagggtctgtgtgctgggtgagtgggtgaggaggaaaggaatgagccagcctgcggggtccctccgcacggtctcccaccctcatccctcccagtgcgacgtgggtcctgcaggagcgttcatttcacaggtgaggcgcgggacagtcggtgccattttacactcagtgccatccattctgccaggaggtgctgataaagcccctactgtgtgcatctgcccttgtgcccagagcctggagcccagccccgctcagcacggtgccaggcaggtgcagggcacttactgggggtcagggtgcaaatgggctggccccacagagtagctggaggccgaggccccccagcccttgttgctaccactggggtaggctcagggtgctggcactgccactctgggaataggacaggcctgtcctggtcaagtagccattaccgggcctccaaactcgggggttggtggggcaggaataggcccgccctccaggcaaccacctgtgtcactccagagcagcccatgcagacagacaactgcccaagggccagcctggacccyggagccctcccagccagtcggcctgggtcacagcctgggtggaatgaccagtgtggtcacagcccagatgggatgactagcgtgaaggccctgaggaccttgccacgccaatggccaagggcaagggccaaggctgctttcctctttcgcctgcagcttttcccagaggcagcagggagggagagagaggtaccaggagagtcctgagagaagggccagcctgggctgccccgagcctctgtgccctcagttcactcctgttctcaccccagaagggtgactggccgtggctggggcaccctccatctccctcagccccaacctctgtctgttggaaatggcatggagacccagaaggagcagatgggcaccactggaggcctggccaggctcctggccgccgatcaaggcctttgcagggtcagagggacatgggaagatgctgccaaggcccctggccctggtgccctgggcagggaccctgtgctcccgtgctgtgacagcgttataccaccccacctgcttcctgtgacctggacacagtctgagcaccccaaggtccaaagtgggagaggtggggtgggggagagggagtggggtggattggagggctgtcctactgttacagggctctgccccgggcccacctcacagtgaaggcagaggcccccaggcagcccttggtgggccagaactcaaccaggagccacactgggggcggagggcaggctgtctgcttcccattttgcagacgagggctagtgtcaaagcctagctttgaggctaacccagggcacagttgaggagggagggagagggaagcagtggccgctgagcacaccagccccgggtagtggcttttctgtatcatctccaagcccccattcagctgctgtgggcagaggccagccccagcccctcgctctgcccagcgagtggccagctgcccaacacgcatggagtcccagtgggcatggccagtggtgcaggggtttgttcgtgcctgagctgtcctggccctcgccgggtcgggggtggacgtggccagctgtgcgaggagggccagcatcccactggcctccatctccccatctgtacctgggtccttgcaggccctgggacatggcctcggtgtacagcctgcctgccccaccctctgtgcccccgggtccctgttcctgctccaggcacagctcagactgtcgcctgcacccagcctacgctgggaggaggacacagggtgggggtgagggagtagccacctgtccccacctgcctctgcttccaccttgtgcacagacatgagtggcctgagaacgggagccccttggggacacccagggcccctgcctatgcttccatgtgcagagggcccccccggctgccccttccctgggccaggccaggctgtggaggtgcaggcccaacagtgaggggctgcctgcaggagctggcagagccatgggccggacccaggaggggccacacgggcggtgctggcacagccaacccaggtcagagctacggggccctggagaacatcctggccattttacagatgagaaaactgagtccagaatgggcctggctgtcccaggcccctggcaccctcgtgtcccagcaagcattgccaagcggcatgttgcacccacgctgaggatcttgtttgcccagttgggcctgacgggctccctggcactggctgcctggagcagaggtcaagagacgctgagcaggggctgggaagattcatgcaacgtcctagctccgtcccagccgccaaacaggaggtgggctgagtgggaaggcgggcggtcagtgcgtggttatgcactggcattacaggtggcatctcgtcaatctgtcagtaagctgtgggggtggcattgacacactcatccgcatttgaggacaggaaccaggagatcctatgggtcacaggccggtcagcrgaagagcccagtctcaccctgaatcagagccgtcccccaccctgggccctggtagcagcccctggccgtgctgggtgcgcaggctcagcctctcccccactctcaatctgtctttgttctccctgctcctgggaaggcagctgctagcggggatgtaggctgggggcagggaccatggagcctggctcgtgggcaggcagcgggcagccgtcttgtcttggcacaggcagggtgggggctggacaccctggggcccagctaggcacacagcaatcaggacctgaaccctgaagccrgggcctggctccaatgagctgctgcccttccccctcccaggttgagagaggctttttctgaggacagaggagggacctggggcctcggaggaggcatctctgagtatgtctggtccggggggaggaaacccaggtgggaggattctggtgacgagctcctggccacctgccctcattgcccagcagwccccctgcagggtacgtctggggcctgcgataggccagccctgggctcatgccacctgcagggcctgatcaggccctgtgcccttcccagtccctaaccacagatctgtacacgtcactcccagccacagccatggtaggtgctggcaggccctcaggcccaggaagtacttccatgtagccgctcgtccccccatgcctctccctgggcccccagactccagcccagacccctgagaacgccagaggtgaccaggccctcagggagcaccccgttggccctgctgtttgtgcagtggagacactgtggcctgtagaaggcccattcggtgactggcgagccgcccacccacccaggccctgcacaccctcagtgcaggtggaagcgagagctgggcttcctggcgtggggcctccgcccttcctgtcctcccttgcctgggctgcgcttgccgactctcctcccagtgacccctcctcccagtgagccggggcatttcctgtttgctgcatccccctaccccccctacagagtcaccctcctccctgtggcttccacagggctctgttcctaacccaggaagatgtacctyccccaggcccattgtctgccccagatcctggggacacagagagcccagctgtagcctggctcccgggccagtggtgtcccctggcgttcagtgctggccagcccggaccccccagccacctccaccgacacttgccagagtgccatgaaggacccctggcccccagctctgctctctgggtgacccaagcaggggctaccacygctctgagcccagcttccctctgtgagatgttgctgtcttttgatcattttgcttgctttcttcctcagtatgaaacgaccatattcatccgagatgcagcttcagttagtgattgggcaggtgtcccggtggtatcgcacccaccatgtgattgaaatccgtcaccatgcggcctgcttcccatctttgtcttctgatcatgaygctgctgagagcgcctttctgcccacctgcwcccagggggcccttctgtcctgctgtgggtcctcacagtggcccgggggccctctttgcacaacaagcggagttcaagatcttggagggctttggaggcaggagccttgcactccatccagatcttggggactgcaggtggcatgagggctggagtgcttcttgggtgtgagacgggccaggtgacagtgaggacacagccagccctcaccaaggcccagtgcgccccatgcccctggacacgtggcagtgggtggacccccatcctcacctgccttgaggccccctgtgcacagaccctccctgggccttgccggcagttggtgagccaccaggtcagtagaggtccctcaaggggctgttggcctggtggggaaggtgacacatgctggaggctcaaaggagctgggagtctgagtgtgagggaggggaatgggggtcatggtagggcaggttcagctccaggtgcctccaccgccctgcagggcctgggctgcccagaaccccggggtgctgccaggaacgcgtgcagtcctggagatccatgggttgccaagcagtggaaaaattggggctctcggaggagctaaaaatacagtgtggcagcccctgcctcctagttccggaatcctctcctgccgttctgcccrcccaccccgtggaagacaagctccctccctgcacccccaccaccaacgctggctcagggcccagaagcacccagccctgtgccagtgccagaagggcgacaccacagctgcctgcccactcccaggcagcagccccccacaggtgctcatgtgcccagccagtgcctgccctacccccgccactgcttcagggtccccagagccccttggtcccaggcacagtaggcagtacctgccaccccagggctgccaggctcagggcttggcctgttcctcgtggggagcctggacccaggcagacctctcccttccctaccagtggggacttcacaggggagggggctgtcccaggcagactcagaacatgtcacagcgggggcctccaggcccattggtgctggccgagggcataggagctcccacactgtgctgtggaaggccctcctcgcctggctcctgggaggcaagtgagggagccgaggcctgggggcttcagtggctggctcaggtccctcgcgtgctgggattcaagtctgggtaccctaaccctggcctgtgtgccgctcagaaccatgggcccatgcaggagcccccagctactctccacagctcggtgctgggcctgcctcaggagcccacactccctggctctggttttctgtctgcaccgcaggggctaggcacatggctgcaggtctagtgaaggccagcatggccctgtccccacccacaccacacactcagcttgactgttgactgctaggcggggcggtggcccggtggcttcccgagagtcagtgcagctgccctagcatgtaggcattcggatggaggtgctggcatcaccacaccaggctggccaggcccaggcccagagggggaccctgcctgccagagctagagtcaggggagaggcatggccccgtcctctggaagccccaggctattggttgacaaaagcaagtgctgaagaaccatggtgatgtcccactagcatgggtggggtgagcccctcagacctcagagtcttcatctgcaaaagaccctgccctgtgcagttccattggtgctggtggactgcckgggggggtggatgggacgccccttcttggtgccctgacccttttgctgtccaaggcatggggtctggcctgagccatgggtactgggccctgcagagcctggatggtcctgccctgcctcagccagagctggtgccggctgtagaaaagattgcgaagaacgcaaattcctgtgcctgtggggaggtggccacgccctacagccggggctggggagctctgaggacacattcctgcgctggtggccccgccaacccactttccagatggagagcagaggggaagggtagcctgcccaggggcacacagctcagcaatgagactcccgcccccttcccttctcagttggcactggcaccttccagcgtattgttccccatagccccgtgcccctgagatcagtaaactgtggattccttctggaatccttgcagaagtggacaccaccccccagtgagaacaggcaaggctgtttttgcagagctcgctgtagcagggagtcggccaccgccacccgcgtttagcagagactcacaggcgggcgggggagtgggaagcctcatggttttctcatatggataattcactctatacatagaaagctttttatagacacagggaaggctcggggatgccctgagagaggctgctggctggaatttgggctcctatgagatgagacaaaaatcacagaagctgtcagttattacccaggtcccagccatttggggccagtggccagattgcgggtcagagtgctgcatatatggtctggccgtggtgtgtttgcaggttcagcctcatgctgaaaagcagttggaacattctccggtgtagagcctgacggggggcctgggtgagatcgggcagccttggcagcaccacagaaggaggagagcagctccggcctcagcctccggggcctcagccggagccctgtctatgccgggccgcagcccagcgagaccctgttacactcactgcccccagacagcacccggtgggrcacggccagctggggcagctcagacacagagccaggcacccaggcacgggggtataggaacctgatgggcaggagggccagtttcctcccaccgtggctccaccccactgaccaagggggatcctcttgactggggtctttcaggggcttgcacagggcaaggagcgctgggcagtgccaagaggggcagtactcaggtcagggagcatcttctgtgtccagggacaccctggggcctggggcacggtggctctcggcggcactgcttgtctctaaaaggtcaggattttttgcatggagggacccccggggctcttggctggagaggacactctggatgccaggggccgggcctgggagagttcataactccgtccactcagcctgtgccaaggggacagggactccggccaatggaggcgggggaggaaaggagggtcagttctggggcctctttaggcagcaacagccaaggcgggtgggaatatatgcagaggcccggctgcctggctcttcatggtggtgggagcaaccctactgccaccaggaggggcgttggggacctgaggctgcctgggagggacccggctgtctctggcagctcagcggtcagcagcgatgagaagccaggggagcgtgaggagcagcccaggacagggcccagagtgggtgggcagaggtggccggaaggtcttgcgcatctgggtgagtggacggccactgggtgaccaagagggccgggcctgggagggtggcttaaaaccacagtgcrccgggggctccgggctctccgttctacagtgcccagaccaggaccccctgcagggaggaggggcatcccaaggacagcctctcaggatgctcctggcagcctgrtgctggaggtgcagargaagaaactgaggcccaggcaggatgagtgactgggccaaggtctgctggtgagggcccgggctggggacatgcagatcagaaccctggcttacacctgtcaggctgcctcctggaaggagcccactggccccctggggcagttggacaggyggagggctgaggggcggtgcggggagtaggggctggactgccggaaacaccaggcttggtcgtggaccaggctggggagtgggcctgagacctcaagggcaggtgctccaggacactctcccaaggcaggaggggaggaatagagcctcctggggaggcaggcgcttgggtgctcgaccccgctcagctcccgtgacctcaaatgcccttcagcctggggtcccctgacttaccgggttgggcagcacttgaagcaaagccatgtgggacctccagtcacagcccakccgtgcccaggtgtgggactgtgggcacagacccagcttctctaggacccagccgcctccagttccccacctgttgtgggaggtataaagtgcctgccttggaggtggtgggaagccgagggccagggtggagagtgctgggccggggtggaggctcagagcgtgtccctgccaggcccggccccctagctccctccccgaggctccacgctgctgttctcagacgctaaatataagatctaagccatacatggttgcaggagggcctgggatgcccctgaccttcgaggccagttcccagggtctgtggttggggacagcggctggggggatgtggtggcgtggagctgatgtcagaggtgcaacccgcctgtcctgctgttctgttttggggaaaggcacgtgttggggctcttctgggctgggcctgttacctacccgggtgttcccagggctggwgtcagacctgttgcgactgaatcctggtaaaaccctgagtgccaagggtttccgtcttcctgttggtgtgggccccctacccacatgcagacgggcagactgaggcccaggggagacctgggagtcgcccctcctccccagccacgctgctgacgctgtgggcaccccaggcatgcctgaggtttggaatctccctgtccatattgtccactggggcgggggaagtgccctggggtgagataaggcagcctcagatgcgccgttttgtcgcatcattaccgtgggtaatgttccagycaggggagcctcccgctcccccgagtcctccccaagctcatccggtcccgtcactctgcaggggccgtgctggcctcktgctgcaggtttctgagccggctcctcccctcccagccctgagcctcggggtcctcatkcgcgcagtagggcccttcctgcctgccgcctcggttgctgaaattcggtcagggatgggtacagggaagcctaagatatagtgggggacacagtgctacccctaaccctcagcatggcacgtgagcaggaattgcagcagagaaactgagaccgagggaagtggccccgcctgcgctggtggccaggaggacagcccccatcccctccccgctgacggctccctgccctctgcctgcagctcggcaagatgtcggtgaaggagggcgcacagcgcaagtgggcagcgctraaggagaagctggggccacaggattcggaccccacggaggccaacctggagagcgcggacccygagctgtgcatccggctgctccagatgccctctgtggtcaactactccggcctgcgcaagcgcctggagggcagcgacggcggctggatggtgcagttcctggagcagagcggcctggacctgctgctggaggcgctggcgcggctgtcgggccgcggcgttgcacgtatctccgacgccctgctgcagctcacctgcgtcagctgcgtgcgcgccgtcatgaactcgcggcagggcatcgagtacatcctcagcaaccagggctacgtgcgccagctctcccagggtgagycgcagtgtggragggccgcccaggcggacgctggggacctggtatgaggcttcaggcccaaaaggccccgggaggcctggggaaccaccaggaggaagcgcagccaggcaggcaaggagggcttcctggaggaggactggcttcctgggctcaggaaaaacatccacattcactccgagtctgaggcttccaggtcaccccagtccccgcactgctgcaccagcggtccccctgtgcccctctctgttgtgtggctctgccccacccttcctccccgtcctgtgctggctcccaccctctgggctctctgccctygtccacacctcggyggcaggagtcactgagtcagagatgcgaatccacccgagtggctccctacatacacctgcctagctccaagcccttcagcctcagcccagacagagcccttgaggtctggcccacacctactgatggtgtcaccctccacctcccagcgccttccctagcgcctccctccccgccctgtcccctactccagcacccaggggactcgttcccggcaggcaggcaggcccttggtctctgcctctgctcgtgttttctgcctttgcgtcctccaaggtcctgcgccgctaagcctttaagccccagctcactttcctgtcctccaggaagtctccccaggctgtgcccraagttagtcccggtcccttgagagaaacccttgctgtgccactccatggctgctgccaggtccyaccgatgctkggggacgagctagggtgggcagtgatgggcggggctgggcccatgggggcggcagttacctgtgcaggcaagcaagccagaggcgcctcgtttctgtcggacccaggggacagaggcaggtgtaggggccagccattctcagcccgtctccccagcctgggcctggcagggcccctctatggagtcttttgtgaattgttctcagcagggtcagatgagagacacccccagaactttcacagctccagatggggtgggaggcaggggttcataggaatgaggttgtgtctgccataaacacagtaagtgctgcattgggagaaaagctgggcccagagccagtgacaggatggggcagctgcctccaagcccttccctgcagggtctggccctgtggtccaggagcagggccaggacaccgaggagtggggcacctcgttgggtcccagcccactgctgtgggccacagacaagtgcccggcaccccctggcgtctgcctgccaggcccagagccccagccctgagcccagctgcacaggcatgggaaggggtgcattggccctgctgagcctgcccactccaccctggcagccctggacacatccaacgtgatggtgaagaagcaggtgtttgagctactggctgccctgtgcatctactctcccgagggccacgtgctgaccctggacgccctggaccactacaaggtgggcggcagggcctgggcctgggcacatggggctccctgcctgggtgtgccctgaccccgccctccccacagacggtgtgcagccagcagtaccgcttcagcattgtcatgaacgagctctccggcagcgacaacgtgccctacgtggtcaccctgcttagcgtgatcaacgccgtcatcttgggccccgaggacctgcgcgcgcgcacccagctgcggaacgagtttatcggtaagcacctgccctgggccgcatgcccgctcctgcccgcctcttggccagtgcatcccatgctgcatccacctggggaggtgggagcgccacaaaagctgcccccgacccagggccccagaggaaggcgccatctcgggcctgccaccacctgccccttcaatggacacaggcctcagaacgcctgggggtcaaccctggaccgttctcakttgtgagactggccaggcagtggagccggacagggggcctgagacctcgttctagccctgccagttctggcagtgagccctgagtaagcatcactgtgtgtccagcatgatgtctcccctccagagcctcaggtctctggtgtcccatgagtgcagcagrgcagggtcaggkgctctgggtggcagaagtgaaatggggaaggcggggagtggcctcyraaccctctgaccctgtccgtcccttcccagggctgcagctgctggacgtcctggctcgcctgcggtgagtccccactgtagcggtcctgcyggctccccctcctgctcccaaggccaggcccacctgccctttggctcccagccacctcacctaagcagcacctccagatggcagggaggtggctccctcggagtaaccccaggggtccagccagaagccaggtctcaggctagaatccagctcaytgtccctggcagctgcccacagaaactagggttgcagcagccatagaaaggacagaatgagctcatatcctttgcacaccgtggatggagctggaggcsgtgatcctaagtgaaccaacccagaaacagaaaatgaaatgccaataagagggaactacagggtggttcacgtggacgcaagatggagacagggacacgggctccagggcgagagttgaaaaactacctacagggtacagtgttcgtcgctacttggtgtcaggcccactagaacaagggtccccaaccgccaggctgcggaccggtacctggcctattggaaccgggccacgcagcaggaagtgagcggtgggcgggcattcctgcctgagctgcacctcatgtcagatcagcactgcattagattctccagcgcacgcacgcgcgcaagggatccaggctgcgcgctcctcatgacaatctaatgcctgatgatcgggggtggaacagttttatccctaaaccattcccgtcaccccagtctatggaaaaattgtcttccacaaaaccagtccctggtgccaaaaaggctggggaccactgccctagaaggcaaatcgcctacgttacacagtgtaccatgtggcaaacacgcacatgtacccccgagtctaaaataaaaattttttaaaaaagaaactagggttgccaggtactgtatgggacatgcagttcattcaggtttcagatacacaacagacgatattttggtgtaagtatatcccagatgttgcatgggatatacttatgycaaaagttattcattgtttgtctgaaattcaaattgaacaggtactctgtagtttcatttgctaaatcttgcagccctgctgggaacccacatagctgagaagctctatcccaggcctcagtcaggactgtactcaggggggtgtccttacacccagggaaatcagcttggaggagcccagggctagaatgcctggtgttgaaatggcctcaggggccaggcgcggtggctcacgcctgtaattccagcactttgggaggccaagatgggcagatcacctgaggtcaggagttcgagaccagcttggccaacatggtgaaaccccatctctactaaaagtacaaaaattagctggccgtggtggcatgtgcctgcaatcccaactactcaggaggctgaggcaggacaatcattggatcccaggaggtagaagttgyagtgagctgagatcgtaccactgcactccagcatgggtgacagagcgagactccatctcaaaaaaaaaaacagaaatggcctcagcaaagtttgcccacatgggtgcctgtgccccrccagtgtgggctgaagggggccggccctgcctgcrgagggctgtgctcattgaccagactgagatgactggcaagtcctaggcccagtgaacactaagtttcctcctgctcaggccagagccccgcccctcctgtatccatgcagccctgtggacccacctcaggtgtggtcttcactgtagtcacgcagcgcccaggggagggccttccctcccccaaggtcacggcccggttccattgtgtgccacctccccaggccttggtgcacgttactcgatgggagtgggcatactcgcccttccccttccccaggggcgtgcgggtgcctggtgacccgggggcagcctggcagggcgcaaggcactgacctgggagctgccactcttaggtcgctatccctggctatgtgggtcacatgtcagccacagctggctatggcctggctcagagtcccaggtgggctgagcggggctggtacactggcgctgacccaggctgccccgcctgcgtgttggtggtggcagcagcaggcttagcccacctggcccctcctgcacagagacctggaggatgccgacctgctgatccagctggaggctttcgaggaggctaaggccgaggacgaggaggagctgctgcgagtctctggcggggtcgacatgagcagccaccaggaggtctttgcctccctgttccacaaggtgggctgggggctgcagggcggagggcagccctccagggcaggctgtggccctgaggtccagaggctgggcctggaacggtcctccctgccctggtcagaccctgctgtgacctgggccatggtgccagctttggggtgagactccagggagcagcaaggacccaggggttggaaagggaggtggcgcctagagcgggcagcctgggggccgggctgggccctgggggcaaagccagggccacaggacccagaaggacggggctccaaagaccagtgcggcccacagccggccttactgtcctgggccccagctgcccagtccccatcaggtgggcttcagaggcctcagggcttggtgaggggctaagaggctgaattctcgtcaagctcaggccttcccctcattccctgaaccttgcagctctcatctgggggcagttgtgtccccaggtggcatctggcaacatctgaagacatttttggctgccacggctgggcagggggtgctgttggcattgagtaggtagagaccagtggttctgtttaacatcccataatgcacaggacagtcccacatgtcaccagtaccacagtcgctgaaactctcatctctagggatccgtgggaatagagggggtgatggggctggacaccctggcagacaggccacagtccttagtccaccagggaggggcyggctgctgacctgcaccccacactcgcccgtccaggtgagctgctccccggtgtctgcccagctcctgtcrgtgctgcagggcctcctgcacctggagcccaccctccgctccagccagctgctctgggaggccctggagagcctcgtgaaccgggccgtgctcctggccagcgatggtgagggggcggggcaggggcgtaggcacagcctggtgggcagacactgaggtcttagaccatgsrggggggagcctgcccttggccccaacccatcctctgcccaggggaggtggccgctttttcctgcctcttcctcaagcccccatccctccctctccggctcccttctcccttgaccctggacatcccctactgcagcccaggaatgcaccctggaggaagtggttgagcggctcctgtctgtcaaggggcgacccagaccgagccccctggtcaaggcccataaaagcrtccaggccaacctagaccagagccagaggggcagctccccgcaaaacactacaacccccaagcccagcgtggagggccagcagccagcagcagctgctgcctgcgagcccgtggaccacgcccagagtgagagcatcctgaaagtttcgcagcccagagccctggagcagcaggcgtccaccccacccccacccccacccccacccctgctccctggttccagtgccgagccccctccccctcccccaccaccccccctgcccagtgtgggggctaaggccctcccaacagcacccccgcccccacccctgccaggcctgggggccatggcccccccagcacctcctctaccaccacccctgccaggctcctgtgagttcctgcccccaccacctccaccactcccgggcttgggatgcccgcccccacccccacccctgctgcctggtatgggctggggccctcctccacccccacctccactactgccctgcacctgcagcccccccgtggcgggaggcatggaggaggtcatcgtggcccaggtggaccatggcttgggctcagcatgggtccccagccatcggcgggtgaacccacccacactgcgcatgaagaagctgaactggcagaagctgccatccaacgtggcacgtggtgagggtccccagacccccaagggaagcttcccctaggacgggggctggtctctgctggggagaggggcaggtggcacatggaacttgtgtgcgcgtcctgcccgtgcgtggccagggcagcctggcccttgctctgggctcggcgcctgtggttgaggtggggacgggggaggagcagggcaggggctacctctgaggacccccctccacatgctcccgtgagccagtgcatctggggtgccatggtgccctggggccctgctacaggtgctcaggtagggaggtagggtgcctgctgtacgctggacctggacctactgggccccaggcaggacatcctttagaccctctgggaggctccagcccctgcctgctggatcgccaggccccggggctgcgagagcctcactggccgtgtccccacccgacagagcacaactctatgtgggcgtccctgagcagccccgacgccgaggctgtggagcccgacttctccagcatcgagcgactattctccttccctgcagccaagcccaaggagcccaccatggtggccccccgggccaggaaggagcccaaggaggtggggacggggaggggactcagaccggggccgcctgcctggccaccctccggtaccagcctgttgggtggggggttttctagatcactttcctcgatgccaagaagagcctgaacctcaacatcttcctgaagcaatttaagtggtgagtgagggaggtrgcccccatcccaggccacggagcctcgcctccacctgagccttctgacttgggcccagcagtgccctctgcaggccgccatgggaagtgcacactgcatcccctaggcaggattgtaggcgggtaatagccccatgctgccccagctaggggcwtccaggctcccagggacagagcgctgggacctccccccacaaggccacagacaagtagtggctaaaccagtgggccctgactctcagcccccgagtcctttcctgctgcgggtgtccagcactggcccgagggagctggctggacccgacccatcctgcatctcctgagcagggcccatggagggtagcgagggtgggagtcagcctgggtccccttcaccgcgtgaccgtgggcaacaactcgactgttctgtgtcccccctgccctggccaccccatgactacgtggggaaaccctgccaggtggggtcccaaagaggctgggtgggggtgactcatgattcactcacccctgcccggtcctctccctgctccagctccaacgaggaggtcgctgctatgatccgggctggagataccaccaagtttgatgtggaggttctcaaacaactccttaagctccttcccgagaagcacgaggtaagaggaccacccccacaccccacccccagttagtgccaccaaccaagggagaggctgtcccgggggctcccagcagggagacagagaagggaggcatcccagccctacctctgccctgaaccgtgagccacagggagccatgatgggcactggaggggctgagcccggcgggcagtccgggagggcgggaagctggcatggggggatcccacatgccgttctcctcctggcagattgaaaacctgcgggcattcacagaggagcgagccaagctggccagcgccgaccacttctacctcctcctgctggccattccctggtgagcatggccgccctcagaccccagggcctgggccccaggtgggaggagagcaggaatagggagcagggcccagccagggaggagaagaggctgtgccaatggctgccccgggctccaggagcagcattgcagcggttgggcttctaaacatcactcgagccccacccccagtccttcccctcaaagtgtggggctggaggcctctggaggaattggatcctgctctgcgcaggcccgggagggtgcctgttggatggggcaggcggtggaaaccccctccctttgcccaccacccaagccagagccctgtgctgagtgcccctctggcagggacaggtggggggtgcaggccactgatccctgtctgtgccatccccagctaccagctgcgaatcgagtgcatgctgctgtgtgagggcgcggccgccgtgctggacatggtgcggcccaaggcccagctggtgctggctgcctgcgaaagtgagtggggccaagcggggcacgtgtgcaggagggacaggcctccgaaccggggcgggagggctgctcggggcccctgctactgccagtatcataatggctgctaagagcacctaagggtgccagccttcaccaccactccggaaaccaccctgcygccaccacctcggtgcacacacctactggacgcacagacacacgcatgcccaccgccactcgggcacgtgcacacacacaagcacactgccactctccggcacgcgcacacacaagcacaccgccactcaggcacgtgcacacacgcatgcacaccgccactcgggcacgtgcacacacacaagcccacaagcacagtcacacacatgcacacaggacacacagacacacgtacacacccccccaacacacacaccctcacatacatgtacagacataagtgcacacacacgggcaccatctctgaaaggggaatccatggggacctgccacagccactgggcagggagagggacaggtacggaccagtgaggcacagctcacgtctgtcaggcacactgtaggtgtccactcccgtcggtggagggtttgcagcccccaggccctgtcctgtgatccttccggtgctgggctgagcctggggaggagccagggagtgcaggggcactggcaagcaggaccacaccccaccgccagggcatctgggggctccgaaccaagagcccctctccagccctggctgcccctgcaggcctgctcaccagccgccagctgcccatcttctgccagctgatcctgagaattgggaacttcctcaactacgtaagtcaggggcagctccccatcccacctggtgccaggggctggtgagactcactccctgcccctcccagggcagccacaccggtgacgccgacggcttcaagatcagcacattgctgaagctcacggagaccaagtcccagcagaaccgcgtgacgctgctgcaccacgtgctggaggtgggccgtggtggcgggggcataatgggagggcttcaagtccccccggacctggggtgtagaggcgtagaggccatacccccatgcccaccactcaggccgccggtctccctgtctcagggctccgtctagagccagcagcctcagtcagagccacgcccccacccctcccagcaccccttccttcctgcagcactggctcccctgcacgagccttgtccctccccaggatacctgtccctgatctgggggacagtccctaggaaaagcagaaacatcacaaagtcatagccaggcccaagggaaagatttgagggtctggagtactgggggttttctggaccttaattgctaagggttagagctgggggagtgggaacagggtcatccccaggtggagagtatgaccacagtggatctcactggacgtgtcccattgcaggaagcggaaaagagccaccccgacctcctgcagctgccccgggacctggaacagccctcgmaagcagcagggtaggtagctcctgccagcccgcccacctcagccaggtgggggcctgacttcygtccccagscagtgaggtggctgcccgccagggctgggtctcacagctgcagcgcagccccggygccacggagccctgcccaatagaacacttcccttttgggacaggaccgggtctgccgtggcctatccccttctgacttaagcgaggaaacaggcctagagtgggcaagggctggccaggtcagggtcacaccacgggcaggtctaatacagccccttcacaaggtggaccttcacgacagccgtgagcaggctcgggcctccctcattgtatagatgaggaaacggaggcccaggaaagcagtgtcacctcctgggtcacacaacccaggcaggagggcagcctgggccaccccactacacagtccgggcccctagcacggagtycttcccgggctccacctgccctggaaggttctctggctcaggagctgctcagccttggggagaactaggcaagcaggacaggctgaccgttagggtccccgcccagatgctcacagggggctgagggtcagctggaacaggcactcaaccccaacactgcacgtgcagcctcagagtacagcctgcagggtgcacagtggggtgccggggggtgcaggggaggggctcccctgtcccagcgaggctgacgtcagccgttgctgtctctgcccggccctcctcacctttcaggatcaacctggagatcatccgctcagaggccagctccaacctgaagaagcttctggagaccgagcggaaggtgtctgcctcygtggccgaggtccaggagcagtacaccgagcgcctccaggcaagtgggcacctgggcctggggctggcgggagaggctgccctgatagagtgagctgggcgagtggctgtgctgtctcctggctccagggtggatcctggggcccgagtttccccaggtgtgcatggtcagggcacaggcccctgctccttstcagagaccaccgtcctcagggcctgtccctgtggccrtcaccctcccgcaactcagggcctcaccccgggtggtgcccgcgcggggctctcacgggactgtcacgtgcccttgcccccaggccagcatctcggccttccgggcactggaygagctgtttgaggccatcgagcagaagcaacgggagctggccgactacctgtgtgaggacgcccagcagctgtccctggaggacacgttcagcaccatgaaggctttccgggaccttttcctccgcgccctgaaggtggggcagcccggygggacacagcctgtctggctagagtggggtcccgaggcccctggccttccyccggcaggatgggcagaggcacctttcgtcgggccgacacagccatgtgggcccygcgctgctgcggctcagggagggggacgcccaggcccatggagcccctgagggatgccacgctggggtgacggggccacatctgccagtgcaggagaacaaggaccggaaggagcaggcggcgaaggcagagaggaggaagcagcagctggcggaggaggaggcgcggcggcctcggggagaggacgggaagcctggtgaggctgggccggctgggcggggagggggtgactctgggatccttgtctgtgctccagcctccccaccacccccagccctctaggtgggctccagggtcccatgccgctctctgagtgccccacgctcctcagtcaggaaggggcccgggaagcaggaggaggtgtgtgtcatcgatgccctgctggctgacatcaggaagggcttccagctgcggaagacagcccggggccgcggggacaccgacgggggcagcaaggcagcctccatggatcccccaagagccacagagcctggtaagaccctctcccactgcctcctcatggtccccttgccactgtccctaccctgtgcctccaggaagtcctcctgacttcactggaaagccctctcctctccctgggccaccctggaggcccctaagactggggacagccgaggggacaggtggtggccgctcagccctcatccctccctccactcactccagctcctccactgtaaccgcaggccctgccctcagtgctgaagcagcagtccagcccgctgggctccagagagatgaggccaggcccactgaccgatgcccttgggctcagagggtgctagaggtggcaggaaaggcaggcggcaaggccctggtgggaggaccccattcctggggtggctgcctcagggtgctgggaatggcatggcccagtgtcccccaccctgccacagtgtagacagaccaaggacgctgaggccgggtcctgctctgagacatcagaggaggctttctggggaggaggttttgcagggcgttcaggtagacagcggaatggaggaggctgcacytgggctggctcgggggcagggtgcctgcccttcactggtgtgtccctccatccagtggccaccagtaaccctgcaggagaycccgtgggcagcacgcgctgtcccgcctctgagcccggccttgatgctacaacagccagcgagtcccggggctgggaccttgtagacgccgtgacccccggccctcagcccaccctggagcagttggaggagggtggtccvcggcccctggagaggcgttcttcctggtatgtggatgccagcgatgtcctaaccactgaggatccccagtgcccccagyccttggagggggcctggccggtgactctgggagatgctcaggccctgaagcccctcaagttctccagcaaccagccccctgcagccggaagttcaaggcaagatgccaaggatcccaygtccttgctgggcgtcctccaggccgaggccgacagcacaagtgaggggctggaggacgctgtccacagccgtrgtgccagaccccctgcagcaggcccaggtggggatgaggacgaggacgaggaggacacggccccagagtccgcactggacacatccctggacaagtccttctccgaggatgcggtgaccgactcctcggggtcgggcacactccccagggcccggggccgggcctcaaaggggaccgggaagcgaaggaagaagcgtccctccaggagccaggaaggtaactcagggaggggccccgggcaccgtcccacgccagggcgctggcacccagccggtccctccccttccccattgggcactgcaagttccagcggcacccaggagaggtgacttgggtgcggcacgggagaggaggcggcagtgcgtccaccgcagggcggctatgtgggctgccgcggcccgtgcaactattcctccaacctactaattccgaccttcacgccacctccgttagggagtagggggcggacaccgggcaccaggtcccaggcaagtggctgccatgtggcttagtggccagagaaccgggcagccctcagagggtgttggcatggctgtcccgggccccccagccccacccactccgagtcagggttgcttctgtgtgataagccgttgagtgcrtttcttttatttggaagcagaggttccccctgattctgatgataataaarcaaagaaactgtgtgtgatccagtaaggtatgtacgcagccggcgctccgtgggggctaacagcagctgcagggcagtggggctggagcttgctgcccacacccctccgggacactaacctggcttctctccagcccgcgtggtgcgtcagtgtggccttgccgctcccgcagccctggtggtgggcttcccgccccrtcycctccctctccgcaggttacctgctcaactggtgcctcctgcaggcaggacgcaacctcagtgctggccccgggcatgcgggcctcgagagggcaggtggcagggccagccggactcccttagcaagcaggatccgggccctggggcgtgggcgggacctcctggctggcaggacaggctgaggttgctcctgtctggtgtcctggcgctaactgcagttccagtaaccctgtggctttcctgctctgtctgttggtggagggctatcttcactctaagtgtgtcaatggcgtggggccttctggggcatgtccccaggaagtctgtgaggagaccgggacagtcgcaagggcagatgctgccagggacaagtacactgcaacccccctcctgttggacagtgtcctcccaccccgaggccatgggtgggtctatggagaagcagattaccccccgcacaccgagtcttctggggggcgaccagccaaaggtcaatcagccaggtccgtccacagggctggagaggccaatgcatccagctagacaggaccagcctgcactgggtggaggaggggctagagcagagaaccagaaggtccagcccggccgatcatgagctctgtgagcccaggtcgtggcgtcttccagcacctccagccttgctcagagccagcccggtgtcggtgcatcacaaatatgctgaccgctgggcctggggcttaggctcaaggtgcacacctgaggtctgctggtgcccatcagaggcaagagcagtcgtgaccccggagaagcttctccggacagcttgtcctcgctgttggggcacggccttcaccctgggttccagcttttgcttccagggtcatcttccgagtgtggctctctggtgtgaagcacccacgtgtactttttagaaaggtgctggcatctcccttagaggctggaacttggacttgctggccctgagtgtgaggaacagtggagcatgcaggtctggggcgggcggccacatctgacaatggtccagtgaaagatggacgtgtccagtgccagctccacgctccacctggttccctcctgaacctgctacacgtgcttagcctccacccgccccagctcctgccacgcacgtggctgagggcaagaggaagaagtcctcttctctccccaactttttattttttattttttttcaagacggagtctcactctgttgcccaggctggagtgcagtggtgcgatctgagctcacagcaacctccaccttccaggttcaagtgattctcctgcctcagcctcccgagtagctgggaccacaggcacacgccaccacgcgcggctaattttttgtatttttagcagagacagggtttcaccatgttggycaggctggtctcgaactcctgacctcaggtgatccacccgcctcggcctcccaaagtgctgggattacaggcgtgagccaccgtgcccagcccccacctttttatttagaaaatcttcaacaccacaggaaactgcatagatcagaatgaacaacaccttctccccgaaattacaaccatttgccaaaaataccaaaattgtgaccattttgctacattgcccccctccaactgaggcatctgagagtttcttataaacatcatggcactggagccctaaactcgcccacagacacctgagagcacagccgtcttcctcagtcccccccgggcagggtgcgctgccgtcctcccagtccgcccccaccgggcagggtgcgctgccgtcctcccagtccccccccygggcagggcgcgctgccgtcctcctagtccgcccccccgggcagggtgcgctgccgtcctcccagtcccccccgggcagggtccgctgtggggcgcttcacgtccacgtgcttctaatactcggtcccagtgcagatgtgccacttgccccaataattccttctctagttgttgctttgttgtttttgcaaacaagattgtatccagagtcacatgctgtgtttggttatcatatcacttcagtctcttttgttctagaacattcctgcccctttttgtcttgtatgacattgacgttctggaagataacttcactttgggtttgcctgattgcgcccccaagtaggtccaggttgagttttggggcaggagttctaccccaagggatgccatgtcctccccagctgggtggggacgtttgtggcagcagcgctgaccacggctgcsggggtggtttctgaacctccactgcacraacaccacgctgtctggttaataagcaccggtggtgacctgtggaaccaaccgctgcagcgcggttctgtgttcgccgcccctcgtccgagcgttcccccctcccctccctttttccatcacgtgagttttgaacgtgcagtaatccttcacwgccactgccgtgcatttgatggggaccagcgggggccctgagcrcttcccatctttggcacaagcccctgttcctagctcaccccagacttgctgatccccccatccctgcacgggccttggtcttggccatttctccaggttccctgagtggggaatggtgctgagaccctcctttgagtgattgttttggayagtttttgttttcttgctgtctgtttagagtagtggttctcaaaccctgcttgggccatcccactggggagctgggacaccacctggcactgtggtggcagtgggggtgacactcagacaagggccatcgagggcccctggaccagaaagcgaagagggcrttgggggcaggaggcctgtggggccatgtgtgggggccgtctgggtggcgggagctgttggggcrgggctgagcgccctcagcagcccactggagaaagcgctgctggggtcctcgtgtggggcccagggcccgacgtggaagcaatggagggctgcagggggtggcagtggggatgaatgagtaaggacagagtgcagcctgggtctcagacrgggggtgggggacaggccacagagattccctatctcagcagagaggagacaggctcaggctgccacgccttgccaaaacccagcctggccaggccagcccggcaccttccacctagataagttgtgctgctccagagaaagagcctggggtcagagtggacctgcgatgcatggcacaacctgctggacagtggcgatgaggggttcagggacctgggcacccagaagcgggcacctgatattgtacccagcaaaactgctcctrataatgtcattttttctctctcttacaggcctcaggcccaggcccaaggccaagtgagagagcccaggccacaggacatgctgccattctgccaagagaggctcttctgggggccaggctgggactgggccccggaaaccaaaactccgtgccttacccagccggggccctcctggagccttcttggggtgttgtggctgggaacccgacaggcaccagtgccctgccaggcctggtgccctcctggaccgcctgcacgtgccagcctcccacctgcttcctaaaggcaaccctggcccacacccgcatgcgcccggtgcagcctgccaagggccagtcggggggtgctgcgtcctgccagtgtccaccacagctctgcctgcccttcagcccagcaaggtttaatcaaaatgcaatgctttgcaagtctttactgcttggaggtggctgagttgggggccctrggcaggggtaagctggcaggcagtgccatggcaggccagggtcccctcccatggggtctggcccccgttccagcatgtccagcccctgaagttggagtkgggggcggtctgcctttgctgccactgccaggcctctgccctgcagctgaaacttggccatcacatcaacagaaaacccctcccagtgccagctgcccagcgtgggcaggccctggggacaatacaggtccacctgaggggctgcagggtgacacccagcagccgctgccccctcactgcccacccagcgagggcagcctacccgagcctgccccctgccaggtgtgtgccctgaggctggcggctggatgcgtggccaataaaaagcagacctagcccggtgtgcgactgtcgtgttcagaggctgcgggagtgggcggtggacgtgggctcccacaaacatggtgagcgctggacaggccccgtgtgaacactcactgttgaggggcccccaggccccgtgtgaacactcactgttgaggggtccctgggcccccaggcaccgtgtgagcattcactgttgagggtcccccagtcccccaggccaggggctgtccctggagccctcaggaggcagtaagaaacatctagaagagggcagacccagtggtgaaccgcatccaacagtggtgagatgggtgcagctctacaggggcgtaatttacaaaccaccagactccctggttatgtgtgtgctgcggtggtgtttgctctccagcagatcaagtttgtgcaatgatccattttgagaatctctccgtcaccccaagaagtcctctcgcacccatcagtccgaccccttccccgtgctcctccccagccctggcagccactcacctgcactccagacgctccagatgtcatgcatgtctcctggcttccttcggctgttttcacgcgccatcctcacggcaggctgtatcaggacttcattccatttcatggctgaagcacattccattgcatgcagggaccacattttgtttgtctgctcttctgtccatggacatctgggttgcttccagtttggggcttctgtgaatcctgctgctgtggacatttgcgtagtcctcgtgtggatgctgctgtggacgtctgcgtcgtcctcgtgtggatgctgctgtggacgtctgcgtagtcctcgtgtggatgctgctgtggacgtctgcgtagtctcgtgtggatgctgctgtggacgtctgcgtcgtcctcgtgtggatgctgctgtggacgtctgcgtagtctcgtgtggatgctgctgtggacgtctgcgtcgtcctcgtgtggatgctgctgtggacgtctgtgtagtctcatgtggatgctgcgagttttcgttgctctggggtagattcgtagcggaggaacaactgggcgacacgctaagtttatgtttaactttttaagtaactgcctaactgttttccaaagcagctgcaccatttttcattcccatccatgctattgtttttcagttaaatagctccactcctccccctccccaccctccacagaactgccagtaaaactggactatggagtattgggtggggtcacctacaaggtcatctgcagcaagtgagatcatcgcccctcctgcctggagaggtgggactggggaccctgtgacaggaggagctgcccttcctggagcctggtttttctttttcctctgtgctccatgagaagtcagtttagtgggctacagccagcaaaggaaccaaaaccaacaggagctctgggggtgccttgcatggcgaggctccgtggctgcacgcgtgtatgcaggtggctgtgggtgtctgtgtgtcctgggccactgtgtgcgatggtcccactgggaggtgtggcccccaaagagtggaacccacaggtggacacacccatgcaccctcgttcttgcccaaggtcacacatcgagacagcagggcccagatggatggccccaagctcggtggctcccgtgctgcccacacctggggacaggcccactgtggggggtaaggggtggaggtgttctaattcgggctgagccgtgtgactggcaggggccccagctgttgggcctgggcaggactgtttttagaaaagccccaactccctgcccctacccgggcccgtggctatttatagtccgggcctggagaagtcagtgagtcactagcgttcgcctctgcagggtcagtccaagcccccttagtgaggtggtctagcatgtcccccagtcccccaagcctctatctgacatctgctagcccagagccccaggggtccccaggaagggctcagagctggtggccccccccaggccttggcagcacctccttgtctgatgggactttgtggttcctggtggacatttaacattgtcggtttctctcatctggaaacaaacctccatgacgctcttggtttctcctgttgcagtctgcctcttccctacctgcacagctctctgctgtgccccaaattccctccttgacacccccagacccactgccccaccctcaggtgcagccccttctcagcaggctccaggttctgccaaatctcagagccctccaaccctgctccagccccttcccaagctggggccggtggtctgttcacccccgaccagctgtcacccccaaggtggcactaggaagttcatgcatgaagactgcttttccactgaggccccactgactgcttggaacccatacaacggcattttccccgcaaggatgctgagggagaggaagtgtcgatgtgcccggtggaagaagaggggactggggacatgggtgcagggggcaggaggccaggcttcaaacagcccctctcccccaggctggggcacggtcaggtgccaagagaggaggggtggggaggctgcaggcaggggtgggcagtggtgtccttggctgcacctgaatcactaactcagtgtgagcgacctttgctgtgacaggcccaagctccactccttcctcacagggagtgtcccgtctccatggactccctgtcactagccttggagttgccctgagcccaaggagcctcgtggctccaggctctttggcaactgagagccgtcagggagggaacaaaggaccccgcctccctgctctgaagcaagaacctgattctcttttccgcccttggggccccaggacccttctcttggccaccagggctggcttcctccaagcctcatctacttgggaggggtggggcgggatgggtgagacaggacaaccagccgggaacacgggagcctcgcagaccatcgcctccctctggggcctagtccctccacaggctgggccgggaaggtctggtgtgggacctcttgggaacctgggccccacggtggcgtgcatccctgggggttgctcccatgccagccaggtgacgctgacaggatgggtccctttaccccagacttgggtgctgagggccggagctccatgctggagcccgcctgctcgctacagccaggcccgagccacagcgcgcccgggcgggacgcggggcccctgccgtggggcagaagtgcgggcagttgcggggacacaaagtcctcggagaggacgcgctgcgcggctcttcgcggccgccagggggcgcgcccgcgcccagggcactcggggttccacggggggcaggtgcgctcctcgagagtgcggaccctctaggtggggtgcaggacgcagctccccttttgcaaaccgcactccttccctggagggaacgaccacccctgcagttgctggaaccccgaagtcctgggcccggcaagggcttggtggggggtgaggtcgcggtgcacaagccctggtccccgacgggctagcgagaaactgcctccgttggcaaattcgtgggggcggctccccaggccatctgcctgcctggccgttggtccgtgcggcccctcacccctaaagtgctcgagactcaactgggcttcccgggcagcggcgagggggcggggatgtggcggccggaggtcaccggggcgtcactgcgcccgccctggccctcccccggcccgccccctgccccgccccctgccccggcccggctccatttaatggcgcggacgccggcggcggcgggctcctggccgggccagcgcagcggaagagccaagccagcatgtcggggacccgagcctccaacgaccggccccccggcgcaggcggcgtcaagcgggggcggctgcagcaggaggcggcggcgaccggctcccgcgtgacggtggtgctgggcgcgcagtggggggacgagggcaaaggcaaggtggtggacctgctggccacggacgccgacatcatcagccgctgccaggtgcgggctggggcgccgggtccctcccccaccgcccagcgagcccccctcccccgacccagacggcccctgtcctcccatgccctggccggtcactcacccgcttggatgccttccttccgggagcacctttcccagggccaccccacccacgcacgcacacgcaccactcacacaacccccgacccacacacaccgccctccttccacccacccctactccaccaccccggcagcgggccagggcacagctataaatacaagtcgctgagttggggacacccgatccttagggggtggcgcatgccatgggtgtgacgctggaccctccatgggggaaccagaggacccagccccaggatggtttgaggacccccaagacaccccccttcctcatttacagtgatcacctggggcctgtctgggtctgggatagggcttacctggctccccgcaaggtctgcaggtggtggagggggtaaaagctgcctgctgggtgggggtgaccccggtgagtcagccaaggagaggcagaggtggaagggggccaggccgtcctggggggcaattggggccgcgcctgagggagggtgcttgggacgatcctagccagacatgggagagggagggccacagacttctggccagggtgaccccgtggctggcagtgccaccgaggaggccagacctgctttgtcccccagggcccagggctgggcctctgccagccggcagctgctctcagcgcccccatctgttctgactgagctgcacactgggcactctctcgggccgccaccctggggctacatgccccatgccagggcagccaagtctgctgcccatgggctgacttacagctccaggcacaaaggggtcaactttgggatgcacgcgtctggggtttggagcctgcctggggctgctgccaataatggaacaagggcccccgcaccgtcccttctccgggttctgtggcctccttcctgagctccagagaggagggctggggcccaagacgaagggagtcagcccagcaccctgtgtggctcagggctgtccgagcccctcctgccggaagggactgtggcttcctagaaagttcttcctggaacggtgggggacctccccccttgctctccgtcctaagcagcaggcaagcgcatccctcgctccagagatcccccaggtcctagaggtggtcctcagcccatgctccctccacactgcctctgccccgccaccttgtcctgggccgccagggggcatgtccagcgctctactgctcttcaccctccagggcgccctcagcgtggggcagccccggcccctgaccctccttagacctctctgctcccgtgaggcccaggcccctccctatgagctgccagctctggtgggcgccatgcacttctgcagggcgggctggggcccccacaggtgctgtacacagcattcacctggctccgcgctcccagctgtggagatggttctggatctgggcactccctgctgtgccccccacccagtccccccacagccccgctcactcgcagctgcacacgggagcacggaggatgcagcaggctggagcccatcccgcactccggccaccaggctgcccccgccaggccacccccaccaggccaccctatagcctgagggagcccctggctctccaagtgagtgggaataaaagaggtttgtccctggagcccacacctgtccccctgcagcctcctcacgagccagtgaggcaggatcatcctgaagagctccttcacaggggaacagaggctcaggcgtggaggaatgagtcactgccacatttggagccctcactggtgccacgtgcccaccatgatagcccagggcctggccctttgtccccacctgcgagtgcggggaccgagctggatctcagcggggcgccgctctgcaagggaaggtcagggactggtcttctttggggccccagccccaggctctctgcaagtgctca

SEQ ID NO: 97292 - DNA, 39884 bp, Homo sapiens
tcgaaacttaggataaatattaaaaaattaataagctagtttacatttttttttttaactgcaaagtctgaaacctgttattcatacaacaccaacagctagggtaggcgaggtcctgtgggttcgggccatgatggggctgaaaggaccctggtccggcatctcggtccttgttccaggaactctgtggccaagacagtctgacaataagttattgcccacagaggatgtctaagtctttgtgtccactctgtgatcgtgatctagaattttctaccaaggcttgatggggaactaggatattcttctgcaatgattcagaattttacagtgtacctttatactttaataagtgaattctatatatggtagtttggtaggattctgtgtagaagtgctttaggaggtgattgaaagctgtagggacttaccatacggttatgtattgcttggtgatggggtataaaattgtcatgtgaacatcttggagtgcacttacttagctgatacagcccacgacacacatatgctttgtggtatagcctgttgcttcgaggctacaaacctgtacagtgtgtgactctactgagtactgtaggcacctgtatgtaacacaatggtaaggatttgtgtatctaaacatatctcaacatagaaaaggcacagtagaaatgtggtcatatgggaccgccctcgtacatgcaggccttcactgactgaatgtcgtaatgtggcgcatgactgtgtttaaagatttgtccaaatgcagtttaccaggataagcctggaatccgatttcaattgctgtcttttaaagcaggtgtggcaaacgggtggtgatgtgtgtgccagctccactcggtggtggccccagcgctcccatgctccgaaggagtcaggaactggaaagggtacctgcctggagcagtttgtgtgtgtgctaaggggtggggaaggcggggactgggaaccatgtatttgcagtccatgttgacacatttgttgcataaagtcatagaaaacactttcctttaagagtgtcttaatttttaccatgaaatatgatacctgaaaagaacaagaaagcaaagtggaccttcattatacagctaacttttttaaatttaaattttagtgtgcttctaaaattggggataaaaccatccatcaattactaccaagtaagtcttgcttttgcttcttttctcgtgtgtctctcccggggacctccagtagggccgtttcagcctctgagtcaatgggctgtaaattgccccagtgcaaacccccttcctacttaaatgttatcatgtgaacagattttatttgcattttattttcctgcgcatgttgagtaggagctgaaggctgcttagaccagtgatttggaagcacagatttcatggctccctttgtgagaagtgtgtgctccagggtccggcagagcaggtggaatctgcagtttgaagagtcacattcacttttataacgtagtcttatatttgtttgtggtttgttttcatgataaaattgtgatttgttttatgataaaagaaactatagatatttaagcatgacaagatgttattagctggtaagcatatacaaaaagttgctttttgccaggtgtggtgactcacgcctataaatcccaggaccttgggaggctcaggctggaggattgcttgtggctagaatttcgagaccagcctgggcagcagagtgagacctctagaaagaagtaaaagtagctgagcatgatagtatgtgtctgtggtctcagctattcaggaagctaaggtcagaggattgcctgcgcccaggaatttgaggctgcagtgagccatggtcgccccactgcactccagtctgggcgacagccagatcacgtctctttaaaaaaaaaagaaaaagtagttgttttcaactcttggttgcctgtttttgtaaacaaaattgtactcctttgttacctggggatgcttgtgctcccatggtgtagctgcagtagggaccgatgtgtcatccacaaatcccgggatatttacgacgtggacctttacggaaaatgtttgcagactcttgccttagagaaaggtatcagattctttgagatagttttcgtatttatcacaggttgtggatttagaaaaaggttgaaagtcactgatcttagtagttctggggcgatggctggatgttgaacaattattttggtatcttgactgtttgtgaaataaattggcaacagtgtctttgctctcatggtgtctgcttacctgtgcagccatttttccagagtgtggggagcagtggacttgaggaaggagtctaccagccctttccagactccccctcaaccccaaccccaggaagccgtaagatgatcgcttgcagggccctcaccgtcctcacctggactcatgtgcgaatagatgagggacatgtgcctgccatgtttgcccagagctcggtgttcagggaactgattacaggggtggcaaaagccacaggggccacacatttgctgagctgcttccaggtgcgaacggcgcttgtttgggcatcagaaacagcacggtggatactcggagtcctgtcctttgaaaggagtttgatttatcatcaggagaaatttgttgcttttgcatccagcatccagccacgtatccactcatctgttttatggggaaatcagggctgcgggagcacccaggagagctgccgacccagacatttcctgggaaatgcgttgctgagatggaggcctgcagcctgcccaggccctgaggggagtggttcagtggagcagagctgggggctgggggctgggagatatgggaccagttgcttcttgagggggctcaggggcagagcaggagggttgggaaggggccgggtgggagccatagacatgaggacctcatcctccagcagcgctgagctctgagtaggccggggtgtttgcttgttgctgtccccgtggtactggggagaggctaggcacagagaccctccgagtaggtcacatgctgggggaatctgggcctatggctatgcagctggagaggaagggatagtgtggggagcttggacttggccgtttgggacagggggatgggagaggcagaggtcctgcctcaggcctccataggagtgacatttgctggtgtcagaagcttggcaagaggggaggatgatcagaccctgcatggacagttcgaattggagctctctgcagagtccaggaagagagctctggatgggagggaagccatggggtggaaaagatagcttccaatggaaggcagtgaaaactcgccataagtgaaggagaagaaggaggccaaggagagggggcaggaatggcagccggcagccaggcggtcagtggagcaggtgctcaggaggcccacaggagagcttcgtggaaggagtggacagtgtctgaggcaaggggcaaaaggcatctgctggagctggtgaccccagcttggtgccccccaaagccagagtacgaggctgagaggatgcaggtgtcctcctaggaggtttgagtcagaaggcacgaggcagaagcagtgggggaggactccctcagtagagcgaggaggaggcccctcatccaagaggaggttggagcacaggggggtctaggtttgcagtttcgggaccggtagctgaggggtcccagggcctttcttctgtgaaggagaatgtgtccaccgtggggagggggtcgggagagagagatacttcagagtggacagggctgagaaagctttatgggccgcgaaaggcagagtagttgttggtggatgagggtggctgtggcaggtggcgtttcaggtgagacagctcggggcccagaaagacactgggaggaggagagctctgctctccagagaaacaggagcagagaggaaaacagagccgcagcgagcggcttgtggtctggggatgaagcccaggttgacagcatcctctgcttcgctggtggaggtgggggcatcattctcacacctgtgctgggtcctgtccctgccagccaagggagaccaggaccctgccactgttgcgctcaggatagtccagaactgtcagatcttttctgttgaagtttaatttctaatacacttgtatttaaaatcaggttgcagattttaaagatgcccttgccagagtatatggagtgatacccaaaatccagtgccttccaccaagccaggttagacagttatgttttgtcttcctttttttctcaagaagacaggttctacttttctgatggccttgtcttcaccatgcagttccctggggcagacttgtatttgtgcatttgtgtctgtatatgtgggcatgtggtgtgtgtgtgcatgtgtgtgtgtacatgcatgtgtgcatgtgctgtgtgtgcatgtgtgtgtacatgcatgtgggcatgtgctatgtgtgcatgtgtgtgtacatgcatgtgggcatgtgctatgtgtgcatgtgtgtgcatgtcctgtgtgtgcatgtgtgtacattatgtgggcatgtgctgtgtgtgcatgtacatgcatgtgtgcatgtgctgtatgcgcatgagtatacatgtgcgcatgtgctgtgtgtgcaagtgtgtacattatgtgggcatgtgctgtgtgtgcatgtacatgcatgtgtgcatgtgctgtgtgtgtgcatgtgtgtgcatgttctctgtgtgaacatgcatgtgggcatgtgtgtgcatgtgtgaatgtgtgcatgcatgtgaacgtgctgtgtgggcatgtgcgtgtgtgtgtgtgtgtacatgcatgtgggtatgtgctgtgtgtgtgcatgggcctgtgcctctgtgtgaatgtgcatatgaacatgttcatgtactgtgtgtatgtgtgcacatatgggcatgttctgcatgtgtgcacaggcctgcacatctgtgtatgtgagcatgcatgtgtgtctgtgtgagcatgtgctgtgtgtgagcaagcatggtttcttgacagcatgctaggacagggtttgtcttcttgcttatctttaacaagaatatacctgttcttttagcaatagggtactgttgcccttttggcctacaaaagccatttcttctcctaatatcttgatagatatgttgagtgctgttgtatctgtgtgtaactttgttaattttctctaacataaaagcagaggcttttcaccagggcaccaggctggcctctggtggtgaccaggggatccaacccccaagcccagctccactgcccacaggcgagtcacctggggccactccttccaatttagtgcacagcagccttctgctcaatgaaggggtccgttcttggaacctagaacctgtggtgtggagcctctgcttttgttatcttctaaaagttctaaaagttcatgatcttaagaccttgatgataatccaagatctgaattctaaagcgtctttcattgtttacttttaggatgaggaagtacagacaattggtcagatagaactgtgcctcactaagcaagaccagcagctgcaaaactgcaccgagccgggggagcagccgtcccccaagcaggaagtctggctggcaaatggggccgccgagagccggggtctgagagtctgtgaagatggcccagtcttctatcccccacctaaaaagaccaagcattgatgcccaagttttggaaatattctgttttaaaaagcaagagaaattcacaaactgcagctttctaaaaaacaactccaaagtgaagtctgtttattttgctgtttcccctccatgcctgtgaattggatgttgtggtccctgtagagtgagtgcatgtggcgtacacggggagaaaggagctctcccacgcctgagtggctgttttgtgcttgggataaagctcacagattgtttttttttttctctattaaactcttcagtgccctggtagatcaggcaggcatacttggaatttagacagatggcaccgattcaggggactctcttgctcgagttttcccctcggagcctgttgccttcttggcgcagggaccctgtcaagacgaagagctccacgcatggcaggagcccacgctgatgcctggtgggcctggggggtgtctctagctcagactgggtctgttccatgtgaccagagccccaggacatcgttccttagccagctgctccgttgttggaggcctggtgtggtcacaggtgtgtcctagaacggtgactttgcccctcctgccctaggagatttgggtgtattcacagagcagccatctcctgtctccgtcagagcagtctcttccaggttactggaaggtcagtttctgtcaggcctcacttccttcttatcagagggtagccaggtccctgcactggtatctatttagaaatgtacatggagcccccagcgaaatgtgcctacattgtgtgttccagaaccggaggtacccttaccttctagatatgtgatgacatggctctcacgtcaggcagactgctgcacccacgctctcggcctgccgtgcagggatttcactcgtggagtgaggcatctgggggctgtgcagtgaggagctttccatgtgttgttaagacaacctgttagcattgtcttctcccgcgtctcctggcctcttctctctttaaatccttttctctgtttgtcttaatcacattaacgtcctatttatgttttattcaatatacatttaaaatagaacttactatgtgccaggcattgtgttcaacacgtgaaatatttaatccttagaataaccatattgtcagcataatttacaaaaaaaaaaaaaaacagctgtatcaatgcctgtgaatattcggctttactcgcccatttaaagaagagattttcaaattggctcaaaccaaaacctcacttcatggtgtctacaagacagtctgaaatgcagaatgttcagagagagacaaaggtttaccaggcagatgggacggtgagaaagtaggtgtcgcagtcctgatcctagactcagtggcctctgcgtcccccgcaggcattaaaggagacacaggacggcctctggccctctggaaacaagctctgcagtaagagcctgagacaggcagcacccagccaggcctgacagcttctgcagacagacagagtgagatgatgggggatttgatggaagcagtccctgtattttgtctcttctgtaatggaggagctgagccctcttctgcaagctgtggggaaggctagcggagcccaagggtccagggtccccaccttgtcattgtccctcggcccttctctgagctcatttctgtctccagtgtttttctgttggcttggcagggcaggatttgtttctgtcgggaactgatgatttgtgttttgatgcctgtgagagggacaagatctgatttgttttgcacctggaagggcgtgatttcctgcatttgctctgcgtcctcagggagtgggtgtactttagagttggactcttaagcctcagagtcctttaaatgatgtcaattctttttttttttttttttttttttgagtcattttgcgaacacagggatcaaggcttgggttttatcttcattattcccagaggagctggtgaatttgaacagacttcctattcaaattgcatttattttatagccttggggggtcaaggaaagcagctcttcagaggctgtctgcagtcggctggcctttgcggtttttaaagaagccattcttttttttaagtagcgtgtatttattatatgagtgtgagcatttgagagcggatggggacgccaacaaggtagcatcctggtgggaggcatgggctgcggagtgctggtttcctgccattgtcacgtcagctaaatggaagaaggcactggtgaggggctggatggttcaaaacatgagcacaagcaaatgcttggctctcttaatattcctattttggcctagagctcaggagcaggtagaacatgagcgtttgataacctgcctcagatcatgtaagtataaggcacttatgagccrcaggagacagaaggggaagactctgcgtttaaggttcagtgatggagatcagatccaagcacatgtttttacatcattaaacaagtaggtcgtgcattttccagattcaactcaggaagatgcaactctgaccacacggttctcgctgtaactgggcggaggtgactgagaaatgcctcccatgtgagcggggtctcaggctcgtatgtgtggaaggaggagcaggccaggctctgggatcagagctgggggtacaagtgtctcccagggggacaaaggagcaggcgcatctcaggatggagagcagccaggaggggcagctggcccgggtctcagccagagcaggcgtctgcctggagcatctctgcggcaccatggaaaagaggacccgtggactaggccacagggatgagtggaacttatggtggaaaaagacaccataggtaaaagcgagacaagaaaaccaggttcccatgaaactccttcagaccagccccttctcagcagggctattgctgtacccaagagcatttctcttggcctgggaggggacaatgctttgtcacctggaaagcaatscctctctccaagctagtagtgggagatcattatgcgcttgaataactaacagtagcaattgtatcatattcagaactagatatcttttcttttcttttcttttttttttttttttgagactgagtctcactctgtcgcccaggctggagtgcagtggtgcgatctcggctcactgcaacctctgtctcctgggttcaagcaattcttctgcctcagcctcccgagtagctgggactaggcacgccaccatgcccggctattttttgtatttttagtagagttggggtttcactgtgttggccaggctggtctggaactcctgacctcaggtgatctgcctgcctcagcctcccagagtgctaggattataggtgtgagccaccgcgcctggcccaggtatcttatctttccaccgaaacttttgcctccatctcggtgaatgacatcaccatccgcttattccaggtagaaacctcaaagtgaactggaaactttttaaaaaaattttgcctaaattgtgaaagtattctgaattatattcagcttatccttctcattactgacttagttcaagcctcagtctcccatctgggccatgcattgactgccacgccacctgactgtcagtgctggacgctggcaccgtgtttgtgccactctccgtaaccaaccatggctctctgctcccagatcacrcctccccagtatggcggctcagggacattccctcaatccctcctgccctgttggcagtgcctccacccactccccacagcccatgagggctctgcttagcacttccttgtgcctggattctccgcgcagtttgggtggcctggagtgctcttctgctcacctagtttagcaagttccatgggatatcaacacccagttccatggttggccgttaagagttcttttgcagtcctgggtggctctgcgcctccacgcccagggaccagggcctcttctcttccagctcttgttgtgttacatagaagatgccrgctggatggcacaggggagggccgtacagtgtagatgcggacaatgtggcataggtgaggactggacagcagagacagtggctgcatgatggaggtgagggctggacgggggaggcaagggctggaccggggaggtgagggctggacaggggaggtgagggctgggcagtatagatgaggcctgggtggcagaggtgagggctgtgcagtgtaggtgaggacgggctggacaggggaggtgagggctaggcagtgtagatgaggcctgggtggcaggaatgatgcctggatggaggaagtgagagctgggtggcttgagtgagggctagatggcatgggtgagggctaagtggcatagatgaggcctgggcagcggagacatggactgcgcatcgtaggtgtcggctggacagcaagggtgatgcctggacagcagaggtgagggctgggcggcaggagtgagggctgggcggcaggagtgagggctggatggcgtagatgaggcctgggcagcagaggtgagggctgtgctgttccggttttgggctagacggcagggagaatgcctagatgactgggtagaggcctgggtgggagaagtgaggtctggacactgtgggtgagggctggatggcgtagatgaggcctgcgcggtggaggtgaggcctgtacttctcctgccactaaatcaagagctgtttattgattcattccacacttttttcaacccttcctatgagccgcctctcttctaggcactgggacatggccataagcagggatcttttcctcttgggcccactccaagagtggtggcatatgccaccatgcccggctaattttgtatttttagtagagatgggttttctccatgttggtcacgctggtctcaaactcccgacctcgggtgatccacctgcctcagcctcccaaagtgcagggcaacagacggcaagggaaaagaggagcatagctggtgcatttgatgctggtaggttggagggagggaggaggtcagagttatgaaggcggccagggaaggcttcctcggaacctgaagaaagggagacagcaactgcagggaaggatctgtgggccctaatggccacgtcacactacaaaggccmggactttgtccaactcgcttctgtgctccatgagtgcacctgtgtctgaggcacatcagctctaagccagtgttctctagtgatggagtgaataaatgaataaaatagaaaagagaggccgggcgtggtggctcatgcctgtaataccagcactttgggaggccaaggcaggcggatcccaaggtcaggagttcgagaccagcctggacagtatggtgaaactccatctctactaaaaatacaaaaattggccgggcatggtggcgggcacctgtagtcccagctactcgggaggctgaggcaggagaatgaatcacttgaagccaggaggcagaggttgcagtgagccgaaatcacaccattgcactccagtctggatgacagagcaagactccgtttcaaaaaaagaaaaaaagagaatgcagcactggtcccagtggaaggtgcctgctgttggcttctcaccacgcccagatgaggaaacatgcagatcgcctgttttcactttttgtttctgcgaactttggatcaggaataaaaataatttaatgcaggtcctaaggcagctgagaattgtaatgtaaaatattttcagaattcaactatattggctagatctatcactgcagaaggctggaaaagactcagaagttaaaatactacttttcctcacaagctctagctcctgaaatgaaattaccaggatacaatcacagatatgaagtcagtatttgggcgtctatagaaaagaagtccattgcattgcttatgggatgagctacgtttcccatagaaggggcagtagtgagggttttcttatctgaagcaaaatctctgacagatgatragaaatgcagttttatgtcattttttttctgataagaattctattttttttttctgagtgactgtaatgggccttccatttattttagacaaaaaagacagaattagcattttaggctcagatgatagttattagaaagtttgagatgggccaggcgcagtggcttatacctgtaatcctagcaccttgggaggccgaggtgggcggatcacttgaggtcaagcgttcaagaccaccctggccaacaggacgaaaccctatctctactaaaaatacattagctgggtgtggtggcgggtgtctgcaatcccagctactcaggaggctgaggtgagaggatggcttgaacccaggaggtggaggctgcagtgagccgagactgtactcaagcttgggcaacagagtaagactctgtctcaaaaaaaaaaaaaaaaaaaaaggccgggcctggtggctcacgcctgtaatcccagccctctgggaggctggaggttgcagtgagtggagattgcgccactgcrctccaccctccagcctgggcaacagagtgagactccatctccaaaagaaagtttgagatggataaagttaagatccattaaatgctgtatggactttatgctgacgtgcttttcacatttcagacctgtgcattcttatgcatttacattccctttatttgagggagcaagaattacacaatcaccttttcctacccgcttttaacactgagaaaagtctgcagagtgacagtggcccatttttaccagcaaagacattgaacctggcgtgtacagctttggtggttggtacctgtcaccatctgctcttctgtcttgatgaccatatgtcttggactgcaccctgagatgtgggctgctcgtgctgccccagtactgaacacagctacttgagcatagtaggtgttttgaaaatatttaacctgaattgagaaaagatagtcagcagtggcccaaagataacaacatacatcaaaagtcatgyacaagattcagccagtcaccaagatgctcccaatattcaggggcttggtacctcactaatcaaaactgaaatgtcacccgattggtttttctctgaatgttttagagcagaatagactcagccatgggaagagacatttgagtggactctattcaggttgattggagtctcctccaggttaatcattccacttaagtcaatgagtgaaattttatacacctgagactctagcctatggcaattcctggaaatcaagtggtttttttgatggggagccgggggatggtcagtgggatgcaacttgctgatgatgagagatgaggtgtaagatattatcaggcaaacaccaacgaaacaggctttactataactcagatcacygcgctttttgartgtgtcagtgagtaatccataatcacatttatagatacttctttcacatttataataatgtccccaacataaacatgtaawcatgatcaacatatatgcttagcagttaggatcctatagttatcaataaaaagtggaagctgtctttaaaaacagagagaattaattgactcaagtcattgaaaatttcagtgtgtccacctaaatgacaaacaggctctctaaaagaaaatgatatttatttgggcatagggcatcgcaatgggagtatgtgtgccatagtaaactgcgtattcaggggggtaaaggaggacaaaggtttttaatgggaaaatacaaraggattacttcactgttttaagataattatctttggctgcaaagatgaataacaaggatgatgccagtccagggcgggatgggcagtggctggtcaaatgcccttgcagaagtatgttttcctgtaacatggtggtggcctttgtgcaaggttgtgttttttgtagtcctttttgttatcaggcatcgaggcgtgagaacccactctttatggccttccctggtgctttgtgaaagttccttttgttggtttgtttaatgccagttactccattttgattctgacaactttcacatttcctttttgagcaacaagggaggtttgaagtgggtgactctcaggctaagcctcctggaagtccactactgagttcaatcttgtctctcctgcagtcttttgctattatctctattatctcaaagtgctggaccaacattattttgttaggagttatacttctgaaaaaatttaacaaacaacagatactaagtttaaaaaggtaaaatacaaagcaagattaatactaatatgaccgtctcagtttgcgtaatggttttgcataatagacctaagtttgaaaggcaaccaatagaataaatcaaataaccatggggaattaggtgagacctgttgtagccatgtgacctatcttcttattttgtataactttcccagagaaatttatccaggtacagcatgtgatattaacaatagtacagacattttaaaatgtaaccagtagatactaaggatttcttgggtcaggttctgtcaaattataatagaagttactaattgtgaaatttcaattataccattatcctgccaagtgaaaaaggtggatattaagagagataagtctcatatgatgtggagtctcattctgatgtcatgtctacagcatgaaaaacatcagcttatccaagtttactgtttgcrtgtcactgggttatagcatcgagcagtttggtgcactttctatggctcatatatcagactttcagaacaaagcagtttccatttatagtaattytgtggagkacagtgagattggaggaatctaaaggaattcagatctagtttagcctataggcagataaaaagaactttcaaataacgaacggggctacagtctaacagcaggtttatgacagtcttttagaaacacaactttttttctctgcatcgatcacataggaatcgcaggtttaaaaacctcttgaggccaggaagccaatccaatgcagactttgggttttccttacagccttaaggctcctgggcctgccaggaagtgacactttttcctcaatcacttaaaactgggaactcttgaagacagacattstatacacattcttgaatatgaaatttggtcaaatccttggtaatataatcaaggtttacaattttatcctgctataaagataacagatttttattgaacttaggcacactgtcttaaaaagtaagaatatgaatagttaccaaattttggaggaatcaaatagggagaaaragcaaatgttttcacctttattcacaaaagtatactttaccaaattgctgtagaccatagatagcttaagatagaatgttgtcttaaatctggtgaacaaaacatttaagtaaagaactcaaaatgttttaaacaaaagttacaaaaacattgttatcatcagttacttaattttatgtaattaattttttgttttgcttgatcttgattagcattccatgaatgcttcagtttttggttagagttctgaaaattgttatttagtccattgatcttaaggttttcagaaatctrtgttcaagagtgcttgttagggtcctttccatagaaagcaattttagactatagctaattgcaaatgcttttagagaaaaattcaaacagtaaatgtggatgataaaagcttacactagctatgggtgaaaatcatacgacagttcacaattgacaagaaaatttatttctttctattgcggcatcttaagagaacacccagaatcatgaatggcagcatcacatcaagaccatyggacttttataaattctatataacttttagaatacatcaacaatattcatataaatataacttaaaagaaggtttarcaaccaaaattatgactgataacatactagatctctaggaatttatatagtttttgaaacattcatatcagtaccattcccataaatgtaactgaaagaagatccaataccacttatcatttgatgatgtttcccataygatttactaaataagtctaatcatgtaatatctctgtaagatgagagatacattctttcaggctccccagggacctaactggaaatctcaaagttaattctaggtcaaaagactaacttcagaattttgatcccaaggaagcctgtcattatatgtcaaaaggtttaaaatgcttgctcaaaacaatcataggtcactgtgcaataacagtcatttaacaagagtgataatgaaaagactttgagagcaatacagaaagttacatggatgtgaaaaccttaactctttcaaagctcagtttcccgaagtaatcaaaaacctaataaagacaacacagaaaattatcttgataaaacataaattctttatttttttaggccagttaccaaaaagccaaagaaaaacctcttacggtgtgagtgcttctccttgcgggaagcttgtttagataacctggaagctgaaacttttgaaaatgatacttgaatttaactgaacacagaaagaatgtgtgtccaagctgtaagcgtaccccatgttatagggaagaaacaggaaaactagcaccttgggcaggggaatacatggctcttagaaaaaattaaagtatgtgtagattcctggttacatggaacaattcagacacaagaaaagccaacagtacagaatcaagttatattagaaggcaacattactttccgaggctttcaggagaaatatttcagtgtcacgttataatagcagatatagaactggagaagaaagttacaggagtgacaaaggttgaagcagagggctatcatcacacgtcttctcaaagagaaagagctgaaggccatggtgtgagacctgcaaatgatgtgctgttgagatagrgcaaaagttgagcttctcagataggaatcggagaagctttaagacgaaaattttgccataagaaaggaaatttccattctgaatgaaaaagatggcatttctaacctgtaactagggaaattaaaagaatcttaggaagaaatgtggaggaaagagaaactccctgcaatttagaagataactattgaagaaaccgatttcaaagttaaaaatcaaaacctctttacagttttactaagagcaaatcagtatttctttcttttttttttttttttttttttgagacagagtctcactctgtcacccaggctggagtgcagtggtgcgatctcggctcactgcaacctccacctcccgggttcaagcaattctctgcctcaycctcttgagtagctgggattacaagttcctgccaccatgcccagctaacttttttgtatttttagtagagacaggctttcaccatcttggccaggctggtcttgaactcctgaggtcatgattcacctacctcggcctcccaaagtgctgggattacaggcgtgagccactgcaccgggctgagcaaatcaatatttcaggaaaaccctgttctaacatatgggataaaatttttagttttctattagtgcatttttattttgatatcaaagctcaatcttcagaaagaattataagtgatttccttctaattatagccaacttgataatgtgaaatttcttcataaattcatccttcattaacttttatttacctgcttggaaattttacagcatgtttagactctctgctttgtcctatactttcttttttwaaaaaaaccaaccagtcattttattttagtacaaaaaattatcacacaagattctcatacaaaattattatcttgtcttttcaacctttctaaccaaaagtacatcttcatactcataactttctttacatctttcctgcttactgatttctttgtatcttgtttctgttttctttctaactccgtattttaawcaacctttaaccttcaaattagacaaaattattctttaaataacacatgcttaatgcctttttaaaatgatttttattattaaaacatcttaggtgcactttatatacagatttataaatattaattagaattttaactcttaataaccttaatttttagcaagtaattttaaactgtcacatgctggtattttatagatgagaaccattttataattttaaaaaatgcttttccacaacataaattttatgtacattaatagaaccaaatatatttagtcataaaatttaagaagcaaagaacaaacatttatgttcagaaatttctcagttttaatctcatttggaaataacccagatatttaatgaatattaatttaatatagctttaatatttcaaattacattaaaagttaatttataaatgtttaccccatttatgcttaactaatttatctattttgaacaatatacctagattacttgtgaaaaccaagatattagacaaggctagttattccatttttgttattgttgttaactatttttatagcctgaagaatatcacatgttcacctaaataagaatctcaaaattaagtatgtgaatattttgcaaataactcagaagacacagctgtttatattaagccaacaatattaaattagtcttatcagagagttggacaaagatcatcttgttgtcggctgggtttgtagttttataacctttacgttaaaccttgctaccttaaaatatctcatagagacataaaactgtctgaccaataaactcaggcaaaaatgtattttgacaattctaaagatatttttatttttccaacaattttagagccagtttattaaagatttacttaagtcatatgaactaaaaggcatttgagtgaattgctgtatattttatatgagtgcttttttatctaagccaatctgaataaaatttcttaagagatttctagctgaccataccagattttgccatggagacacaacatacaatataatacatgtacatatgaacaaacacacatattcacacacagaaacaaagttcttatagctttcattttagaattttagtcataatactgtaaagcatacaatctcattagtttataaaagacagttggatccaaattgcatttctgacaaaattgggacctgttcacatgactacactttgtttgcccaaataggtaatataataaaagctgtggaccagaattttgagtaaaacagtttggtttttaaaaagaacaaaaatacctcttttaatcctttttttagtttcaatctttatatctttataaacatttatctagttcttttagttttataagtagtttatagttttatagttgccagtccttcaattaattatttaattatcctaagcaattgttaggcaagcccaaatttacattaaaagagttgacccttatgtctagtttcttggttaccgttgagctgttgttatttgtaaagctattaatttgaatgacctttaggaccttttgtaaaaatattggctcgaatgcaataagcagtgaattttatctgaacaccagtagaaaagtcagcagattcaaactaggcagaaaaaaattggaagagaaaattagagaacttagaaggcactacatgttaactatagtttcagggatgtttttagagagtttcagtaatgaccatttgagcctctgaattttccttgatgtaatttgtcaatcagttaaaaaaatgtgcacaaaaatgagccataataagtcagctggtgtagggagaccccctgaaagtattgctacggaataaaaagtgaaatgctcctgattgttgtaaatacaggattgcatgcaggattgtgtaaagacaatgccaggttggactgccagaaygagccagcagcgcgtgttgtgcttccccctgcagagagcctatgaatggatgtgcagtcagggaggtttcacatcaccaagattcctatcccagaaaagcagatgttcatagctctgggaatggaatgtgacccttgtggagagctataaatggacgcatgaggggtgcctgtccatttggataagatagggctataaacgccctcatcttgccacagctcttctaggcctctttagggttaaggcatactaccttctgagaatttcttcacgtcctgtttctatggaktgtttgtaaccggcttttgctgcaactgttactgctgattaatatcttgctaatcataggttatggaaagactgtttttccgttttaaggctctgttagaaattactgatgcacacactatattgtaaattcttatctctgtatactgtacttctgcatacagaagttatgttaaagaattacttcatccccatgtgaccatctcacctcataatcaaacaaccctaaatccctaactaacctacccctgccctcactaaacttaataataaatgctggtatatccagtgcattgttggcactgcaggaccagaaggcggtgacccccctggacccagctttcactatcttgtgtgtgtctattatttctcgacctgctgatctgcctgggaacaaagagagagccccattgmmttgtgggctgctggccagatcccgcaataagctggcatctaagaaaacttagcatgcctttatgtttgasaatcccattccatttcttattaatctctgaagaagaaaacaagatcctataaatcttgtcacargtttggactggtattttagatggtggcaaccaccctgatggcttttagttagccatttagaatgtttattttttgccttcagactatactcagagtgttcattttaacccagggaggatgatcaaacaaattactcagctagatgcatagaacaaaagtaagttcaccaggaaagacatgcctcgcagacagaatataaattctgtggaaatcagggtactcaaatcagaaagattcttgtttttataccagaaatgacttgccagaaaagacaaaaagtcttttatcatctccaggaaggatgtcagatcctttattaagacagccttgtaaccaaacaaaatcctgaataatataaaaaattctctaccaaaaagaaggaggcttggcctgagagacaatgcaccagggcagagaaagtgagccctggaagcagagcattcaatgggctcaagtgagtagttcacaccaggtccaagaatcactggtgctttctgatggtctttttcaaggtcgcacttctgacaccatttatgtcaccctaaataacacatagacatgggcrctctaaagaaaaatgatatttatttgaagatgggcattgcaatgggaatacatgtgccatagtaaactatgggcatatttgggaaactaaaatargacaaaggtttttaaaggaaaaatgcaggagaatgacataattgttttgcaataattatccttgggtacaaaggatcaataataaagatkatgctattctgagactggaaaggcagttgctgggcagatgtcctcacagaarcattttttgtgtaagtttgtgatggctctgtgcaaggttttgttttagtagtcttttgtgacagttttgttaccaggcctgcaagcatgagaaccccttcatatccttccccagatcaatttgtcagggttctgtttttgtttttgttgttttacacaaatgacttcattttgattctgaaaactttyacaaggtacagtttgatcaggggtccaggttaattgtttcccaggacgctgggctctgtcctgctttatattatggcttttctcttagcctgtcttccatgtgaaacaaaatggtaggagccatgccaggacttcaatccatctgggggaaagttcccatttattttctttgtaatgcaaagcaactttccccaaaccaagtctctgaaataattattctctttcatttttttctatataggatttataaggacaagtggtccctttcttacaggcactattaagagctggagattctaatagaataagtaattttatatgttatgcacaattaattgtaatatwtaagtgcaaaagtgcacatgctgggtattttacatgtatgttcttatttaattgtcacaacagctctgcaaagtatrgtccttgccattttaatgaagcatcaaaaatagacatgttaaacaatttgtatagtgacacagtgatggtaagtggcatttttcaaaaagcatttgaacttttaaaaacactagttgagcacacttccaatcacaacacagacatttgatttatctttgtggaaggagccaatgatgctgaatgaacaggctctgcatgtaaaccatgcagcctttttgccagcctctgtcagtgtgttgtgcaaatagttggtgctgcatgattgcttgctgaattgaattgaagatgtcatttcattccaggccattgtaaacagttgctagttgctggcatcctccaattttctttgtgagtttgagactgaagcttgagatgtggccttgaatgcctttttgtgatcctctcctttgggtcctagctcatgcaaagaaaaggagagtctggggagagccccagtggagcagggcttctacagaagagctgcactcacagaggcagggctgacctggacgaattgaagatggaggtcagcaggaggtcacccttgctgcagcttggtgaacacaagtagggccccatgggccatgtatcactgaggtaagggacttcaaggtcaccacaccaccttttcaaacagcataggacctgtagaccctcagaaaagcagagacaggcacaagccttgagggacagagtggctctctaaacctaggctttagacaaagcaccctgaatgtgcaaggtgtaacatacaagaagtgtaacatttgcacatgcaggacagtgatgtctctgggctctgtcctgtgcccatcttgaatggggagtgtagctgccagcacacatcaaacagtgatgctgagaatgcaagaagatacggattcttctacttgctgtccttgtgctgttctctggggactcttcactggtgaagagtgcaatcactgagtaatttttttattagggcaaattgggcttacgatgacatctttttctccatagttcttcccagagagcaggcaggtggcaaccaggacttgtaatgggtgtttgctaagcacatcctgcatggaaccagcatatcaccttgcattactgagtcctgatgaatgaaactggaacaaagtagacttctccttctgtgctgagcacctgaagtgtttgtgttctgaggataagagccctgaagatgatgtgagactttttttttttaagcaaaatagcttcctgattgtgtcctatttgtctcaagttcaatttttaaaatctgagttataccagatatggacaggatctttgataaagggaaactaaacccaacaatgaattgaattgggtttggaaaagcatgtgtggaattcagccgttcctcctaatctcatttctcttcaccacagatcgttgggkgctgcacgtcgctcatcactgttgttgagaattagttttttcatcaatagtccatatttctaaattggaaaatatggattggccaggcacggtggctcatgcctgtaatcctagcactttgggaggccgaggcaggcagatcccttgaggtcagaggttcaaaaccagcctggccaacatggtgaacccccgtctctactaaaaatacaaaaaaattaggagggcatggtggcgcgtgcctgtaatcccagctacttgggaggctgaggcaggaggcagaggttgcagtgagctgagatcacaccactgcactccagcctgggtgacagaggctggagtctcaaaaagaaagaaaatatggatgatgattttctaaggtgatcaccaggaggcagatagcaacttgtttttactcagacactatgacttgttcaatataaaattagaagctcttccctcttcttctcggaatgctgttgctggtgatgctgtcacttctctccaccccggtgtacagtgtggtgatcaaaatcagatgtgcagaggagtagaaagaatgggttatcagcaaacggacggcagaaccggggtgtgttatgaagttcgccttgctctttcatgataacttttgctcttttcctgtctgatgggatgcctkttcctttatcagtgagtttctctagttagcaatctccctaagaaagggttggtcaatctcttaagaatgtggtatgtcttctacttattttaatttcaacagacttgttgctaatttttacactgaggtcaggcgagttgcttcttttgtgttatcttctctgctgctgtgagtcactagaccatttctgatacctggtaatgcaggaagtggtgacatggatgttgggaacatatcattgcatttgcatttggccatagctgtgaagttcaggcagtttaacacatttgtattaaaataatgaaattataacataaaaatatagcccagaaaaattgaaaaatggttctactttccttttagatattctattcaacatgctgaccgattttatgcatcaacttggctgggtttggggtgccyagataattggttgacattattctggatgtttctgtgagggtgctcttggatgagatgagcactccagttagtggagttgagtggagcagatagccctccctaatgtgggtkggcctcatcctgtcagtgaaggcctgaatacaacaagactcacctcccccgagcaagagagaattctccagcacacggcctttgggcttaactacagattttggacttgccagccttagtaatcacatgagccaattccttaaaatarattgatctccctgyacacacacacatcctattggttctgtttctctggagaaccctgactaatccatcccctgtgagtcaacatcgtctgttcggtgcacgcaggcgcccacacacctgacctccctgggctctctctgagctgttcctggtgttctccttttggggcgaagatgaagaaataacatacagtttcatgcagggcttcctggatggcttccattcccaagaaagaacaagtatgtacagacacagattttactaccaacatgaacagaataggtggaaacagtcaaaatttgaaaccaaagtgtgttatgacaagtaagcctcgctcccagccccatcccttagtcgaatgacacctttccctagatgcttggacacctgattccgtatttctttttcttttaaaaagacttaagtttrcaggaaatttgcaagaatggtgcaaagaattgttttccccctgaaacacttgagaacaagttgttgacatgatgtacatcacccctagatacttagggcatgttttctacacaggatgttctcttacacctcacagcataaccgcctggatcaagaaatgggccctggctgagcacggtggctcatgcctgtaatcccagcactttgggaggccgaggcaggcggatcacgaggacaggagatcgagaccatcctggctaacacagtgaaaccccatctctactaaaaatacaagaaaattagccgggcgtggtggcgggcgcctgtagtcccagctactcgggaggctgaggcaggagaatggcgtgaacccaggaggcggagcttgcagtgagccgagattgcgccactgcactgcagcctgggtgacagagtaagactccatctcaaaaaaaaaagaaagaaagaaatgggccctgacacatcactgtcaccccatccataggcctcatttcactgtcaccaattgtctcaacaatttcctttcaagcaaaagcatccacctaggacccacagggtgtttggttgttgtgccccacagtctcctgcagtctggaacgctcccggggatttcttggcttttgtgaagattgcaggtggttattctgtagactgttcctcagcttagttttgcctgccgtttcctcagggcacgtttctagggtgagcaattgggcttctccttgtggcatcctgttagatggtgcgtgatcctcacaagactcactggggctgggtccgtcagcttctccactgttaggttttcatttcttctttgtaattaatagaactcagaagttatgtaaatattccattcctcatttaggaatttaagtcgatatggagttaaggtttcctgtttcattctgtgagttaaaacccattgctttcattatggcttaaatagctctcatttggccagtgagagaccctcaacctggtgtctgggtcatcttctcacctccaggccattgtttgagcccttccttactcttgggcagtgcagtgcattctagctcatgtgcttcccaaagctggagccagccatacctaccaggagagaagtaccgctccccacatacgtggatgtctgcattcatatctacattgatccacatatactacaagccgtaggttcacaccagtgcttttaattctaatctaatactgcagagatcattctagttttctttctgtccatrtttgtaactttccctaatattgataaacctggctcccattgtcttcacttattttattgatctatgtgtatgttaccaagctgtgctgctgtccctcctgcagatgggggtgccacctccccctcagtgctgacatgccctgccaggcctctgccatcctccactgtcagttcctcattccactggaacctaacaccctagaacgaagaagggagggarggaagaaagagggaaggaaattttaccacgcttcaaagcattataatgttttcacttttacaatctgtaaactccattcatgtgcacatttatgtattaaaattctcaccaaagtaaaatgcaagcacaagaccaaagagaggaggatgcgtgttgtgctctaacagctaatgcacagatcattgcatccctrtcatctgctgtgtgagtcccttcagaggactgggaaaagcctgattcttagcgtggagttaagataggaggctgccctgggtgttacccgcctaaggctggcctccaaggcttcagaattcatcctgagaagcttcattcctggcgtkctgggggactgatgggtctcctcctttgctgacctatagtggtgtttctagttccatttatcccatatttttgtgatgctgtgataacatcttttcacaacaattcgttttcttctctctcctgcttcccacgctggctgtggcagggagaacaggggcacttctgtggaacgtgtctgtcccggcaggagggaaggtgtctgctgggagcctccagaagccgcactgcaaacagctgagctgagctgagctgagcagagcagagcagagcagagcagagcttgtcacccagaggagggaggaaacggttcaagggaaaggctaagtgagcaggcaatgttccctctccaacagcaaggcatgagagaatgtccttgagagcgggagagaaaaatcacattgctgcactratgtttgcamttcaaagagctcacgcgatgctgtgyaaagctctagctgtttgcccaggtcccgataaagttctgtgcccatggatgaggayggaatcttgtattcagcatcctccttccctggcgtggtctcacggagcaatctcctctcggggtttctatggtggatgcgatattgcagggagtgtttgctttactcccccaaggcttcccatagaaggccccttgaataggagacagaggaagcagaattgtggcatgatgggtgtttaatacatggcacttctgctgtgtgcgtgccatcttatgttggtttcactccaaatgaaatcccagtgaggagacactgattcctttgtgagtcaytggagaatctgccacctgccagaggttccgcaggtgcacggtcaggcagacactcagacctaggcccccggccccagccagctctccccgactgtcgtgtcttccatagactgcttggtgaaccaaggacagacacaaaaggcagccaccaacactgcccagtccccatcctcttgccttcattatcttacaagggtttctcatgtgctctgcatgggagatrtgctgggccaaaatgaaacaggaagtcccaggcaagcacagtgcagctaagtttgtgtttcgtagaaaaaccacatgaatcaataatattcaagggctattttaaaattagtaatactcagtccattgctgatgagccgttgaggaagctgcttacctagtgtccgacagctgagaaagccattgaggagtggggagaaaggaactggtgtcttgccctggagtgtgggttaggggacagagtgggggtcctcagcggagaggaacattcagaaaattcctgaataaaagtggcttttattctacatgttttagcttaagaaagatatccaccttgattcggaggttgactatgaggaaccattggcaaaatgcaagatggattaaattaagatatactcagaaagcccatgtgttaggattcactagccagtaataaagacatccaggcagattttcatccaatccaggtggtaagagatcaagagaagcacgaacagggcccctttcatgaattcaccactgcgtggaagccagccctgtgtctgctgaaggctgctgctcagggagctaagctggcaggaggaattggtggggagagcggggccgggcagggaggtgagctggcattgaggagttggtggggagagcggggccgggcagggaggtgagctggcatcaggagttggtggggagagcgggttgggccttcagggtgggtggacggtggcagcaatgacatcagcaggtaatgaacagggcatgcagcagcggtgggtggagatggtggggtggcagtgcaacttgggaacaggagtgggcagcataggaaaggggttcaaggcctcaaggaacatgcgaaggtgcaggaagtggagaaggaagaagcgttggcaaaacctgcagcaatagcttagaggcagggaactggtggtcagaggagagagtgtggggaaagaagccagaggactcaggcctgaaagcatgcgaggcacggaaaggcaaacacagcccggtgctggcgggaacaaaggcctgctgcagaaatttacaatttgtccctcatgctgctgagtgggaggacagagcgtgactgcaggctgcggggctgcaggaccacgggtgttctgctggggatgatgggaaggcagtgggaaaggcctgaagagaccctgggagtcctagctggttcctggatggaaattctttgaccagcgtcctatatggcctaaagggaaaagtacaggagctctggaggggtgagtgctccacacacggagctgtgttccggaggggtgtgtattcccacacacagagttgtgttctggaggggtgagtgcagagctgtgttccagaggggtgttcccacacatggagttgtgttccggaggggtgtgtattcccacacacagagttgtgttctggaggggtgagtgcagagctgtgttccagaggggtgttcccacacacggagttgtgttccggaggggtgtgtattcccacacacasagttgtgttctggaggggtgagtgcagagctgtgttccagaggggtgttcccacacatggagttgtgttccggaggggtgtgttttcccacacacagagttgtgctctggaagggagtgtgctcccacacatggagttgtgttctgggggggtgtgtgctccatacacagggttgtgctatgcttccacagcgcgggcagcatgcgtgtgggtgtgtggtggtataattcatggcgtgggagatctcccaggagtgtggtcctcctgctgttcctggcaactcttgcatttcccattgggtctcacctttatttcattcattggttcacttgtttattcagcaactgtctgcagagttcctgctctgggggagaagcagtgagccaggggttgggaatacccgggtgacaggagaaatgtggtccctgccgcttcctgcctttcagagaagtcacacacctcccatggcactcgaaggggatacacacggtgctgtgagcacagggagacccggcaccacgcagccccccatccctcttcagggagacctggtaccacccagcccccctatccctcttcagggagacctggtaccacccagcttcctcattcctcttctctctgcttctccattctatttcatttcttgaccagagaatctccccctcccactgtctctgtggtttccagaatggaaaaaacgtaaatatcgctatacaacgcccgacccctgccgccccaaagaatctcaggaggtcaagacccctggatctccttgcacctctgctgtggattccatgcaaggcttcacaaacatgcttttatgtgcgtgtccagcagcagaagccatgtgagtgtgcaggagacagggagccctttcgagcctccatggaaagccagctcgcttgggctgtgctggaggcagtgcccctctctgctgsctgcagtaaaggctgtgagcaaaaggagggaggctgaaggccagtaaaatagaatcatatttacagtgatacaaagccacgtgccacactttmtactcggtggtgggaatgacagcataagggtttaatgcctacatrcagttaggatcaggctggaatttgggtgtttggctccccatgttttaactcacattcctttaattgggtcatagtcctgccctcgctgtcatttttgccagctgcatggttccctctgagctgcagaatcaggtagaccagaagacccaggtgatgctggtgtttaccttcttagctgggaattagttggcagcggccgcatggctctgacattcatttcaaatataacctgcaaggagcaaggaagaaaccgcaagcaacacaactttttcgccctcaaattacatcccagctgagaccgctgcctgggattttctcagcatccttcctgcccctcagtaggacatgctgagctgttctgagccatttcacctgtgttgggagctgtggcgggaaatcagacggagcggcgtcttgtagctcatttgcctcacggtggctcctgctgcctttctcctcttcccatgtggccagtggccagccagcccctgctgtcagcacttctgagctaagatctctctgactccacaggaactggcagtgggaatccaaaagtcaccatggtgacgactcacttaggagtgtgctgtgtttcctgatcgcgcagcagccgtgggggcaggcggggcagctgcgcttccacccactctgaagttcacccaaagctgcccactggccggtgttcctccagcgtgggcctcagcccgcagcattggcgtcccctgggagctgtttagaaatgcaaatgtcgggtcctgcgcagtcttgctgctcagagtctgcatgttcccagggcccaggaggctgctgcatgccgtgaagtgtgaggagccgggttggggtggcccaccctgtgcacagagccgggaggtgccgtggcctgcactgccccaccccgaccttctggcagaaagtccaggctttccctgctctacgccgactcccaccatagtcttattgagatctcatatgaggaaccaactccattcacagctgaggggctgaatcaaagcactgggggcagcagtgcggggtgggtgagaccctgtctggaaaatgggacagcgttagggaggagtgtgtccatgcaaggaaggcttagaaatgctcccacacatgttggggtctcaaagtttcagcagtggtcactgcctgagaagctccggccaggtcagaggtgccagggcacaggtcaggaagcagctgaacccctgcctgctagccaagctccggttctcacccactgtgcctgggtcacaccgtcctatccggattccactggtattcacattcctgggatgtggcggagttccagctgggatccggctgcccatcgctgtggcgggaagagagctgctgaacagcatgcgagacccctttgcagaggggcactgctgcgctgccaaggcaaagcctgaacaggaggaggagacgagggtcacagtgataataccccttggagggcaagctggggtgggccgaggaaggggccggggcagagcttgaggaatctgctgaaggaacagcctgttcaggctgactcaggtcggcccacaactcccttcaccaccccaggtcctttgaggtacagaggaggcaaaggagagagcagctttgcagcctgcaaaaggtctcctggcccaggcttgtctaatttgcagctctaggctcccgttcacagccccgcatgtctccatgctggttaggatgatgctagccctgtgataaacacatcccatcatttcactagcttcacgctctggaagttttatttcttactcatgtccctgtccagtgctgttgctcctggtactaggcagcactccgcataatgaatcaggagccsaggctcgtcagtgctccacggggtgactcagggtgcaaggcttcttgtgtccagtggctccgtcatctctctttcaccttattgctgggctgcatctttttttgtgccatgaaccccttccagtggcctgatggtctcagaataagattttttaacacattaaagaaaacacaagacagcaaggaataggatatgaaaatgttttgtactgccagcaaaacaccagtcctgctgaagctactgtgcttttttgcctacactcataattgatggaaatactaaatatgaggtacaaataatgcagttgttttcccattggaggtcacaggcccctgaatctaaccctgggtttacagctgtagccaagagtcagggagaagagtgtggagaaggcacagccgcttccttgtgtctgtgctgggaaggacaccggtccctccacgccccactggccagcaccagtgacagagccacatctagtgggtgggccgtgagaaaagaaacacttcagctgaattaaatttaaaagcatgtaattgagcaataaacaatttgcgaatcaggcagccttctaagccagagtagactcagagactcaggcgcagccgcatgatggaagaacgcaccctgtgtgttcacccggcgttcttccctctatgcgattgcacagcgttttccccagtgtgtatttacccggcgttctccaccctgtgtgatcgcccagcgttctcccctgtgtgtgttcccctggcgttctcccctctgtgcatccaccaggcggtcgcccttctgtgtgttcccgcggcgttctccccatgtgttcacgtggcgttctctcccctgtgtgttcccacggcggtctctttactctgtgcgttcctcggcattctttctcctgtgtgcgttcaccaggggttctcctttctttgtgcgttcacatggcattctccaccctgtgcgttcgctcggcgttctcccctctgtgccttcaccaggtgttctcccttctgtgtgttcgcactgcattctcccttctgtgtgttcacgtggcgttctctcccctgtgcgttcaaactgcgttctctttactgtgtgcgtttccccggcgttctccccgcgtgtgcgagttcacgtggcgttctttctttgtgcgttcacatggcgtttccccactgtgcgtccctgtgacgttcttccccctgtgtgttcgcgcggcgttatttcccctgtgtgcgttcacgcggcgttctccccgctgtgtgttcacacggcgttatttcccgtgtgtgcattcacgcggcgttctcccccctgtgctttcacgcggcgttctccctgctgtgtgttcacgcgtcgttatttcccgcgtgtgttagggcggcgttctccccgctgtccgttcaacttacgttcttcttgctgagcgttcgcgtgccgttctccccactgcgtgctcgcgcggttgtgtttcccgtgtgtgttggcgcagcattctcccctcgtgcgttcacttggcgttctgctgcttgtgcgttcacctggctttctcctttgtgcgttcaccaggcgttttcccccttgtgcgttcacctggcattttcctccctctgtgttctcccggcgttctctcccctgcgcgttcccacggccttctctttactgtgtgctttcctctggcgttcctaccccctgtatgagttcacctggcgttctccttcctttgtgcgttcacatggcgttttccccgctgtgcgttcaccagcgttctcccctcccgctgtacgttcaccaggcattctcccccttgtgggtccgcgcggtgttctctccccgtgtgtgctcaccaggcgttctcctccctttgtgttcacacggagctctcccctctgtgtgttcacccggggttctcccctctatgcgttcacgcggtgttttccccagtgtgtgtttacccggtgttctccccgctgtgtgatcgcgcagcgttctcccccgtgcgtgttcccctggcgttctcccctctgtgcgttcgccgggcattcgcccttctgtgtgttcccgcggcgttctccctcgtgtgttcacgtggcgttctctctcctgtgcgttcccacggcgttctcggtgttctctttactgtgtgcgttcccctggcgttctcggccctgtgtgcgttcactcagcgttctcctttctttgtgcgttcacatggctttctcctacctgtgcggttgtgcggcgttctccctgtgcgttcacctggctttctcctttctttgcgcgttcaccaggcgttttctcttgtgcgttcacctggcgttctcctccctgtgtgatctcccgacgttcttcctccagcccccaccgtgtgttcaggttgcgttctctctcctgtgcgttcccaaggcattctctttactctttgcgttccccaggcgttctccccgctgtgtgctttcacgctgcgttctcccctttatgagttcgcgggttgttctccccactgtgcgttcaacgcggcattctcccctcactttgctttcaagtggcgttctccctgctgtgcgttcgcgcagtgttcttccccgtgtgcgttcacgtcgcgttctccacgctgtgcgttcgtgcgacgttctcccacctgtgtgtttgctcggcgttatttcccgtgtgctttagcgcggcattttccccctgtgcgttcacctggccttctccctcccgtgcattcaccaggcgttctccccgctgagcgttcgcgcgccgtttccctcctgtgccttcacccggaattctctaccctgtgcgttcgcgtgggcgttctcccccgtgtgtgttcacccggcattctcccttctgtgtgttcgtgcggcgtctcccccgtgtgttcacgtggcgttctcttccccgtgcgttcaccggcgttcaccggcgttctccaaccccgtgcattcagcaggcgttctcctctccgtgcgttgacctggagttctcccgcattgtgttcacgcggagttctctcctcagtgtgttctcctggcgttctcccccggtgtgttcccgtggcgttctctttcctgtgcgttcccattgcgttctatttactctgtgcgttcccctggctttctcccccacgtgtgtgcgttcacgcagcgttctccgttctttgtgccttcacatggcattctctccactgtgcgttcctgtggcgttcttctttctgtgcgctcactggaggttctctcctgtgttgaaattctaatcccaaggtgttaataccagcaccttgggattagaatttcaacacaggaattggggggacaagggacaaaatgttgattccatatcagggtaaagccctggctggctgcttaggtcataatcactttgggactccatgctcgatgtgcgttcagctggcgttctttcccctgtgcgcgcacccggcgttctcccccatgtgtgttcatgtggagttattacccgtgtgtgttagcgcggtgttctccccactgtgcattcacccggcgttcttcctcccctgcgttcaccagaagttcttcccagggagcgttcacgtggcgttctgcctcctgtgctttcacccggggttttccaccctgtgcgttcacgaggcattctcccccgtgtgcgttcacgaggcattctcccccgtgtgtgttcacgtggcattctcctctctgtgcgttcaccaggccttgtccattctttttgcgttcacctggcgtcctcccccatatgcgttcaagtggcgttctccacaccccccgccgccccgccacccagtgcattcaccggcgttctccctactctgttactctgtggttcaaccggcattctccccctctatgagcgttcacctggcgttctccccgttgtgtgcgttcaacccgcgttctccccgctgtgtgcgttcacccggcgttcgcccacctgtgtgcatgcatcgccctgtgtacgttcaccaggcgttctcccctctgtgtgcgatcacctggagttctccccgctgagtacgttcatccggtgttctcccctctgtgcgttcactgggcgttctccccactgtgcgcgttcacccggcatcctgccctctgtgtgcgttcaccgggcgttctcccccctgtgtgcgttcaccgggcgttctccccgctgtgtgcgttcaccccgcgttctcccagctctgtgagttcacccaactttctcctcactttgtgcattcacccggcattctcccgactgtgtgcgttcacccggcgttctcctctctgtgtgcgttctcctggcgttctcccacctgtgtgcgttcacccggcgttctcccctccatgtgcgttcacctggcgttctcccctctgtgtgttcacatggcgttctccccgttgtgtgtgttcccgtggcattgttcctgtgtgtgttcacctggcattctgccccaagtgtgttcaaatttctctgttctcattaggacaccaatcattggcttagggcccacccatgtgcagtattcctttatcttgctaaatctgaaagatcctatttccaaataaggtaacatgtacaggtagggcgtggtcctgagtttgggtgttagagcacttactcaatgccagtgtttgtcgttcctgtctgtgtttgggggtatctgagtgctcacatcacattttatctcctaccagtgagcctcacaagcccaaggctttaaaaagacagaggcatattgccctaacgatgctttaactctgcttcaattgcccattttttccctccaagcagaggccatccttttagaagtaaatgagcgataatgatgcaaatggaagaatgttgtcgatattgtgttttcttttcttacacagcaggtagaccttcagcagacacttttttattttatttatttatttattttgcagttgcaagatctaatagtgaaaacagagctcccatacaaagggaggggacccaaagagggtagcatttgctagctcaaatgcctgggttcatgtcctgatcattgtccctcctgctgtgctctcaggcaatagatgattggctatttctttacctcatgttgttgcataattagcattttagtgagctctctttactatctgattggtcggatgtgagctaagttgcaggccccgtgtttaaaggtggaagccatcaccttcccagctaggcttagggattcttagtcagcctagaaaatccagctagtcctgtctctcagtaccccctctcaacaggaaaacccaagtgctgctggggaggttggccgacaaccgctctaactgcttcctgctgaattggggcatagtagggatggtgcagttgagatttcctcgggaggggtgccttcaatgtcattaacatcagagcatgggctagcaggccggtccaggggtccacggtagatcttagtcatggactgcatctggggcaccatttgaagaacgatttgtagttttacagctttgattctggaagagacaaacttaacaaggaggttaaagatacagggattgaaatgaatggcctgcagtgcaggggattatttctttggcacagtttacaggccttgactatctgcttgatagttttgacaaggcctggtccagtaaataatgatttggccacctgatgggtgctattaatgcctaagtgaaaggtttggtgaagggttttaagtaatttcattggttagctgcaggcaaaagtatttttccttcttcggtggctagccatgctgaggggaggaaactatgtcctcgtgaggctccccattctatttcttcttctgagtactggggcttggtttcctggagtggattaccccatactaggggtccttctataagcatttctaatggagtgtcctgccttgtggctcttttggctttaatatccgcttggtggttcccttctatttccttttcctttcctttctgatgaccccagcagtgtaagactgccacctctttaggtttctatacagccaataataatctcctaatggcttcctgatgtttgaaaggtgtttcctcggaagttaggaattccctttctttccatagtgctgtgtgggcatggaggactaggtaagcatacttagagtctgtatatatatttaccctttttccttctcccaattctagtgcccgagtgagggctattagttctgccagctgagcactagttcctggagtgaggggattactttcaagtattctgttatcactgaccaccgcatagcccacttttcgaagtcctttttctacaagggaacttccatcagtatacaagttgaggtcgggatcagtcaagggaacctctaaaaggtcccctcgagcagcacaggtttgaggaattacttgttgacagttatgttctatcttttcttcattgtctggaagaaatgtggctgggttaacagtactggcccttcaagtaatagagcctgatagttaagtaaacagttgtctgacagccacaagtcttctttagcagtgagtatgtcattcacgtcatgagatgtccatacagtaagatctcttccctgtattattttaactgcttcagacactaatactgctactgccgccactacccataaacaatgaggccaaccctttgccactacatcaatttccttattcaggtatgccatgggttgcaagctcatccctcggacctgtgtaaggactcctagagcgattcctgttttttctgtggcatataaagaaaaatcttgccctgttggcaagctgaacactggggcttgggttagggccttctttagggcctggaaagccacttctgtttaggtgtccatcttactaaataggtattggctttctgagtttccttaattagtgtatataatggtctggctattttgctgtacctgggaatctgttttcggcagaaacctgttatgccaaggaaccctcttagttgctttagggttttgggatgaggataagccagtataggctggatacgttcctcactgagggccctggtgcctttggataattttagccctcagtatctaatctgctgtgagcagagccgagcctttggtttggaaaccttgtagccacaggtagtgaggaaatttaagagttcttgggtggcttgatggcacaaggtttctgaacgggcgactaaaagtaaatcatccatgtactgaaggacaagagtgtccaggtatgagaattggctcaagtcttgggctaatgcctggccaaatagatgggggctatccctgaacccttggggtaaaacagtccaggtgagttgacaggttgtgtttgaaggatcttcaaaggcaaacaagaattgagagtcaggatgtacagggatgcagaaaaaggcattcttaaggtccaggactgtaaaccactctgcttcctctggtatttgggaaagcagagtataagggttaggtacagctgggtatagagggacaatggcctcattgataatcctgagctcttgtgcaaacctccactgtctgttgggtttctctactcctaaaattggagtattgcaggggctattgcatggttttactaggccttgggcttttaggtccttaacaatcttttggagtccttgttgggcctcaggtctaagggagtactgcctttggtagggaaaggaggcggaatcctttagtttaactagaacaggatgggcattctttgctcgtccatattgtccttctgttgcccagacttcaggattaattccttcctcaagcagggacaa

SEQ ID NO: 97293 - DNA, 12427 bp, Homo sapiens
acactactgatgaggaaattcaggtccgaaagatgaagtgatttacccagttttccagctcactgatcaaagccaggtgctggagtccaggccctttctctctccgtgcagggctggggcgacaccgagttctctaagcagtatgtgtctgtgagcaggcctgggaggctggccctttgcccttccgagaagatcgctgagcagcaagtggaagtggtgcatggtttctccaagcagagtggtgaatagacatcaagggacaattcctttctgtatcagcctattttgctaggagcctagatctaaagctttacgtgccccaaatctgggtgcccgacccagtttgtcaaagtgggatttcattttaatgatcaaccttgcagtcagaagtgtggtgtatgtcaaaagacagttctgttgattttgaccttgggattttagggcagtagttctctgacttttcaatttcatggacaagtaaagtttctgcaaaatgggaggggaatggcaggcagccaacagaggtgtgccaacattctggtctttccaagcatggacataaataaagagaaactcgccatctaccactgacacagttatactctttaatatgggaaaggcaccatctctgaaaacagggccatcctttgagtggacctagtttagctttatgaaaaatgcacagtatttcttgctcgtcagcatttgggactcgtgttgttggaaggctttgagaaaccattcatgcccttgtgtgatcttctgtggacaaaagcagttcccaggtaaactcgctctgaggctgaacctacaacctcagaacccccttttttccagggaggtcacgatagccatcacggtttcttaattgtatggggtgaacagattctaacttttcatttctaacttaaagtacttcttcaggttgtaatttgacatttgcagaagggactataacttggccattaatagtgcaaattaagaaataggtgaggctgggcacagtggctcatgccagtaatccctttgggagtaagcactttgggaggctgaggctggaggatcacttgaggccaggggtttgagaccagtctgggcaacataatgggaacccgtctctacaaaaaaattttacaaactagctgcacctagcggtacacacctgtagtcccagctactggggaagctgaagtgggaggattgcttgagcctagaagttgaaggttactgtgagctatgattgcaccactgcactccagcctgggcagcagagcaagaccctgtctctaaagagaaataagtgaaggacagctacattcagagccgtcctgtggaggccaaggtcgggagcagctctgggtggggtgcagagttcagggtgcaggcatggtggcccgtgggaaacactgtgctctcctgctctggccttcaaggacaagaaccattttggggactggcaattgttttttcacttaaaccataagggcattgctccttagaagggcagcagggagcctcaaggcttggcccccatggtaagtcctttgcaagtcctggccgtgcactcgggtggtgtctgcgggctgagaccaaggcttgcgagcgcttctcacagagcctctccccgcccagacttgctgactaagaggagccgcttcttcctctctgttcctcaactttctcttctattcttcgttctttcctgttcttcctcccgttcttttctcccttctttcttctcctgggccctgggaaagctgagcggacgtgctgtgtggacgtctccttcgcacgcttcctccctagtgcctttgttgcgggctgcagggggcgttcgtccggggatctgccgcctctcaataggatctcgttctcctcttggcttgtaggttgatgcttctttctggaaacaaaccaactctccttcattcaataactacatttcccagttccaactttatactatgccacacggtaacacacaaaaacaaaaaacacgagtcctttccctgcggggcaaattttattacaaaacgggtccacaaccaagatgggccacggacattctgctgccagagcctggagtctggccagagctggcggtgctgttctctccccgatagtcagtgggaggtcctgtggcaatgtcatgggccataagtgaggggaggggatgagatttagtgttttaaaccacagacaaagaaaactttaaagtgaatggggctgggcgcaatggctcacgcctgtaatcccaacactttgggaggctgaggcaggaggatcacctgaggtcaggagttcaataccagcctggccaacatggtaaaaccctatctctacaaaaattagctgggcatgatggcaggtgcctgtaatcccaggtactcaggaggctgaggtgggaaaattgcttgaacccgggaggcggaggttgcagtgagaggagatcgtgccattgcactccagcctgtgcgacagagtgagactctgtctcaaaaaataaaataaagtgaatgggaagttctgagttgggaagctcctagaaaagggagtgcttttttcttcttgctagaggtgcaaataaaacaatcttggcctagcaaatgtctttctggaaacaagacagaaaaggcaccatggtgagttcccctttgtgatattactgtaaaaaagcactataaagactgttaaggaaaataaattcaaaagccacatttgcccattttttaaaatgggtgagttctatggcatgtaagtgacatcttaagaaagctgtttttttttttaaaaaaaacaaggcacaaaaatatcaccccccttgtctagttatcaggtgccctgtggccccaacctgggataagaaaatcaccccgttctggtgggcaggcgaatgccgctgcttccctggcagagttgggtgccacctctctgggcattgcctgtgctgctgaccgtcatggtgctcacctccttgtctcctccaccatctgatcgctctcactgcttgagggtaggagtgcttggcacacacgttgattgttcttcagttgcttgatgatgtgacttcccctgagagcccccatggcttctcttggctgatgtccaacagcagagtcacgcgacaagtgacgcttcggaccaggcttgttaatgggctgcagggggccgaggacagagcagaggcacctgaactgcccagggaaggggttgggggttctccttccaaaatggcctagtgtgtggactattattaaaagtgcctctgagaggccaagaaagcctatgattcagtacaccctgaatgaaaaagaagaaaagtatgagatactttagacttttctatctcaagttgttaaaggaaaatattcagcatttaagtagtataagtttcaattataaggaagctcattttccagaaaactcgactccttagagaactgggacattactaggctagttcatgggacacaaactgggcctcactgtgacccacacccatttttgtgtggcgtgcatgctatcggccacgtgcagcttttacaatagctgaggcagctgcccaccatacaacctgggcaattccctgtggctgcctggttcagctctgctccctgcaggcagcttctgccctggcccctcctcacggccaggacctgcccttagacgggccagcgggcatcctggtgccacagctccttgttccccccaggtcctggctcagctcagctcccagccgcttgagcacgcctgctgacctgggttcctgggtccctcccttgtgttcagcagctccttgcggctgagccccagtccctgagcgggagctccgtgacatgagacacccagggaagagccaccgcgttctttcgcagtgcatttatgtggggccgtgagtcccctgttctcacccagggactgcaaggagcgccatgaggctctggagtaactgccctgcaagctgctcggtgacacacacaccctgtgggtggatgtggatgagtacatggttcccactaaggatctgcttagtggaaggacatgagcctgtttgtttacctttcacacggtctaacaatcacttagaagagtcaccctggacacccagtcctgagtgtgctgtcacctctgagagccacacccagcagccctccagccctttgtcattcatgatgccttgaatcacggccctcagagccctccagtggcaaacagggtggtaggtgcgggtgggctgcccgaggtgaactggctgtggaggccgggaaggcggggcatgtgccgggccgggctgggcgagctcctcctgactgcgggccaggtctccaccgagtgtcccctgcgggcagcttcggcgcagcatccactccattctcccgccgacctatcgtggaaggcactgctgccccattagacagactggggcctgggctcagggatgcaggtgcctgcccacagagggtggatcctagcccaggctggcctggcgccagggttcatgctccacgccctgcactcagtgacagctgcagcggccccaccactcccagtgtccctgtgggaggggcggccagatgcagctttgagaagacagcagctgcctacaaagtgctttctggaaggagctgcagaccccagttctgccgagccccggtggcacctgtgtatctctgcgattcccttggaagcagggcctcgggagggacctgccaccgagccccgtgtggcgtctgagggtcctctttcctgtcccccaggatgcctttcaggaggagtactacaggacgggcaccttcccagagacgcccatggtgcccccccggcggccctggaccctcgtgaactggctgttttgggcctcgctggtgctctaccctttcttccagttcctggtcagcatgatcaggagcgggtcttccctgacgctggccagcttcatcctcgtcttctttgtgggtgagtggagggcaaggggctggtgggtgctgacagcaccaccctgggagaggtggcatcagggctgggacgaaggccatctgtataggcagttgtgccgtggatgaggagcaggctcagcttgcaatcacagggaaagattagacttcaggatgagtgcgaggccctcgaataccaggcctgggaccccctccgcagcctggacggtccagcctcccacctggggctggattccacacgttccctgttgggtggtgatgcagctgccacttcactccccgacagctgggagtgctccctccctgtcctccgcagacagctctgctcattggcatcatttcctgcttctgaagaaagccctgtgctggagcctggcggggacggatgggcagctccctgccttcctctgggggcgcctgtggcttctcctttgctgcaggtggatgacactgagtggagacactcggcgacagagcttttcatgggtctgcgctggctccaggtgaccggtattctcgggctactgctgcttcttggtggcaagcccctgtgcaccctgctccttgcctctggcggggcagcctgtcgtgcctgcttcctgccctgtgaacagcaggtccgtgcttcctggagccaaggaagactttggggtttccctgtgaaaggccctgtctccccaagcctggcgtcctctgaggctttggagagcccgggagagacggcacattgtccaagcacacagagatcacgtgcttcttccaaatggacaggactcagttattttctgtcaaacacaaagatgcagtatgctcactataaaaggcccaagcaatagacaagcgcagaaaatggaaagtgtgtcaggagaccattcccattgagcccacttcccagataatcgttaatgacaatttgatgcacgtggtggttccagtctcaagcatatgtgcatctataaacccgtatcagtggagtttcttcagctcgccttttcacctaatgaatcataaccaccaaaacaggtcacagcacataaacctagctcattcattctgactgagccaaccaatgctgcagcatatgggtgcagtagacaagctggctcctgttcctcaaatagaccctactatacagtcttttgaaagattaagatgtattttagtgttaaaaattaaaatattaaaacaacacccacaccgtgtaagggaaaaaaataagaggttggagaagaaagcacctcatctccttaaggcaggtccaggggcacccccatsccccgccatgctgaggctggccaagggtccggggcagctgcaggtgccagggcccctggtagggcgggggcaagctcaacccttctgcttcaatagcaggcaacagcaaggcacacacacacccacgccgtcttggagargggccccttcaggatgaaggctgcagacagggccacccagctgtgtagcgagtaccaaaaaaagaagcctgagcactgcccagggtgcagtgtggacacagggcgtctccaggagcatctgaggggtgcagtatggacacagggagtcttcaggagcatctgaggggtgcagtgtggacacagggagtcttcaggagcatctgaggggtgcagtgtggacacagggagtcttcaggagcatctgaggggtgcagtgtggacacggcgtctccaggagcatctgaggagctgactgccgtgccccattactctgagcctgcgcctgactgcattcttccctgaaggactttgtgtttgtgttctttactcctcttccaaggccacacggtccacgttttactcacttctttctgctctacaataactccactctcactgttactgttacgctccatgcaggagccctccagtttgtaaatgacccatgggagatgcgtgcctcctgctggctgggctggattcgcccatcccaggctcttgcatccatgtcccagttagtttatcgaccgcgatgctaatgctagataatcctgtgcatcatgatttgggggatttcattcacttattcgtctatccattcttaagcatgtattataaatggactgttttccaagccccatgcccagtgctgagcacatcaaatgattaagtcttgggccctgcacccaaggacctcaccacatctgcccgctccagagggtgtagttgaaattgcaacttctgagcattaggccctgctttccagcttcctatattaaactgggctcccacgagggtcctgcccattctctggtgtaggcaaatcctgccgtcagaggagagggcggggattttctcactgctctaacgcttgcaccaaaagcagtgctgaaacgtgttgggcactcgatactcgagctcttgcgtcttccaggctcctggtctgttctttataaaacttcgctgaacatgccctgttaacttcctgtcccttattcacaaaagaatcctctttacctgggggtcagcagaggaagccagggatttctctgagtccctgcgaacggctgtgcatggcttgccaaatcattcaccttcagggtccaaggaggaaaacccccaccagagcagccttgctttgtcttaatgtcacatggatgtccacactcaaggatgattgtaaagccggcaggatgatggcacctcaaacccgccagccagctctgagctggcgcttgtgatttgcggccacgggccttctcacttgctctgtgggaaaacggccctgtagtctgttcgggctactcctaactctgctctccttgtctctgcagcctccgtgggagttcgatggatgattggtgtgacggaaattgacaagggctctgcctacggcaactctgacagcaagcagaaactgaatgactgactcagggaggtgtcaccatccgaagggaaccttggggaactggtggcctctgcatatcctccttagtgggacacggtgacaaaggctgggtgagcccctgctgggcacggcggaagtcacgacctctccagccagggagtctggtctcaaggccggatggggaggaagatgttttgtaatctttttttccccatgtgctttagtgggctttggttttctttttgtgcgagtgtgtgtgagaatggctgtgtggtgagtgtgaactttgttctgtgatcatagaaagggtattttaggctgcaggggagggcagggctggggaccgaaggggacaagttcccctttcatcctttggtgctgagttttctgtaacccttggttgccagagataaagtgaaaagtgctttaggtgagatgactaaattatgcctccaagaaaaaaaaattaaagtgcttttctgggtcatctgtggtgtatgttgacatggaccgctgcccctccatcctgcccttgcccgtggctttggtgtttcagatcctactcacgggaggcagctgccgcggaggtgtgggcagctgagaggggtgggcaggccagcacagctcctggcaggagacacaggtccaggagcccgtgagcatttgtgagagcagagatggcaagcacgtgcgtggagaccaacgaagcgtgtccctggcacacagcaagggagagtttcgctcggtctctgcagtgcagtctcctggcgtaagtcttgaagatggacccaactccctgaagaaatggatcttgaaattgaacacaaacatcatgaacgtacagcctgggcattctgcagtgatttgtgagatgagcttgcatcgactgttcctctcagcagtgacagccaaagtcacccctgataaaatgcagtttcactttataaaatgcctcgccccttcccagcatgtagagcttgtctgcagccctaaaggagccaggtcctgctctgatgagggtcaaatcagagccgacatcccatgtacaaaaaacccccaggcttctgccttccttccgggctcctgtctgctcccattttactccacggaatagttctgccctgtagcatctccagcggcctttgcagactgctgtcagccaacaggtgccaaaaatgcaaaagaagaagaaactaaaagcagtgctatttttgcagaacaaatgctagctattaaatcatcttaggccaagacaccaatggcacttggaccgataggtatttggagcatgagttaggaaggatatgtctttctccaggtgcgcagctgaaagttgctgagaaaagctgcctgtgttgctgtggtaacatgagaaggaatgaacagctctatacaaaaactggccacacattataaggcctattctatgcagttatgtttttggctatttgctcatttagtcattgtttatcaaccaaactaggtaagccaaggagttacaagacagctctagagaagctccctctgcttacaggacaataatgcattgtttgtttgttgatacaaatgaattatttgaatccacagaagtgaaaaagggaaaaaatcctggctgacttgtgggaagagcgtactgcagagcctagggcctgagttaactcgctggcggccctgcaggcaggcttgatgggagcgcccagcacatctgcccaccctgcacagggcatgaagcaccgtgtgcagagatctgtgggcaaaagcccaggacgtgaccttaggcaagaggggtccttggagaagtggaggtgtgcatggtgtgtagccttgcgtgtctgtgagcacgccctagtggacctgcgcctggattatcgggccagtctctcggaggggtccgtgatgctgagttacgccattcacctgaactctgcagctcatcggctgtaggatttgggtgagacacttttccttgctgactcatttccccatctgcaaaatgggggtgacgatatctacctcttggggtgtgtcaagggtaaaagagcacactttaagaatcctaaagcactaagccaaggatgaaagactagaaagctgcctctatgttgctactctcaaaaatgctcagaaattttcttgtcgtactaaaaatgtgttatttttctcattttcattcttccattcaacacagaagtaatctaagtaagttctaaaaacatagatccgggggcccacagacattcaattttcttctgaattggctctggtatcacacaacacacaagcaagcaaacagcctgcctgctagggccttgggttccaggctggaggaatgcaggcagaaatctcttaggaaataactaagtgagcgccaagttttgaattgccttagagccgaaagagaatgtggcgtgctggggagagatctggacctctttctcatcagtcatttgacctgtccacgaagaacaattttgttatgcagcctgggaacctggtttccttacaccctgcgcccttaatgacacagacaaccacgggtactcctggacggaagctcatcacgcctcctcaaataccttcacccatgttcaggtcacacggaggtcaccatctcctcagcacacaacaactgctttggttcccagggttattttttctacgagttgaaaacccacggagcctaagccatctttttgtcccctaaggagagccccatagactaagagctacacttcctgtctgtctttcccacctttccatctcattctagcttaaagcttatcacgctactgagagcctgttctgtagttcaaggtggcagagaaaaatacgaaccttgagtgaaatctggagagcagtgcagggtcatccccagacgtgacgggccatatcctaggcgactcctgcagcttatagaagcagggaatttaatggacttcttccaggaaagccagcccacggggactcttaaaaagacaccaaccatttggaagatgcagcttgaggtctgggggactggactgattctgccaccatatagtgaacacgattaatcgggaggaagaagtaaggcactctgtgagttagtctaccaccctattgactttgacagagagaaaaccaacttttttcatatgatcacacagtagtactggaatatctcgactgcaatatcctctaaacaaatgcatgcaaagctttgtaaaagcagctgatgattaaaaaaattttaaaacattagggtttttctaatatatccatatgtgggacagtgatttaaatgtcattaattgtccagccacaacttgtaacagtgatgtgaaagacacaaaaaaggccccactggagtggaggagtggtctggctggtccccaagcaaaacagaatgggcttcgcataggctttagaacttattcataaatattgaccaaagtgtgaagcaaggtatccagtgaagattctctagggtctctacttctgctcaagagatttaatccagctttctctaaagcagtggtccagacttgccacatactaggttaaagataaagtgagaaaaacaaatactttggtttgcacgtctcttgaggggccctaggctgtatggaggaatatttagaggaatatttgtgagctgccatttgtgtttaaaagaacatgaaagcaagacgggccctaacccgcctgtgtctgtagctgaccaggaggccactgcttccttcccccagagcttctaggagagccccccaaaatgcaactctccaaggtcctgtggagtagtcccctcataatgcctccaccacacctgtgtctcacgatgccttaactgacgtagctcctaagtgatgttcacagagaaggaaatacttaggcaagcccatgtgtaacatgctcacagatgtgctggctttgccaatgctttcggactccaccatgctttctgattcttctggtcctagtcacgccttggcacggggcagaagcggccgagctatgctgacaggtgctgctgagagccaacagccattcagccgagaaggcgtttctaggtgagggcatgagagctggcattccaggctgctgagtgcggcatctgcaggtgcaccacattgctccacggtgtgttcagaagagaccagcatcttgaatctcaggctctgggctcattctttgcctctgccaagggaccattcaggggcttcaagccagctgctgaaaatcccccttttctggatttttccccatctatataaggatatggtggctgtgtggacaagaaattggtttcatctcagaagggtgcttccctacaaagatcttcagaaatttaattgaaaacaattttttgaactttttttgtttggccaggatgaatgaagctgaagtcacatcctgaatgtgcatgccagacaaagggtaagcaagcagtctttacaaatgccaatccctctgcactccaaaaccggagcccgtaatgaaggcccaggttccagtcatcacaggatcccccaagccagcacagtgcctgatgcctccctaggcattagcacatcccagcactctaattcacatcctcagcatccctgcctcctgcatccagggcttaggtt

SEQ ID NO: 97294 - DNA, 13303 bp, Homo sapiens
atatcatgccacagaatgataatatgtttgcttacaacgaaggtggacgtgggcgtggtgcacttcactcccttgatacagcccaagatagagcagccattcaagctggtggaaaaagtggttcagaatgtatttcagttccgaaggaaatactgccatcgagggctcaggtaagaatgccttttcttctcttcagttgcagtctttataaaatcctcaggcactttttaagagtgagaaccttgtttgctctattcttaaagctctgagtattacacttagttcagtcctgtgacggacaagacttcactgccaatgaggagagagcaaagacttgctagacctcaggtggcctctctcagggtggcttaaacataagcgcagcctggaattggtgactgcacagctcacagaggctctgtaccagggagctcgtggttccccagtgaggactcaagacagataataatgggttttttaaatgcttgctttctaccgagttgccctatctcttctttaaggacacacttgagaactaggaagcaaatatgaattctgagcagccaaaatcatatcacgaagtcctcacgtaagcacgtttccatctcacagaaagctgctgctgccaagaggctctcaggaatcactgggaaaacctgacagggcctggtggtctagaggtcgcccacctcgatgggctctgaaggaccacagccttgttgcagatccagaaagagccaagaagctgtttagttaagcccagtgatagtctgcttaagaaggcaggaaagtgtatttgtaaaagatttccatctacgataatctatccatagtccgctgtttaaagaggctcggcgtgagaggcacatatttctcattttctaaaacctcctcacatggcttcattgtaattctctctttcacaaggtccgaagtgtccctttagcatatgaaatgacagcagattattttaggggccagctgggcatcagctcctaagagtgctgcagtccacaaagcccattgctgaggatgccagatggcagaagctggagcctcagcctgccacttgttgcctctaattaagccagaattcccaccttaccagatagttcctgcttctctagcagagacttaaggtgcagagctggtgacagagatgccactggccagccattttggctgcagcccccagctactgtgcactgctggtgagtgaaacagaagctggatttcggctcacacttacccctcacgcagagcaggacccacacagctgtacctgatagccctgattcatgggggaggggggagcacaaaactatgtccttttatgtgcttttggaaatcctggaattggtctgagcctagagctggcactagcgtttccaaggcaaccccccagctaagtgaagggccctattcatttcagatacaccatcctcaggacagacatggaccagatactgtgccacccagggtaacaggtcaaaggactttgacttattggtgttcttcagatattagaaactgccatcaggccctctttgccatgaaactgaactcaaagatctgtcacctcaccctgaaagtgtgggggacatgcaattccttgttgaaaggaccatcagcctataagcaacatgctatctatctcccctggccatgacaccttccaagccccttgggatgagctctgtaagagccctgagacttgaagaaaaatgcaatccaggcctaactccgcagcatttcaagcagttctgctattcattttaaaacaatggttcaatttggatagatgaaatttaaaatatatcctctacttcaaatcagttttaaagatgcttgaaaaataacaagaggaataattatattttcctatcagctatattttcaaacttttagcaaaaaaaagtaactcttttagcgtgaagagttctaaaggctgatacattcaaattctagagaatcaaaactgatgatttgtcacacaagaaataatacaactttcacatcgaaacatgaggcacatcaagcttatgtttctacaagaatgcagctgagcagatgttactttaaacttacttacttacctttaaaaagtacatgtactgatttagctttggagaatgctttcccattgtgtgcttgcctcgcgcctcaggttagagccgcctcagtggcgggccgtgcctcttatctggtgctatataatccaagaggctcctgccactctctccagctgtcagtagccagcaactgtgttgtgttgttttcaaatgagggttaaaaagtgtcatgatttgcagaatttaagtaaaattctgatttttctgtctgtctgtcttcccctcagaatgttattccctgaagcgcagcgcttggaaagcacgggcaggctgttagagttggcagacatagaccctactcttcggccccgccagctctccatctcacactttaagagcctctgtgatgtatacagaaaaatgtgtgatgaagacccacaactctttgcatataatttcagagaagaactcaagcgaagaaaaagcaaaaatgaagaaaaagaagaggatgacgcagagaattacagactctagctgctgcctgggggcgagcagcctaccagatgtcgatttgcactacgtggagcttcttatataggtactcttttgtctttacagaatgacgatacaaatgccaatgaccagatgtgacttattttccttttactatacagcttggcagagaaaataaatatcatcaaataagatacagtacaagctttcttttaatatatactgtatagatagatatgacatgtttagtataaacagcatctattacaatcttacaaaaatgaagtatctgcacattttgcccctaaaccacattaaaataacttaaatatgctttaaataaagcaaaaactaacaaacagctgaaagaaaatgcccagaggatttaaaaaaatggccctttgaaaactattaatcacgacttccccagccttactttttccacataacttaattattagaatgtaattttaaggatcctaaatcatttgatacctgctcaaagtggatataaactaagtaatttacagattctgaccagtttcatctaggtttctgatccacaataaattaaaataacttaaatctttacaaccattttgtgggaaaatgtatactgcacaaaacccaggaatgaacagtttttttttttttttttttttgcaatttccactttaccaccagtttaaaagtaaaatgaggaatttaacccatatctggattgaatcatactatgattttccgtggctctctgtttcataaaaacactcctcactgacaacagatgttaaactctggacactgaattctcgctctagaacagaatttaggtcgatggtggcattttcagactgactgtcaagggactggtgacggatctgcgccttgagcaaagttcctctgtccctcttggtgctgttggcttttcgtttaatggggcagaagtgcccccggaccagtttgggctgctctcctcctttctgaccctcacccgactccgggccaggctgctgctcagcctcggggtgaacgtctgggtcctcggaaatcctcagtctctggaactgaatttcgatgtctttagtagggctgccctgcttcacagtctgacggtggtcatcatcttcatcgctcaggatgtcactctctttgatgagattgtcagcaaaatctgccaagccggggtgtgggtatttcccgggagaagtgctcttggagtcctgcctgccctcagccgtggggcagccgctgctctgggtgccgctgctcaagctgccctcgtcagagtccagcaaggttcccttgccagtctcaccggtccactcgttgctggaggaattcttcaggacttttaaagacctggatgaagctacagtgagaaaaacacatttcgctgtgatacagaaacaggttacacaatgtgtaatgtttgcctcaaagcttgtgtaagatttaacattaagattttattttatgatatgacttcagttagcaactatcctggtaattaggcaaaaatgtagctactgaaaacatggacatttttgacttaggtttacagttgtaagttaggcaattcagcatttttagattaccagagctcaattatgtaaatagaactagacactagaaactactacatgggctaagattcttattttgccaaggagtaagttgaaaagttaattggtaataataaatctaggctcctttctttcactaaggtgctttgtaatttgatcatgaagatcacaccatattcctatgcatcttctcaccttgtggatttcccttgctgctcaattaaaagtagaaaatgcccctccccccccccttttttttttaaagacagtgtcttgctctgccacccaggctggagtgcagtggtgtgatctctgctcactgcaacctccgcctcctgggctcaagtgatcctcccatctcagcctcctgagtagttgggactataggtgcgcatgatcacgcctggctaatttttatattttttttgtagagatggggttttgccatgttgcccaggttggtctcaaactcctgttctcaagagctcaagggatccacctgccttggcctcccaaagtgctgggattacaggcatgagccaccatgcccagcctagaaaatgctctttatctctcatatgagaactgtctctgctggaatttcaaaacaactttctgaaattttatgttataggtgtgtgtgtgtgtgtgtgtgtagttctgttctcttggattgaaagaaggaagggagttctcagttttggtgtttctacaaagtaataacagcatgttattttgatggccagtttattttgacaatggagaaaatagtaaatatgtggtagatctgaagaggtcacactgatttgacatgaaaaagcgaagttttacattttctaagcctaaaaacaagaaagataataacaaaatagttaatgtagaaataaggttctgaaaacttaagctgaaattttagaaacaagcagaaagaacaacgtgatttgaaatgcttacttggtgccctatcgattaagaacgagtataagaggccccttaacttagatggcattacatcccaatcaacccattgttaagttgataatatggaaagtcgagaatgcatttaatgtacctactaaccactgcggcttagcctagcctgccttcagtgtgctcagaacacttacattagcctatggttgggcagaacacaaggcctgttttataattaagtgttgagtatctcatgaaatgtattgaatgctgcactagaagcaaaaaacagaatggttgtctgggtactcgaagtacgatttctactgaatgtgtgtcactttcacaccacggtaaagtcgaaaaattgtaggttgaaccatcagaaggtggagaccctctgtgtaaggttcttgatcttcattcagcattgaccttcaggatgcctggcactgttctgagcactgggaatacagcagtgaggaaaacaaagtccctggacccatgcacatcttagtggaagaaacaaaatcgtacatttggactatgtcagcgggtaggaagacaagggactgggggttgggggtggctgtattttacagtagaacgtctgggagcaagaggcatgtttaggtttcttaaaaggagataaaggtacctcgatgacttacaaagtgaaaagtcacagctatgttacaagagcatatatccttttcagaagctcataatattttgttgaataaacacaaggctagcaaaattctcacctaatttggccgaaacaggaactcggttcttaagaggtaccaggcgatccttacacgttttctccagtggtaattcacactttatgtgacgcctgaagttctccctcagaatagaacgaatcaccttaacaatgttggttttgctttcactgtcactgggtsgggggggagagaaaacagcagaagtgtccacagtgttcatcgtgcttccattccacgcccgcctgtgttcctgtgccttgcacctgctggaccaggctgccagccagccacccarcagcagtgccatgtggcctcccgtacagaaggaggtgagaattgatcactcttaagattttgatatttatttaatcaacatagtctcctactagcggcctcagttgcctttttcggagggtggggagtatgaccctgatatcatcaaaattcaggagggcactaaatataaattcccttaagagacataattctatgttatttctgttggttttaatctttggaagtcagtcatacctgcaacacaactgaaagatggtttctggccgtccttctatttctgacttcgtatggatcagttcccatatggaattattttctgtccctatgtaaaaggaaatggaaacaagagtctacaactttgcccaaaatgctgtggttaagaacacttgtaaagttgaaatctcatcagttaagaaagtctaatattcccagtcctggctcattttcttctgtggcttgttctatgtatgattttcacagttacaagaactgaaatgccttttggttactttttacatttcctgctgcagattttcctccatctgaactgccttcaccctctctctggagcccctctctggggaagaggagattcagtggatcctattcttcaacctcctttgcagttttgccctttccttggaaggaacaggagctggggtacttgaggtaaaagaggcctgccccaaatgtggtcattttctcgaaaacataagcacttctgacaaaagttaaacagaagcccagcaggtcactgcatgactcagcctgctggcctcttctgtcaccagatacctgtcaccaaaacaaggttactctggaaggatctctgaacattttccagagtcaaagatttttttctttttatatcacctacagtactacctaaccttaaggaattttctgctatattctaaatttgtaaaaacataaatttgtggatctttgttyttctaacacattttagggtatcaaggcagaaaggaaaatgttgaaaactaytgatagggaaaataaggaaacaatgaaaggcatttggcaaagaaaaagctatccaccagcatttagtttctcccagaagtctgctaaggaacatcaaaacaacctctcttgtcctcattttccttgtctataaaataaaaggcaccaaaaattatccccaaggtcctttcttaatttacattccacagttaagtctactaaaatgctttttctggcatcgtactgcacgaaacagttacctgctggattccccagtctgacttgaagcgcggagatggggatcaaccagcggaatttaaatgggtccaagtcagtagagttgtgtgcaggccgggaattcgagggctgtaacatgaaggcccaccaagaaaagtgttagggaagctgtcactgagggaggatgtgtgcacagtgaatagaagtttatgttctccctgtgggcgagtctccgagcagccatgtgggtgttcagggcacagaagtcaatcagctacgcacccagttctcaaagacctcacatgctagggaaggtgcggaggcagagttgtggttcagaagcagttacaggtctcaaagcaagaacagcagccaaagcttccacgccctgacgctgcctctgaatggtaaaccaatggcatatggtatccacagctaggctttgcttttttctgagtgaaggtaaaaggcatttgaaaataaaccaaagtttcacagactatgtttatggaacaaacatgggccattttcagggatataaaagtcgatgttctatgtaggcccccatatgagtatttatctactttatttacttatttatgtatttattgacagggtctcactctgtcgcacaggctggaatgcagtggcatgatcaaggctcactgcagcttccacctcctgggctcaattgatcctcctgcctcagcctcccgagtagctgggactacaggcacgtgctaccacacccagttacttgtatttttggtagaggcagggtttcaccatgttggccaggctggtctcaaattcctgggctcaagcctcagcctcccaaagtgctgagattacaggcatgagccaccgtgcccagctgtatatcttcttttaaaacagacatctttcatggggagactcagaaacgctctcagtatgtgatggggttagttaccctcagagtaagcagtatcagtcagcccagccttggtgctcagtgggcttttcagttcaacgttaataggaagatacagctatgaaaaggtagcttaaattaaaatgaatttttgccttaccaatttctttttcagtttgcagttttctttataaaccagtatgacggctctcttaaaaactaaagaaaggaaaagagaaagaaagtctttattttatgcaaactcttccaaggttaaactagagctgaacgtcttaacagagtaacactcttcaaacgtatgagtctctaagacctcactctgccaacatgagtgaataaatggtacttccctttcgctcatatttgaactatgcagaagcacctgcttatttaaaagctactattagaagttgatcttggcttttttaaactctttgttttattgaaagctgaggacactgtgttcatctcagtgacaatatactgtcacttgttctcccaactctcagaattaaaacatttgaaatacagcagactattaagatagcaggtttctggccaggcacggtggctaatgcctgtaatcccagcagtccaggaggctgaggcaggtggatcacctgaggtcaggagttcgagaccagtctggccagcatggtgaaaccccatctctactaaaaatacaaaaatcagccgggcgtggtggcgagcacctgtaatcccagctactcaggaggcttaggcaggggaatagcttgaacctgggaggtggaggttgcagtgagcagagatcacaccattgcactccagcctgggcaacaagagcaaaacctcgtctcagaaaaagaaaaagaaaaagatagcaggtttcaaaatagccgcagggatctgttcctgtaacacttggcctgagccaagcagcagaagggagaacaagataatgaggatgcagagcgatgccggagtttcaaatagttgggggctggccctgttaagtccccaaccattatagcaattctgactcctggagctcaggagtgagctggactggtgcggctagtgaagttcttccgtaatcccagcctctgttcagtctgcattcttctgaatggaatactaaccaaatactgtgagctcaaggtcctttctagcttttcctagagacagaaatggattcaaccaggaaaccgtagagtgcatcagaagctctcccatcgaaagttctgttacctagattgtaaaaacaggaggtaaggaagatacggaaatcccaggctagatgatctcttgttagatagtgatgtacacacagtcattgctaaaatgcaagcacagctggtttaatttttatgatacctgtaaacatggggccttaaacggtggagcttttgaaaatatgagttaagcacccaagtgtctgatgaataacataaaggtgaaggcattttgctccagtgcacgcacatgtaggtgagacatgccttgtgaccaactcagtttccataagatgaactctaccagtgtccgtggttcttccagagtgccttttgtaagctttcccctgggatctagtacatccatcacctctgagctccattcgggctgctgataaaagagcaccagcattgaaactggccagagtgaaggactgatctccagtcctttcctgttcctgccattttctccctaaactatgctacttcctgcatgctggcttgagaagcacaagattctaaattaagcaatcagataaaaaggaaaaatacagaaaatgtcaaatcctgcttggactagttttataagtaagcaggtaaccaccaatatttgatgttaaaaaaaaaaaaaaaaaaaggcaaaatcaaaaaggaaaagccccagactccacatgccagttcccatgtcctttctccaccccaccctctgccagctctcaccctccatggatgttccagacaatgtgaacgtgacataaggttatattttaaaccagtgtaatgaattttatgatatgtctatatgtaaattgtgtagttcattagacacattgttatcaagaaaaatcttaggcattttctcctccaggaaagtcctaacagggcagcctatctagaaggtcacctacagaccccacaccacatgcactaggctcccagggtgcagatgcctcacggacctccttctctgttccgctctgctcagctactagctggtcaaacacggtcccataatcctcatagatcttctgcatctcattgatgtggctcgctactttctccattgcctttagtgcttctgcaagatatgaaatcatatttatttcataactgttatttgttttagattctatccaacagtaataatgaatggagtcaagattcaactcaggattccagaccagtacccactagcaggagcattacattcagaataagtcacaacagcccactgtagcccagcccttagaatgaagaacagcaaaattatctcctacttcaaattctttttgaaatgagacagagtatcagtgaaaagtatcactaataacaacaactgacatttctggagcactttctacttagcaaggatcacgacaggtgatttctgtgaatcatctcatttagtgcccgcaataactcaaagactaaaccatcccattttacagatgagaaaagtgagtgcaggatattctgccagagttccagagaggaaaacacaagaatggagccaggcttcaaacccaagcctgactgggcttagggcaccagctctcgagtttggcttgcccttctgggaacccggatctaggtttaaatggaacttaaaaacaccccagtacatgactgactgacagaacaattgtttgcatttatatatggtatatgttcataactttccgcgagggaatatgagagatacattattttataaaagccaaaaagcaaaattttaggtcacttctaaattcagtattctttatacttttttttctcccaattcagcattttaattctaactggagggaagtttggaaggaagttttttaaatcaaacccttctaaagatcatcttaatacaaaatgaagtttttacatagtatgaatgctgaacataatttgtattatttacttatagaagttaactgtcatacaaaaatgctttcctcttgttgattttgataccaaagtatgcttgtcatggaaaaaaagccagtttaatttacgctcttctcagtatttattattcagtaatactaaagtgttaataagcctctctctccccataaattttatcacctatggtttaattggacctcctagtttcaacatatgaacaaatcactatctccaacccaaataaagcccctctttaaggatcctctatttactatcaaactgcaaggctttgtgtttttgacaaattgtgtctcaggccagtaatttcagaggttcaaacagtaacacaccagtagcgacttgaaagcataacccatcattgggagtttggttttgaagccgagctctgctcagagatctccacaaggtggagcctcacccaacaaatctgaccagcagctcgggcagcgaaccccacaaaacttaaccaagtggtaggaaaataggcctgattttcagttccagcggcactgtttcacagccacgtgacctgaggtaatttacttattttgagagtgaagacagaatcatccctgcataggaggagtatggcgctacccggatgagatcatttctacccaagtattttgtaagctctaaaggagtgcccagacgcctagctagtttcacatattcacgtgaaacctaagattaaccatcgcagaactgaaaagtgacttaggacgtgccactaggcggggaagaggtgagctgtcaggcccagggcacggctggcagcccctcgccgccctgtgcaggccctcgcccggaggtgccgccgccgcctcacccgtcaggtggtagtgctcctcgctctcctggtccgtcagggacaccagctccttgagcagcagcgggtacttgagcactctctgaaccggcttgatgaggtaggactccagcgtggaggaatgctgcttggtggggttccgggcgtccagaaaagccttgaaggctttgtcagttttagctacaagcagatggataaaagacctcagaagagcacagtggggtgaattaaattcttcatttctcttttaacatttatagatcatctatttctatagtcctcctaatgccattctttaatgaaaaccccaacacatcagtgggtcaggcacccagctgtcagcgtgggattccgcctcacagccctgacagagccctggagtgctgggagcttccgaggatggaatgcaggctgcgccccaaagactaacactgactcaaaatgcaggaatgtctgactttaaagacacatttcatgcatacccatgagaaatattgttataggtggcctaaaaagtgagtttcaaacaattcattaaaagccatgaagcgtggccaggtgcggtggctcacgcccgtaatcccagcactttgggaggctgaggcgggcagatcacctgaggtcacgagttcgagaccagcctggccaacatggtgaaacccgtctctactaaaaatacaaaaattcgccgggcgtggtggtgggcgcctctaatcccagctactcaggaggctgagggaggagaatcacctgaactcctgaggtggagggtgcagtgagccaagatcgcgccactgcactccagcctaggcaacaaagtgagactccatctcaaaaaaaacaacatcaaaaaagccattaagcaatgttatccagaccctacaccatacccacaaaaatttcataaaggaaaataaaccagtgtttttcccactggcctcactctagttgttgcttatttgtattctgtacacttaagggttatctggaaagcagtgtcttttctcctgtaaagtaaggtgacaggcaccacagcctgca

SEQ ID NO: 97295 - DNA, 21062 bp, Homo sapiens
aacttctggtttccgtgtggcttagctgtgctgtggttcatgtgcttcccatggggcctggctctgcctggcattcgtttcctagccttcactggcctgcaatccttttgtcttcattcccacagttctcctgccccgtggctcctgatacagaggtaacctgggtgactcgtaagccccttgtaactaaggtagcctcatgcaagttccccttatttgtggtttgatcttcaccaccactcagcctctctgggatcgccatcctggttcataagaggggaatgaggagtgctcatacctacgccaggagaggctgtgagggcggacaccctaacatgaggcaaagcatgctaacctgctacacactacacacatggctgccgtttggtggtagcacaggtggcagggggtagcattctattctagctccaaaatccctttgttggtccctcctctcctcccttgccccctccttcacccatcttgttttctgtttgcctgaaactcccagggataccctcaggtcttgctaacccccagaagtggcctttggtcctaaaatcacctgtgactcctgctttagatacacccaggacaaatgtatttcgcagcgtatctctgaagctggggcttcctggtcctccatgctcctggatggcttgcatcagcctggcggagcattcggctctggcgtgcctttctcgttactcctcggagagggagagtgcgcgtgtatatgactttccaacccagggcctacaggagcttaggtttccaagtaaataaacacaagacaaatgtatgccagcgggctgggatcaaaacacatctccagctgttgggaacacaaagagaagtagtttccttagaaacaggttcccgggggaaggaatctagtgaggcaatttgagaccacagcagaagcagacctgagggttcaggacccagtatgtcctgagccccaggaaaacagcagcctctatggactccctgagcagaggagctccaggtctggaggaaaaatggcccctttaggtcatgtggagccagtaacggagccaagggggtgggagcatcaatactgaaatgtgttttggagagttttagcttccaaagcacttctgtgtagaatgctcaatagactctcccaacaaccctgtaatgcaggcaaagtaggtaatatggtcccattgtacagatgagacaagcaaggttcacagaggctaaatccaagtcacccagctaaggcagctgagaagggaatataaatacaccttatcttgggcccctggctcagcctacaattggaagctaaatttgaactagttgaagaccaagagcgtaactttcttaccgtcacgtatttggaaaacatagatatttactgaaacacttaaaaagcagacaatccaaagcccttcttcattttatttatttaagaaaaacaatgccttagaaatagaggcaatgcctgaggtttcttttgctcaaaggacagtctcagctggttgggacagagtggaaatttccacatgctggtatttcatatgtatactttcaaagttaaaggacattcagagtccaaaactttcaagtagattaaaatgcatagctttctaaaaacctttgctgactctggccaattttcagacttctccagaatccaacagggccaacatgattcactgaattctttatgaattaagaagctgtaaattacacatcttttcttttaaacatgcattactttccacattttacagccaagccgaataaacagtgtcacagaggcagtgttctctctgggaagattttctcccttttcttcctattcttcaaatggaggatggcctagtgaagtggcaataatggttagggcagcagcccaatttgacatttttgagaacttgatgtgtaaccagcagggtgaaaatgacagcataagaaatccactttcatggaagctccaagattggaaaagggagtggcttcagcaggaataagatgctctccctcatctggagatgacaacagttgctcttcattagaaaaagctttccaccattcattaaatatggtctgtgtgccaggtatttccctaccctggaaataaaggaggctggacatgagctggattagagtctcaggtgctgggatgtgtccaagtgtgcctgggttcagaggactcccacccccaaaaaggaggcagccacctccacactggggagcttccagctctggacaaaaagaaatgagcctaagacaactgccttttcacagtatggctgctagaagttgaacttgcatctatgcgagcactaatttatttaaaaatgattttccaggaaatgcaaaggaagaagagtttggaaagaaatagaaagtttgagaaaagctagttgttcccagaaaataaggtatagctataagatgcttgaatatttgaaaacaaattgctgtaacagcgatgtctttgtaaagatggagagacgatgttacatcaaatgattctgcttcaaaagcgtgggactcggcccagtcctcttctccctttacccttcaggaacataaggtctgagtgggcaaacagcaccgaagtggaatcaggaggtctggattctcctcctggcagggactttaacccaccccgaatcccaggcccgttcccacacctgtaaaatgagagagtcctcatcctctttggggttcctgcaaatcctaggattcctttaccctttccattttcttccaaaccaccctgcctcacaagatgatattatttcatcctcagagcaggcttggaggcaggcactggccactcccagctgtatgctaagcagctctgtgaggctcagggccaggggcagaactgcccgaattttggcaatgggataaagcaaggggctttagagcactgagatctggaatgacgtggtaaatcagcagactcatttcaggccagcaaccaagaccctgtgggcatgcggtgtgcagggaagggcctccgaggggaggggtggccggcaaggaggggacagtgggctcctcacagctgcctgcgccccgctgagacacaaacaacaccctcttttgagtcaaacaactgactacccagcctttgccaaaatgaggacagactcttctgaaagggggcaattttatttcaagggtctaatgggaccaaggagatggaattaaaagtttcagctattaaaaaaaggcaatagaccatcttcttccaaataaacaaactatcctttgaacaagaagacagccttctaaccaggtcaggctggaaccagatcatgaaggggacacccctcccccccaccaccaggctctcctctcttgaatctgagcccccccgagtttctgctgtgctgctttggggagcccagtgctttcctgctggggccttgccaaggatcgatctgatgacctcatctgacatagacccttcccgaacacagtgcttacatttggaaaggagcccctacaaatttctaagggcagaattccaggcagggaaatctctctacaatctctcaagtcacataacaaaggcagttaccagctcttcaaaaatataacacttgccccaactaccaactttcaatattttatgacctttttaaaaaaactccaaaccaggctgggcacggtggctcacacctgtaatctcagcactttgggaggctgaggtgggtggatcattttaggtcaggagttcgagaccagcctggccaacatggtgaaacccccgcctctactaaaaatacaaaaattaaccaggcgtggtgggaagcacctgtagtcctagctgctggggaggctgaagcaggagaatcgcttgaaccccggaggtggaggttgcagtgagcagagatcttgccactgcgctccagcctgggcaacagagcaagactgtgtctcaaaacaaaaacaaaaacgaacaaatggaaactccaaaccataattttttcccctcacatttgccacctttctctctaatgattgcagcttattatttgtgtgagtgtgtgaaaactgcattatatgaaatgatttacaggatggcaacagaagcttgacagaacggaagaagctagagcattcctcttaactcttacattaatatttgaagagtagtgttcataagacgtgtttctgtattgttggttttttggcattttctgctgtcctttggttctaactttcttagcatgaggattgaatcagaactatgaaaaaattgtctggattaaatggaatgtatgctgtttttaaagagcatatagatatattaatcaagatccaaaacaaataataaagataattagagaagacattattcttgtagtgtttctatactctgaatacacgtctcaccaaataaaaaacatatagtcatattcataacctatagttttttattttatttaattattattattattattttttgagatggagtctcggtctggcacctaggctggagtgcagtagcacgatcttggctcactgcaacctctgcctcccggattcaaaggattctcctgcctcagcctcccaattcgctgggatcacaggcatgcgccaccatgctcggctaatttttgtatttttaataaagacaggttttcaccatgttggccaggctggtctcgatctcctggcctcaagtgatgcacctgcctcggcctcccaaagtgctgggattacaggcgtgagccactgcgcccggcctcataacctataaagaaatagattagggtttcgccataaaaactaaaaaaaaaaaaaaaaaaaaagggaaaagccacttttaaaatatatcatcaaaggaagaaaataaaaataaaaataaaatcatcaaaatatttcactgaagccttaggtagttgatcaaataccgaaggtgagtggaaagccgtgggtctggtgtagtcgtctggccctggctgagacactaacttctctgtatctcagttttctctactctaatcatggatttgaaaacatgaacgtgacactgaggggacatcatccccaaatgctcccagcctctgaacatccacttccattatgtttttaaaatgagatgaggaagcagccgtcctggccgtggccctgagattcggtgcttttctccagcggcaaggctgctgctgacggcacatcagcagtggcctcagctctgggcgatcttccagctttgggaacaacacctctgactgatcctcaacacttcctactttcctgcttgtgcccgacaacagcccaggatgggtccgggtgaaccccaagggctctctcagacacagagaccaggatttcagcctcctgggcaccaggctgtcagctcctcagtacatgtttctcaacacagggatgggaaatgtacctttcgttctagtgctgaaagaaagacgcgcaactccgccctccgtttttgttaccaacctctgtgctgcggaaataattactgggctcgagactaacatcccttatggagctgagggtcccaaaacaagtccagagaaagcaaacaattactggtgcaatgacagggttctatcgcgctgtggtggaaagaacccagactgtgaaggcaggaaacccgaaacagtcggtcgcagttgcgcccttacctgagaggtgactgtggcaaatcccacaacctttagaatctcagggtcctcatctgaaaacacctccccctcccagagtggtcatgggaactgaatgggctgagggatgagaaggggctctgccgccctctaacagacacccccccaacacctttgttcttcttaagcactacagtgctagtcaggactccttaggaaagactgttaacgctctgggtcccaaaacctagcactaaagacaactgagcaaagcaaaatcagaaaataatttgaggaaatgttcattaggatctgggtcacccggaaccagtttctctcgccaagacctccttcctgcggaagcaccctctctgcgccacgctccatggaggcgccaaggagaaggcctgggaagggaagagtgarccttccctggtggagggcccactcctcaggcagtggggagaccgccttytgcatgcgacaggacttaccaggtagcgctcctcctgcctcatgctgggggtgcggatcatgtgattttgttcccctctccagtctccaaagcgacggaaaaaatagttggataagaaccggttgacggggtctctaatgatgttgatgtagacaggctggtctcctccaaacctaacacaaacattgagttcgttacaacccatcactgcaggacgaaaacagggcctacttagacaacatctccccttccctctaggttaacttattgaaagatgacctcctatgctaaggtgccaatgacacgtaataagcaaacggtgtttcctgatargcattttattatcatgcaggaagtggggaggatgatacctgttccaggtacctgttgaggggctgtgaggacatttcatagtatagcacggtacaaaccacaccattgtgcatgttaaggaagagatggtgtctagttttctcaccaggctgtaggtttcttgaggatgggggccactctgtattggatttagtatttccaatggctagaacagaacccacagggacacaattggccctcggtgaatrtttcagttgattggtaggttctgactgccttgctgggtgagacggcacttcctctatattgtaattcaaacagttccgggtcaggtgctctgcagtaagggagtgaataacagccagtcttcactgagcactcgctattcaccttgttctaaatacctcatgtaaccagcttgctgaagccccataacacgtcaatggagtagaaaaaataattatcctcatttacacttggggaaactgaggcaggaataagkttcataacttgtagctgaactaggatatgggtccaggcaatctggctctagaatctatgctcttaattatggaaaagtgatttctggagttgaggaaattttgtgtgggatatcaagaatgaaacaaaattcaacataattatcctcaagtgatggcaagtggcttcagataaaaataawgcaaatagccaggtgttccattttaattccttccatgaaaggattagatgaatccactaaatcttggcccaagaacaaggtcttcccgaagcagagtgatgagattggctggatttctcttaatgattccttctttttctctttgaactgcttgaaagcagtagccttgaggagttcggggagagtgccccagtctctgggcagagggcatgctctggtgacctcctgaggggcctgcagggttctctagccctatggcctcgtgaccttctgaggaatgtgcctggacattctgtcaggggtcagaaagaactaagagaaaacaaactgacaggaccccgctcctgcctctccccagctggcagactccattcacctttcaaaacccagcctggagtcacatcacatccctcagcaattaatgcccaacccagggtccatgcctccctcctctgtgccctgggccctctctcttgcactgtgtggaaatgtgtgcctctcccatcagactgtgggcctcctgcagccaggaacgacacgctctagctcagtgtgtggcacacagtaggtgctcaacaaatgatgaccaaatgaagaaatgaacatctgagtgtgtgcctctcagttgttaacgtttcttcccatatcatggggctctgttgtcagaggaaagtaataacaagcccccatccttttctgtgtatgaattcatataatgttgttcctggtttatctgcatttttaaaaagaatcttcagagagaagaatccaaaggaacaactctgagatagtggaatttcaggcaccaggacatatgaatgacaccctggagcccttaaatactaccacattggaacacacactgctcatgggtgagattagccttgcaatgcgaatcttgttagttctcagaaatacacattcatgtaactggatgaacaactaactggagtcccaggagttagctgtgccaaccaccagctaactactgtacacaccccagatttatcccccttttaaaattaaattgggtttcatatctatgataaacagcaactaaagtaataaagctagggactaggaagacaaggcttgcataccaaatatgcacctaattagaccctcaaaattgcttcatgcttttaaaaacctcaactgttcttttatgttcatgtgaagaatgactgctagtgctagttagcagaaatgcccaatcatgtgaatccatgcacagcatcccatcaggagatggctctcagcctcaccactgccatctttgatcaatggcgagagaagtaaggactgggaagtcttgatgagcatggatgacttgctcttgtttgcacgttgcaatccaatgcaagacttccagaataattttccaaaatggaagttttagatggcttaagaatgtattgtcaagtatcagataatatagtaggctctctctagaagtttctaactatgacaaacaggtgtcttgtatatatcttcccctttgcagaaggcaataatggttgccggctgccaaccctctgtacacacagcttccgccaaattgggaaaatctggggtgacacgtccgttatacagaagaggccagaataccaccatgctaccatcagggaccagagcatagcacatgtcctagtgcctgagtagggaagcaatttccctaccctcattccatcttctttcagcatcagtttctcctctaagtaatttaaaactctggtcagaatttctggctactatttataaagtccctgggtcacctgaaccttttgctcactcatgatttcattttggggctgagaatggtttgtaccctaccatcccatacagtgatttttaaaagccttgagagaagattccacaacctccctgtgaagtccactgtatcagttgaaaagtctttcttatactcagccaatatttaacattttccttttatgcacatttccttttgtttgaaccatttgacacaaaggatttgcatctcctatgcttttacaatgcttagccttttcaacttcaattttaattcttttaactttttgttgtttctttcaaacattcctttggcttttatcttaagacttatttcccttcattttataatctaaagctctaatttgatctttatggagcgctaaaaaattgtggtgactacggctgatcacaggttctaagtagtgcatacactagagagtagaagagtcaggccatattttgttttttgttcaacaacatacccttttgtccttcagtcaccacaattactcctgcatctttgaagctctcttttaagtcatcctaaaatagcaggcattaccaatttcttcgacatttgttgacagatcctattccccgactctgtaagcactcctctgggcttcctttggactctgccactgtgtcgtattttttaaatttttactcattttttttgatgagaagatgaagctctgcagcagggaataattttctagaaagcataactgcatgtttctcactctgagaggcatttccgaacacctcattctgagcattttcatcagcattggtcccacactgctacctcaatcaattaatcaacccatcgataatattagtcacctcttccacagctacacaaagcactagggtaaaaatcttaggtatattttcatcaaaatttgaaaggcattcttcctgaggtaataattattgcacatattaaatcaatacttaagaccagaattatcccggagaattaagactgttttgtactccaattatagtagagattactgtgattggaatcagtttttgaaagtatatcctgttcttctaagaaattctagtaaaatgtatatatttgcccttttcatcattttcaagtgtacaattcagtggtatcaaaacattcacattgttgtgaagtcatcattatcacccgtctccaaaacgttttcacgttcacaaatggaaactctgcccattcaacaaaaaaatcccttttcctgctttccccacccctggtaaccaccattctgccaaaagcctacctcctttttagcctctggcctggaagcagaggttatctttgtgccactatctacattaaagggtgaaaagtaccataggccagaggcccagggctttgacccttgatcagtgagggaggaagacagtttgaagtgagagaaaggccatcatggaaaagaacaggaccttttgggggcagagtgaggagtggctgaggcggagaggggtagagctggctgtttatttttgagacggagtttcgctcttgttgcccaggctggagtgcaatggcgtgatctcggcttactgcaacatctgcctcctgggttcaagcgattctcctgccacagtctcccaagtagttgggattacaggcgcccatcaccatgcccatctaatttttgtatttttagtagagatggggtttcgccgtgttggccaggctggtctcgaactcctgacctcaagtgatccgcctgcctcggcctcccaaagtgctgggattacaggtgtcagtcactgcgcccagccaagctggctgttaaagggccctttgctggagcccgtcacagtaacaagagtccctgaaggtccagtgggggccagcatggtggggaggtctggcttctgtcctcacaccccctgcagtgggcacttccatctcctctgcccaggactagactccccyccgcccaccatccatcacaaaacacaagcagaagagacagctgtgctctgctctccggtctgtcccaaggcaggagagatggaaacatttgctgtgagaagctgagacaaatggggaaggaggtgggtatttgggtcagggctcccactcacagaggaagatgaattgacaaggcatgaaataaacagtaaggaataatcaggaaatgagggaaagtccagattatactcatccctgatgggccaacacagctggtggcccatgcagcggcagagatccactccccatagagggaaaagcagaaacatgaggaagaaagtgccaatttaggaagacgagtccagccagggttcacaaaggcaaaacccagagaaaactcgcacttgtaaatggaacttctgcgctgtatttaaggaggcagagacggtgttaactgctaataccgatttttactttggtgctttcttcagagtttgcagtgtctgtcaaaagataagagatttgaagggcacagaattgaattggtcacttggctaagaagaataaaaaagtcaacatttacaaataagatgtgaaaaccaaattgacttgtggaattagcgaagtctgatttgttttgttaaataatgccatcagagggcagagtttgttcacaaaagttgatagaagaaacactgttcacatcagtaattgagacttcacttgtagggaagagaaaaggtgtccaaaatgcacccccttgcacatcacaccccactgcttttctggtgattgactaattttcacactgtttgtttgtttttgcaagttactattggcaccggaaccaccatctgagatacaggagaagacagaaatggaagcaaaggaaggtgagggggtcatggcagagaaaggaagaatgatgtgaaaaaaggataagggaagtggtggtttgaaattatttagcatattggtgtctctcataatgcatttggactattttgacagcatcgggttctgaggcaaagcttcttaagggtttccctgcaaaagcacatttggaagggtgaggggcattgtagattgcaaaaatatttatacgccccccaaaaaatacaagcttagaaaacaaacaaaattgggggcaggggacagacaaatttgaattgtagtctgttgcaaggctttctagtgtgtggatctaagatagatttggagggatgctgttgatgttggaaagttgatctttttcagaaactgcttcttaaagttaactctgaaaactgaaaaaagatacctgaaaccatagtatgcaaatattaaaaatcctacttaaacatcctaacaaagagaagcaccttttaggccaaggtagttttaactcaattctccagatagtccaggtgaaaaacatttgcctggcttgaatttctagggagttccacaactgtgtgcaacagcaacccagtgtgcaagtcaggaatccccactgaagcctgagatctctgctgagagctcgctgtgcataagtccccgggcaggaaaccttccctgaggcaaaacacctgatggtctgaaccaattacttcccatctctggattaataaaactagatatggttccttctaactctaaaaaaggaaaaagaagaaacaggacaagaagcctagaaggtgaaaaaaaacgaagtaggtcagctagagaaacaccaagtgctcacgggatcgcattgtacatgactcaagactgtctaaatttcaaggtaaaaatgccatctttaatggaataaaaaaagaaagggcaattagctatggtataatgccttacccttcaaaagttctgaccatttgtgtgcaaaaaaagtgtggggagggaggcctgactttcatccttacagtctgcttgccagcaagtaccgtgcggcatgttaacgatgtgtggaggattggaaatatcaacaataatattaggttgcagtgtcagttcttctcatgggaacctcattatcctgaaacaagcaataggtctgtcagcagctataagggtaggtttcttaagatcagcttcattatctttataacttatcagtcaaaatacatctaaaagttattttttaaagtatgttaatgtccttggctttgcatggtggctcacgcctgtaatcccagcacttgggaggctgaggtgggcaaatcacttgaggccatgagttttgaggccagcctggccaacatggtgaaaccctgtctccactaaaaatagaaaaattagccaggtgtggtggtgcatgcctgtaattccagctactcgggaggctgaggcaggagaatcgcttgaactgaggttacrgtgagctgagattgcaccgctgcactccagcctgggcgacagagtaagactccatctcaaaaaaaagtaatgtcaaaggcctcttaagaagttccagcttagttgtttttctctgtcaattgcatattgacagagaaattttccttagataaagctactcccttaaacaatgaaaagctgattttttaatgtcccatgttctatgagtggaacaatcataatcttgtcatatattaaagttcaactgatcattctcttcatttttatggaaggctggtagctaagggcccaggccctggtatgtgggtgtgaagagaggaagaggttgctcctggggagtcagttctggctttttattgaaagcagcaaagctggtcaggcagtctcttgttatttctgcttaaaactcttgactgctgttccagtccagtcatgtccatcctgggttgcactgcatccctttcagttcctcttggccctgctcttctgctggtcgctgtgctgggaatgctctcccccttcacttgtctaaagctgacccatccctcacctccccgaagaaacaccttcccagagtcctcatcccacagggaagttcctgcttcccacctccgctaggggaagccctgtgaccaccctctccttacatctgttacactttaatggaagaagaacttagagtctcccaaaggcaaggaaaacatttaatgttgactgcagaagtcccagttctcatgtagtgtatagaagagagaaggtaatccatagacatgtgtttaattgagtaaaatagaactgagggaggagaagcagagcccagccctgtcctcaaggtgtttccatagaaaccgagtcaggagctgggcagtgggctcagcctgagacgtctacagaattgcctttttaactgccactctgaatgtatacagcatctgatatgttttggctccgtgtccccacccaaatcttatcttgaattgtacatctgtaattcccatgtattgtgggagggacctgatgggagataatttgaatcatggggtggtttcccccatactgttctcgtggtagcgaataagtctcacaagatatgatggttttatcagggatttccgcttttgcatcttcctcattttctcttgccgccaccatgtaagaagtgcctttcgactcctgccatgattctgaggcctccccagccacgtggaactgtaagtccaattaaacctatttttcttcccagtcttggatatcagcagcatgaaaacggaccaatacagcatccttctctcagaaggcctttccttcacaggttcagagcatccctatatggtagggatgactgagaactgtccttgttttacagatggaaaaatagaaaacagagacccccaagaggttgaacagcttgccgagaatcatgaccagttgggaggccagttctgacaccagaggtcctgacggccaggccagcactgttttctgtagacatggtatcttctaaaaggcatttatcattttttttcctttcagaattaaatgaagactaaactcctgtacacgtgtttgttggtagaggccatcacagaatatggccaccatactgtgatctgccaacccaattaagatactggccatggcttctaatttgtgttttacactgttcagacataaatrtttaaaatttgttgcattgcaatctgtttggttgtaaagatttgacctatgaagcaagaagtgttcatgaatgaggtttaaggatgtcaggggtgactcagaaggaaacgcgctagaacagcaaggatcagggaagcagcgcttttctctttgcaagtcataaaatacaatgcctgaaagagctaataagccttgttatctaatcatgtctaataatatgcatgtggccttctggaattaagaggcagggcacacaccctggataatccagtaacaagccattttataaatgtggttgaaaacacagtcctagctgcccagcacctggccctggattactgtggaaaatttgcaggagtcctgttaccatcccaggaactctggttatcaggaaggcccaggaaacttcagggaacacttgcttttaaagataaggcagcagctccttttctctgcttaataacttgctttactgaatctcattctttgcacttaacttgcacaggacctgctgcatagcagggaagtccttggatggctgaaatcttcttccagccaggtgggttgtcaggcaccctggaccagagcagcagctcctccagacccagctcccttggtgcctggcctgcaggagccactgggtcagcactaactagcagatgttgcctgctgccctgggtcctttggtgctctcgtgtggacctgcaaggaactgtcaaccccatgttaagatgacagaagtgcccgtcagagggctgacaagggaggcccggaggttcccaggctggtctccagcagatctgcctctggatccagtgatctgtcagctattagatagcagctgtgtatgcagacttgagccagcacagggagagcaaaacactgagggccatcagcaaaggagtgaggcacagtgacaatcaacctatgctaatgaaagactggggaagagaacactcagaacctgaagctagtaatttaacaaatagggaatctaaaaacctgaatttgaagatttgcattgttatcagaagaccacagctgctggaaacaaaaaccagaattttaaatacctccccagcatcaaacacgtgaggcttagaaaatcaaatggtttacagtcacgcattgcttaatgtcaggggtacattctgagaaatgcatcattaggtgatttcgtggttgtgcaagcatcatagagtacatacacaaacctcgatggcacggcctactgcgtaactatgctgtagagtacagcctgttgcttctgggctacaaacctggacagcatgtgactatactgaatactggaggcaactgtgacacaataataatcatttgtgtatctaaacatagaaaagatatggtaaaaataccatattataatcttatggattaatgtatatatgaggtctgtcattgaccaaaatgtcgtgatgtggcacacgattgtattaaaaagacagacagaggctggtactttggatcctagaaaatactcattactctagcactaaattatttctagagttctgtgcaggttcaaattgtacaaaaatgtgcaataaaatatttatgctaaaatacccatctcctgccttcttatttgtttcaatacaaaatctgattcctttttaaaaaagagctattaggtcaaatggcttctcattaaaaataattccaagtttttataagatttaagacagtagtctaggaagaaatgaagtttctgttcaaatatttcaaattttgatccctccgtagcaaaaataaacggattaaaaatgtcttttcaagggcaattgcactgccttgtaaataaaggtagatttctaaagtaactgttcattagaagaaaatgaaagaaccattaaactggaaaatgtcttaccttgagaagttgaggaaatgaacatgtcgagtgaataaatagggttgttcggcagtacttatatttttaatcagttccatctattaaaaaaagtaaaaattagcatatataggatctaatttaccaagccatattaagttaaaggttatgtatcccactcttttttttttttttttttttgagatggagtctcgctctgtcgcccaggctggagtgcagtagctcgatctcggttcactgcaagctccgcctcccgggttcacgccattctcctgcctcagcctctctgagtagctgggactacaggcgcccgccaccacgcccggctaattttttgtattttttagtagagacagggtttcaccgtggtctcgaacttctgacctcgtgatccgcccgcctcggcctcccaaagtgctgggattacaagcgtgagcctccgcgcctggccaatatccgactctttttattcccacttattcccagtggaccagcggtataagtgcaacatttatcaagttttacataaggctccttagcgaataaaacagtgctatccaaattgatagtcctgtgtctcatttagttgattgttaccatgaaagcaacgtgacagattaagtaattttgactggagaaatcagtgtgttgctgtactaaaatgtaaataaaagaatgccttctatcccttcctttaaagtcaaatcaaggaaggaggttagtcattatcttattctgtaaatgatattattgggatatacaaaaatattgaaacaggtgctgcagaatttaaaaatggaataaaatgaggtactacttcattcttgtgctccttgaccatgaaatttataaggaaaatattctgtaggaaacacataaacccccaaatgtcttggtgttttggtgggtggtcatctgaattatttatttgcagttatcagcaaggcaaaaagtagtttatattcgtataaactaacttttatggccttctggaacatgtcatgatacagaaaatgtttagtaaaatctgttagaaattccaagcattcttatgactccctaactttctgaacttctctttccctagtttttctggttggccccatcaaaacgaacacactgtggaattttttaaaagcacattgcagcttgctactttggatgaatgtcagaagtgcaacatttcatgttttatgaaatagttcaagttgaaaaactggaaacaaaaccagtcattcacatgtgaaccgcagtagcaacaagaacaataaaataagagtctggaactccaggtttgtctcaaacatgacagaaaacccaagtctgccttgttccttcatgtctaacacaggggctgacacatatataagtgctcgataaatatttgttcaatgaattaactccaactagtacacgctttatagattattacactaggatctcagtgtataaaccttgtaattagatattcaagctcacaacgattgaaggaatgaaattgaattttaaaggtaaatgactcgcagttcataaaccctgtgcttctgttagtcagtggcaggtatgagtgaataatggtctgtctgtcctcaaacctcagtataaaaggaaattgaatcctgcctctttatctactgtttatcctcgacacaccacctgcaagtgcttgtttttggtagtaaaacttcctgcgtggtcacgttgttcattttgatttttgatgcatttactaatggaattactggtttggagacataaccataggtaatttatctctgagggtgcctgcttggaaaaataactcttgactgtgtgtatgtttaatgtaaagaccattaacacttttatctctaggttattttattcagatatttctctgcacacagaagagtcatacaagaaagccccctagtactgtacaagaaaactggaagaacaggtcagaaggaaaaacgtttctttcacatattccacattaaattatattctctaaacacatgtcaatgtgttaaatttaatggaagaatagtagtagttagattttgagaacagtgtcataatagtcataaagctgtctatttcaggaggaaaaaaatggattagcagtgacaatgtataactctttctagacgttatctttaaacatagaatcaaggtactaatgctcgtgtttattgtattagcacagtgaaggcagagggtacatttcagctctcagccggtttgatcttcacaaattctaagactttccttgtttttggcgacaagcagtcatattctgaactcgttgctgccattgcttgaggtctcttgcctggtcctccccccatggccagcagcctgcctgttccttcacctaaatcttatttgcaggagaggcatcagggggtgacaatggcaccacctaaaatcaccaacgagccacctctcctctccctggctcatgcgggaccactcctggcctttagtctgattccatggcataaattcactcatcattcattgagtacttattaggcactggagataaaaacacgaataagatgggtgggaagacacatgaagaagacagtggaatatgtcctaatggtgccctcaaactccaccatggccacaaacacacttaatcctcacccatctttactctttatccagcctcatccatctctggacagtctggttcaggttactggtgctcggcatattcccacctttgatccagctctttcccggactcccataattcaatggtgtgttgagccatgtgaattccacctgtgctatttccctcaactggctctcaggaccacacatgctgtggccagccaaatgagagccctccttgttccttcctcacactaaagcctgaccaagtccaagctccagtttaagttccctctttcagaatgttcttctgctactccttgtgtgtctaaatactaaccactcttcacctctggctaaaatatctacccctccaagtagcctttctggatagcccttttcattcaacatcctttgatctcccctctgtatcaggcaatgttgctcagggttatggctatagagatgatggatttggttcttgctgttaggaagctgtcagagtcttgtgggtgaggtggactaagaggcaggtacaatcatgtgataaccaccatgaggtagatggtagataagtgaagcacctctctctacattcagatggagaggtaatgcttccccagggaggtttccctcagtagtctggaagggcctagaggagttagccaggaaagaaagggattcatggcattgcaaataatgaagagcagatacaaaaggcagaacataaaatgatacggcaccaaggaactgcaggagttcagtgtgccagaggtgttcagtgatccgagatgggatcagcaaagtagcaggtgagactagagaatcaggtaagagtcaggtaatggagggcactgcagatcacagcaggaattctgacatttattctgtgggtgatcaacagccagaaaaaattcttttttccagatctgaggacagggtggagaatgtgaagaagggtaaggattagatacagaagcacagccaggaagactgggcaataatcccaacagcaaatgacaatggcatgaactgaggtcgtggttttcagtgtggtccccagacctgcagcatcagcatcacccgagacttgttagaaatgcaaattctcaggatccgccccaggccttctgaattagaaggaactctgggggaaggggtgccagcagtctgtgttttgccaagccttccaagggatgctaaggcacaaaagtgtgagaaccactgaactaagtcaatgtaagtaagacagaaggggaggttccgggagggttaaggaggtgactacctgccaatggaagggaggcagggcaagtggccaagagagcttccttcccagattcctggctaggacaaccaaatacgtgatggtatccattcatggagatgggcaatgctgggggaggaaaagatttggctgcagataaggggggaaatgggcttggttttgaacatgaccttccatagcagtgcatctgaaaattcttcaggacatgcactttctacattacattgtagttgagtttgtgcacgagtctgagctgaaatgtaaattctgtgagggttgggggcaggctttatcccctagaaagcctactcaaggtacttggacagaacatacaccccacaaatatttatgaaatgaagctatcatctttagaaatcctttttggagtcaagaaatgtatagttaactgaagacagaattatctagcactcag

SEQ ID NO: 97296 - DNA, 18472 bp, Homo sapiens
gtgaatgccctgttgactcgggagcctaagccttctctggtgggtgtgggaaaaggatgatcctcagtgccttaggccagtaccatactctgcactatccaaccccccaatccccctaccttatatcccagagaatctacttgattcatttctttgacttcttccttgtcttggtttatgttgatctcctgccaccaaatccaagtccctgaatatcctcagatatttaactgcatgttttgtggaagagattgtgaacctcatctgttggcaccaaggggggtagaattaggttcaagaaaaggaagttggtctaaagaaaaattcccccttcctttttttttccttgctcctttgattaagtaataactttctttcttttttttttttttttttgagatagagtcttgctctgttgctcaggctggagtagagtgccatgatctcggctcactgcaacctccgcctcctgggttcaagcaattctctgcctcagcctcccgagtagctgggattacaagtgcccaccaccacacccagctaatttttgtattttttagtagagacaggttttcatcatcttggccaggctggtcttgaactcctgaccttgtgatccacccgcctcggcctcccaaagtgctgggattacaggcgtgagccactgtgcctggcagtactaactttcttaaaagtggatgtatttaacagagacacattggccaagtctctgggtcacttacactatccattttctgtcctgaaattgtgaagcaaggtattttgaatcagttttcccacttgcacgttgctctctcctgccctcccctcagtacaatctctgtgccctaggaaggaagggatgggactatgttgaatgaggattaattagtaactcaccagtttcgcaaaaaacagacaaaaacagaaaacaaaacaaaatgaaaaaaacagcaaacaaaacaaaacaaaaaaacaacaaatgtcccagagaataaggagctacgcatttacaacagccctcacaggtccacatccctagacctctggggaaagaactatatgaaagtctttttttttttttttttttttgagactgagtttggctctgttgcccaggctggagtgcagtggcgtgatcttggctcactgcaacctccgcctcccaagttcaagcaattctcttgcctcagattcctgagtagctgggattacaggagcccaccaccatgcccggctaatttttgtagttttagtagagacagagtttcactatgttgaccaggcactcctgacctcaggtgatccgcccgccttggcctctcaaagtgctgggattacaggcgagagccaccacacccggcctgaaagtcttttttacttttatttatttatttgagacggagttttgttcttgttgcccaggctgggcgcgatctcagctcactgcaatctccgcctcccaggttccagcaattctcctgcctcagcttcccgagcggctgggattacaggcatgtgccactacacccggctaattttgtatttttagtagagatggggtttctccatgttggtcaggctggtctcgaactcccgacctcaggtgattcacctgcctcggcctcccaaagtgctgggattacaggcatgagccaccgtgcccggcagaaagtcttttttaaattcccacttcctctttaattgagaaagaagtagctgcagatttgtccccaatccaaacaagaaggctcatcactgccccctgcgggtcctgttgggcataccccaatgcactgggccatgccctggtgccatgccaggcctctgtgatatccctgaggaccaagatatgattatatctgactcaaagtcagatagccagtcttggaatcccagctttacgactgaggttatgagacttgggcctcccttctgtaaaatggagatgatagtattacctgtttgtgagtaaagtctttggcacagaaacacatctttttagtgtggtcttgatgactagtcttctttctcagagtctctgctttcagagaactcaggccactgaagtctgacacctcatcatcttaggggaggcactctgggtggggagttccaagttaagaggggcagtgatggttctgcaaagatctccaactcacagcttgattcaacaaatgtctatcatttgtctaccgagtactagggttggtagaaagccctgggacacagacatgacaaagacaagtccctgaagtgctccaggaggtgggtagagcaaacatgaacccagaacttccgtccatagtgcagagggctcttaaaagaagagaaaccaaaggcttgtgttgttgggggagaggggtggaggggaggaacatggtctggagaaaggaacagccagccctgtacaagacaggacatggggctggttcttacagggttaacagtgttgctagacaggtagatacagaaaggcaatttgggcagctgtagctgtctgagcagacactgggcagaatatagcttttggctgggaacttttttcatcttccccacctggagcacatgtgggttttgttgttgttgttattgttgttgttttagatggagtttcactcttgttgcccaggctggagtgcaatgatgcaatcttggctcatcgcaacctccacctcctgggttcaagcgagtctcctgcctcagtctcctgagtagctgggattacaagcacgtgccaccacacctggttaattttgcatttttagtagagacggggtttcaccatgttggtcatgctggtctcgaactcctgacctcaggtgatccacctgcctccatctcccaaagtgctgggattataggcatgagccaccttgctgggccaagtgtgggtcttagaagctagcctgggttaggtgcagtggctcatgccagtaattctagcactttgggaggccaagctgaaaggatcatttaaggctgagttccaggctgtgataagccatgattgcactactgcactgcagcgtgggcaaccgagcaagaccctggctcaaaaaaaaaaataaataaataaaataaaaataaaaaagtttttcttggggaaataagaaaataaattttttttaattaaaaaattaaaaaaagaagccagacagttgcatgaggaagggctcaagatccaggccctatccctggccagagcatggtgcacagcaggtactcagtaaatggctctccaggggctggatggatactgggagagaagatatggaggatggaatgatggcctgtagatattttaacatgctgttttgtggaagagattgcagacttcattgattaactccaaggggtagaattaagttcaagggaaagaaattggttttaagaataacctttttcctagatttgtacttaattgaacctttgcctaagttatatggctttttaaaaattagaggtttcctgtaaaaattcttaggtgccaccgggaccctaatcttctggagctgccaagggggtctgggaggagacaacatcaaataattacactataacttaatgatagctgtgaaaagggttgtgaagaagctgggtcattggtacaatggttctgagtaggtgacactggacttgacatgttgagaatggtgttgagggaaggatgctggtagaaagaaaagggaaggatgcaggcagagaaaacagcttgtgcgagagcctcccccaagagtgggagtagggtggaggagaaaaagaacagggcttgttgacaaagagaaggtcccagaagaggtgagtccagattggagaggtatgcaggggttagaccatgtagggctaagtcggccacaattccaattttgaatgtgaggaacacggttttttattcactagtgtttcctcagtgcctagtagactagtggcactccacatttggtgaaagattttatcctaaaaattatgggaattcagttttatgcagagaagtgaaataatgatatctttctcattttcatcacatataaaatgagaataatggtcattgtggtgaacattctgtaaagcaaaaataaaattctaaggccgccccccacaaccatctgaatggacttcctcctcagccagggctctttcaaaattaaacccgagtgaccgtttcaggccatgatgggaagtaggggttgaacgtgcctcattatacctctctaccgttaacatcaacacagactttaagtttgataagaaacattttacaacccattctctctgaagcctaggatttgaaggtttcctctgcaaataagaacttgggtctccacaatcctttatcttaacccagacattcctttctattgatttcaggtctttagagaaactcaaccaattgtcaaccagaaaaatttaaaatctacctataagctggaagccccccaccgccccacttcgagttgtcccgcctttctgttgtcccacaaaccaatgtctttctctctttccccctcccctctcttcccttcctcctttcctcttttcttttctttctttcttttctccctttctttctttctttctttcttccttcctttctttcttttctttctcttaggaataacgctcaaaatcctaagggaaattgaacactcgaacaaaggattattagcaaagcaattttacttctgctcagaggggtgtctgcttggccagtcgccatgagagcacacctgaacaaaggggcacgagagcctttattcctgacgcaagtcctgcccctgtaccctttccccattggccggggtcgggtcatacaatctgaactaatcccggttggctaaacatttgatttttttaggtaatgtgggcacgtaaaagaaagtggagaggaaaggggaaggggtgcctgtaatgaactagaaagttagtcctctttccaaataatgaaaggaatgtgagctggtactgataacgtctggtactgataacgtcttgtactgtggcgtgcctcggcatctaacgaaggcaaaaaggagaaaaaggaaaacaaaagtgtgtgtgggggggagtactatgaattaaagaataaaagattgatctaattatttgaagagaaacctcatcatatcccagatttctttctttctttctttcttttttttttttttgagacggagtttcgctcttgtaccccaggcaatggggcgcgatctcggcccactgcaatctccgcctcccgggttcaaacgattctcctgcctcaggctcccgagtagctgggattacaggcacccaccactactcccggctaatttttgtatttttagtaaagatggggtttcaccatgttggccaggctggtctcaaattcctgacctcagctgatccacccgcccaggcctcccaaagtgctgggattacaggcatgagccaccaggcccggcccaaccagtgtatttcttgaatgaactgaagtctcatatctccctaaaatatgtaaaaccaagctgtaccggaccaccttgggcacatgttctcaggacctcctgagggctgtgtcaagggccatggtcactcatatttggctcagaataagtctcttcaaatattttacagagttggactcttttcgttgacaattcaatgacgcttcaagcgtttttggcagctctcatcagtgggatccgcattaatagtgaaacggcatcatggcgcttcccgcagttcgggattgttttgaactttcatctagagcgtattgtgggtggggaagttgtgtttgctgagtagattgtgacactgctggcttgggtcactcgaggtcagggatgagagactttttttcctagaattggtaagacaggaaatcaatcagaggcagagcgacgcctctggctctggtctagtggtgcagcgtctctagccctcgccccgcccaccgtccccgcgaggcgtccactcgccgagccccgccctcacccagcacccaccccgctcctcgcgccctccccgcctgttcccgccctgtgctgaggctgcgcagtcggtgccatcttctacgcccctgggagcrttgtggctgctgtttccttcggctttcctcctcctgctccaccatgtggagccgacggcagggccgcctcaggcccacggtctgcggggtggaggagctacggcgccgccggcgggagcgggaggcaggtgtgggcggccgagggagcgcgggggtatatggcggtcggggataagttgagaccccaggctcggagccgcgggttctgggttgtggtcgtccttcccacgctcagccggctcctctgcccccagcactgcggaaggcgcggagggagcagcagctggtcagcaagaggctgctgagaaacgacgccccagaggaagctggagagggatgtgtggctgcgatcctcggggaaaccgaggtgagggggcaaggtagggtgcgctggagtccacgcccgctggcgccagactcccgggagtactcgaggtctgccccaaacctgaacgcaatccactctacacttccacgcatccagtgggtcaagccagaaacaggggaatcatcctgcacaactctttgacccacaaccccatatcgatccatcatcaagtcctagttgtttacctcctgaagagctttggagtctttacatgcctcaccatcgaagctgccaccaccacctcctctctggatactactgcagtctcctaaaaggtcaccctgcatctatgcttgtcaccgtcactacgtcctttaaaaacacgtggagaccaaaatctttcctgtgccttgcaaagcatagcatggtctagcctcttcctaactcaaattttatcagttttctcatcctacccaccgtcctctttttagttcctgcaacgatatatcggatttgtgtctcaagcccttggcattcgctacgtctaacgttcgtttcttttggtattctgtcttgagagcctattttttttcttttcttttctttttttttttttgagactctcgctctgtcgccaggctggagtgcagtggcatgatctcggctcactgcaacatccgcctcccgggttcaagcgattctcctgcctcagcctcccgagtagcagggattacaggcgcgcgccaccactaatttttgtattttaagtagaggcggggtttcatcatgtttgtcaggctggtctggaacacctggcctcatgatccacccgccttggcctcccaaagtgctgggattacaggcgtgagccactgtgcccggccacctacttgtttcttgtagaatattaatcattatctaatggtttgtctattgttatttctccaactagactttaattgcaggaaaacctagatcctgtgttgtcattgaaaacccggttgcctgcacattatctggcatatagttaagtactcagtgtttattgaatgagtgaatgaaaggatttattcagtaagcattgagtatcccctgtatttgtattatgtttacgtacatagtttaccgtacataccatgttgacatatatattatcaacttattcctaggtcatactattccattgtatgcttactttatgccaggacactgtgctggtcactgaggtacacaaagatgaaaggatagagtccttttctttgaggtgctcacagcccggtgaagaagacagatgtcacaagggaaggaaacatgaggaacaagagaaactcctaagtctctcaaaaagagctaacttcccagaggaaatgaggagcagaaacctgaagagagtgggaagctggagagggtatccaggcagaagaaatagcatgtgcaaaagctcggaaatgtaaaaaaaagaaaaagaaaaagctcatgttaggctggttgttgttagagtgtaggttgcatggggagaatggctagaggagtaggttttgccaggctgagaggtttaaatatccttgaaagaaccctgtatgaaggcaggatagatattgttattctcattttcaggtgaggaaacttaggttcaggtcccatatggagtaagtggcaggtatggtattagaactcagttctgattctctgtccactccactgcaaggtagatgcttattagttgcattagtgtgaatgacaagttctgaaggtgtgatattggaaggctcacaggtgaagtgggcagagagagacttaggacttgctttctgtgaaccgtgtgttctcctttccctgccctgaactccaggtgcagcagttcctgcggcaagcccagcgggggacagaggaaaaggagagagagggggctctggtcagccttcgtcgaggcttgcagcaccctgaaacacagcaaaccttsatccggtcagtgtggatggtgtggtggagggaggagttggggctctgagggatggaccacaarctaagcagggctctggtactcactcacataggctggagggcagcatgcggaccctggtygggctcctgaccagcaaccaggccctgctgcagcttgaggcggctcggtgcctgcatgagctctctcactccgagcagtccactgttgctgaggcctgcctgccagccacttcttacctcctcacctacctctccagtcacagctcagacttcatagtaagccctgtcccttcctatcttgttcttggtttagattttaaaattgtgcttttgggaccagtttgagctggcaggtaggaggaagaaaacatgtttgcccttatgcctacagccatggctacacccatcatctccccaccctcttgtgagccgcaaggatagctgctccagcgtccccatcacctcccctccccatctccccacacgcagcctggcatgaaacaggccaagcccagtgcttttgttgcctgttctcaggagctgtgtctgtatacactgggtaacctgatcgtggagagtgaggctgtgagaaggcagctcctgccacagggcattgttccagccttggctgcctgcatccaggtgactcctttcttcctccctgggcaacccttcctttgctcctccccacatgctccatctactttggttaggtagctccagcctctgccctgtgccaaggggctgaaagtctctgaagacctgatgacccagcttccagtcagatccttaccctgtctacttccagtccccccatgtggctgtgctggaagctctcggatatgccttgtcccagcttctacaggctgaggaagctccagagaagatcattccgtgagtaaaattgtctttagatgtgcagccagaggtgacccactcagtagtatagctcccggatgcctgaatgatttccaaagctgttgcacattttaaattcatgtgtctggctaggaagggctttgggtttggacactttcccatctgggcagggctttgggtttggacactctcccrcctgctatcagggtttggtaagaaccactggcatcttcgtggttcctacttacagccctgcttctgccagcagctccatcttggcctccactctccctcagcacatgctacaaatgttgcaacctggcccaaagctcaaccctggggtcgctgtggagtttgcctggtgccttcattacatcatctgcaggtaacagggcaattgggaaagtaccacagatcttccctggggctcccttccatgacattcaactctttgaacttgtgtctggaattgctatagtgagttttcctccctccactgtcttctctttttggagcccaggagacccacagaccttagctgtttctctttttttttgagacagtctcactctgtcacccaggctggatggagtacagtggtgcgatctcagctcactgcaacctctgcctcccgggttcaagcgattctcctgcctcagcctcctgagtagctgagactacagatgcgtgccactatgcccggctaatttttgtatttctaatagagacggagtttcgccatgttggccaggctggtctcaaactcctgacctcaggtgatccacccacctcagcctcccaaagtgctgggattacaggcataagccaccacgcctaggcaactgcttctcttcttaaaggtggaattgactatatacctagggactgcttgcttcctgttgcccagccaggtcagcaatcctctgctcattrgccatggggctctgtctactctggggttgctgctgttggacttggctggggctgtccagaaaascgaggatgcaggactggagctggtaggtgaagatgtcaggtgaaattctgggagatgtttcttgatactctggaatgcaggtaacctcttccttcttacacctgaccccccaatttgtctttgcagctggcatgccccgtgcttcgatgtctaagcaacctgctaactgaggcagcagtggagactgtgggagggcaaatgcagctcagagatgagcgtgttgtggcagccttatttatccttctgcagttctttttccagaaacagcccagtctgctccctgagggcctttggctcctcaacaacctcactggtacgcaccataatctgcccaggcctggacatttggataatggggatatttcctcatggcctaggctgaggtgggtagtattgacaggggtggtgggggaaagcagtttttcaccctggtacttctcttccagcaaacagtcctagtttctgtacctccttgctctccctggatctgattgagcctctcttacagctgttgccagtatctaacgtggtgagcgtaatggtatgtattggggttacttgaatccaagatctggtagtyggattgtatgggacagcagtcctgagccctcagatgtacccttagttgagagccagcaggtggtggtgtgtggcctcagggcccaaccaatctaggtgtgtgtcccttaaactggattatttatccttggacaaatcaactaaccaccttaagcttcagtctcctcacttataactgaggataatcttgcatcatagggtagttgtaggagtatgagaacatgyatgtagaagagcttggcatggtgcctgggcatgtggtcaccatgtcatatattttagctattgttatgatctktgtgtttcattctttgtagactatatatgtgtctatctgcaggtgctcacagttctgtgcaatgttgcagaaaagggtcctgcttactgccagcggctgtggccagggcccctgcttcccgccttgctgcacacactagccttttctgacactraagtagtaggccagagtttggagctgctgcatctgctgttcctgtatcagccagaggtataggtttctggcccacatcctcagtcacccctgttctgaagccacacagtggctcccttcccatccagtcctaactatagttgtttctctgggcctggctaacytatataggttccatgtcagaaacttcatcctcttgttggggaatgcaccctctggagtrggctgacccatgaggctgtgggaattgagtcttaggacacagagaccaggtgtgttgaattttcttccctgcccctaggctgttcaggtcttcctgcagcagtcagggctgcaagccctggaaaggcatcaggaagaggcccagctccaggatcgtgtgtatgctctccagcagacagctcttcaagggtgatcttgtttctcaatgtcactcattcccctctctcttaacatcaagcttgtttgtccagtagagcctttggagatttaggaccataatgaggtctcatgttctctgctcccacacctaagccaagacctttgggtcccagctcctccccttccactcagcactatccaggcaggaggaccaaaagggactcagtgtggtctacttactctggggccctagaatccctgcccccccgccacccttcatgtttgcttcagcagctggtagcttttgatgagacagaataaagttttatttttatattaagctactttgcctcagtggttgcacagtaaggggtagagggtagatgaggacaagaacaccctgagaaagtattttacagcacaagctttatgaggaataggagaacacatttttttcacattatactaagtccagcagagcccaggctctggggctgttgctcttaatcctcagtggaggcttcaggctttaccacttagaacgttctccagggctctggttacctgatcagcactgaagttgttcaaagggacattcgtctcttggccaaatgctgaagagagagagggaggtgtctttaactattctgcaccctggaggctaccaaagtaaaataaaagatctttgtctttatcttagtcttgttaagacaggaagagtattaaagagatatgatcaaaatacatttggtatgcctagaattaatacaataggtctcaaacacatctaggaagcccaagtccaaatagaattttggctgattctggatggccgcaatgggttgtttcagggaagctttcgggggcactgtaggcatttattattaactacggtgagcaatgtattgcatgggtccagcctcagctgggagcccattctctctctttttttttttttttttttgagacggagtctcgctctgtcacccaggctggagtgtggtggcacgatctccactcactgcaacctccacctcctgggttcaagcaattctcctgcctcagcctcctgagtagctgggattacaggtgcccgccaccacacccggctaatttttgtatgtttagtagagacggggttttaccatgttggccaggctggtcttgaactcctgacctcaggtgatccacctgcttcagcctcccaaagtgctgggattacaggcgtgaaccaccgcacccagctgggtacccattctctaggctcccataggctatctaacataatacccagcacaatacactaaagttactcgtgtctatctcctcctgtagtctactggcttttggaaggagaagcttttttccttctccaattattagtgcatgtctaatgtctactgtgtctcacagatatctactctgagaaccaatctgcttaaggtggtcactctcctccacctcctcccgtcattcccagggcaccatatagttaaaagctgtgattaaaatcctgttattcagtatgtataaacatttattgcatacctacaatgtgttaggcaacatgataggaaaatttcattttgcaatacattgccatgccagtcttagaggggtaagtgcattctaggaaggggaataaatgtaaaggctcaatcctgttaaactctagctgcatctaaagttgcagctagagtttaacaatagtgcaaaacaaagttttgattccgttttctaatctctacagtgagaaaagaagaacacgcttcctcctaactaatgaagattaaatgagttaggcagggaagcactcagcacagggcccagctctatgtgcaaaattactgagattctcacacactacctggactgacactggctacacgttatttggagaaactatattgactaacttctctcctgtctgaagcccattcttaactacaaaaacgtcagctcctggtccctacgcaggattcggtcagcctgcatacttatgttgcccggaatacaacgcatcatataaccctgcgaatataaatttcttcatggaaacaagatcaacagcaaggctaaagtccgagttctagtttctccacgggtttctgcacgaccttgggcggtcccttctcttctcaaacccttgttcccctaccggagccccagacccctggcgtcccgcactcaccgtagcgggcccagagcttgggctgcacatcggagcattcgcggattaggatgggtaggtcgggattcgccttcttcagctccacgtagcgtttctcaatgaagtccctgcggggccggagagagcgccgcgcgtgctgtgggcgggggcttccctcaacttcagggaggtcgaggtcgtgaccctggcgtcccgaagcccgcccgcctcaccacgccgcgcctcacctgacgccctggctgccgggcgagcgctgacataagtggatgcgaatctcacgcaggcccagctttgccccgactcctcgacttgctgcggccgccgccatccttgttaatatcgaagtcgccaattccaggtcttcaggccaagtgctccggtctgaccaaccgcggaccctaaagcctagcccataggctgcatgaggcaggggcggggtaaagcttggccaatgatataaaagtattgtaggaccgctgcgaggtcaatttctttgcgctcggggttggtcggagggaaaaacaggaagcggaaaggctgcgaacgcaaagcagtgtgggttgattctgaggtgcactgtgggaaagagcttgtcgctgcggtgttgctgttggagactcgattgttggtgacagcgaaagaacgataacaaaatgccggagcgagatagtaaggctcaggccatccgttatttcttccccatggcacttggggcacttggcgcattattgtagcttctgagcttaagccgggtgtgtgtgtgtgtgtgtgtgtgtgtgtgtgtgtgtgtgtatgtatgtatgtgtgacgcttgagcccggagaagccacagggtcctaagtgaggccgacagctccaaactccgtccccagtcctcactcctactccaagtgatgatgggcggcttttgtgcgtggatcgctttcccccagtcctgtccccatacttaatcctgggttgcgcgtatttatcttttacgtagtattttagacgtgatcttccggaagtcttctctgatcctccagcgcaggattagggtcctctgctttgtgctcccacagcttcttgtagtttcctatttcagcacttattacattgtgttgacactgtcgctgttctaacttttgttctgtattgttcactactatatctcaaatttttgcataggatctgacacgtaagagactgattaaattaacgtcaattttttttgtcaggtgagccgttctccaaccctttggcccccgatggccacgatgtggatgatcctcactccttccaccagtgagtattttgtgctaggaccatggaaatgagttgggcaatgaatagaaaagtggtggtgatggtgaaagaattctgaatgtcttgtcatcaaggatggtaaaaaattatacccgctggccctttatctctgtgagccttaactggatcaggccaagtgcataagggtattagaagggaaattcctgcaggaaaggtgttaagtttttttttttttttatacgtgttgtgtaattacacattatataggaattacttcttccaatagcaaattaaaacataggaaataagggtaaaatcatctttttattttttttgagactgagtttcgctcttgttgctcaggctggaatgcagtggtgcgatctcggctcaccacaacctccgcctcccgggttcaagcaattctcctgcctcagccttccgagtagctgggattacaggcatgttccactacgcccggctaattttgtatttttagtagagatggggtttctccatgttgatcaggctggtcttgaaatcccgacttcaggtgatccacccgcctctgcctcccaaagtggtgggagtacaggcgtgagccaccgtgcctggcccccgataaaatcatctttgataacatccccaattccagtccatttctttttttttttcttttcttttcttttctttctttttttttttttttgagacggagtctcactgttacccaggctggagtgcagtgatgcaatcttggctcactgcaacctctgcctcctgagttcaagcggttctcctgcctcagcctcccaagtagctgggactacaggcatgtgccaccatgcacgactgatttttttttttgtatttttagtagagacagggtttcactgtgttcgtcaggctggtcttgaactcctggcctgaagtgatccacccgcctcagcctcctaaagtgctggcattacaggcgtgagccaccgtgcccagcctcagtccttttcttagaagtaaccacagttaccttttttggcatatcttttcctcccgttgcccaggctggagttcaatggcattatttctgctcacagcaacctttgcctcctgggctcaagcaattcttctgcctcagtttccccagtagctgggattacaggcatgccccaccatgcttggctaatttttgtattagtagagacagggtttcgctatgttggccaggctggtcttgaactcctgacctcaaatgatctgcccgtctcggcggcccaaagtgctgggattacaggcgtgagccactgcgcctggccctcctactcttttttaaatgcatttatacacatacatgcatatctgaggaaaacacaacattgctttgtgatttaaaatatttgagttaaatgatattatgctgtatatatcatttttgcaacttgcttctttttaaaccctgctcagtgtttctgagattatctttcagagcagtgacaagcattccctccttggctaaactttagtcaggttccccaaagagtcccatttttcagcaggactcatccgtggcctgctgagcacagttttaacaaagaaatcaaccaccgctccacccccatacctaaccaagttgcttttagtaattttctataaattctcacttgtccctgttgtattcggaattaagttcagtctctctactctattacaatggtcttgactcttgttacagtagtcttcaataaagtcttccttggggagaagaggaacttgattagatatcaagttggattggatatcaagagtgggaaaactttctgtgaactgacttaggattcctttttaaaactgaggtcagcaggccaaggaagagccctagtcagaagagagctttaaaggagtctgactttaatttgatcaagagaggagtctttgttagtgtaccaattaaaataatctcttgtaccattagtgctgtctttccctctttgggaaacaccatcatagtttagtcagtctccagctaataaacgcttagtctgtttcagactgattcttttcttttttttatttttttgagacagagtcttgctctttttgcccaggctggagtgtaatacctagatctcggctcactgcaaactccgcctcccaggttcaagcgattttcctgcctcagcctcctgagtagctaggattacaggcgcccaccacaacgcccagctaatttttttgtatttttagtagagatgggatatcaccatgttggccatgctggtcttgaactcctgacctcgggtgatccgcctgcgtcagcctcccaaagtgcggcgattataggtgtgagccactgcacccggccagactgattattttcaaggctataactgaattaaatttacaggccttcttatatacatatgtcagtaatggaccaggctaaatataaataaatggagttgctggctcataggatatatatacttaaattttaacaaatactgcaaaattgcccttcaaattggttatactggtttacattctcatcagcattatatgagagagtccccttcccaaattctcactcacacttgatttatcaaactttctggtagttaacactctgatgcattaaaagtggcatggcatatctggtcgggcgtggtggcttacacctataatcccagcactttgggaggctgaggtgggcagatcacctgaggtcagaagtttgggaccagcctggccaacacctctaataaaaatacaaaaattagctgggtgtgttggcgggcacctgtattcccagctacttgtgaggctgaggcaggagaattacttgaacccaggaggcagaggttgcagtgggctgagatcatgccactgcactccagccggggcaacagagggagactctgtcttaaaaaaaaaaaaaaaaagctgggtgcggtggctcatccctataatcccagcactttgggaggccgaggtgggtggatcacaaggtcaggagttcaagaccagcctggccaatatgggtgacagtgagactccgtctcaaaaaaaaaaaaacagtgtcatatctttgttttaatttgtatttccctgatttctgttaatttaatcatgatttttacttgttcctttttcatttcttattgagtcctaatatttaaaatctttgccttttcttctagatcaaaactcaccaatgaagacttcaggaaacttctcatgacccccagggctgcacctacctctgcaccaccttctaagtcacgtcaccatgagtaagtctttgggtgatccaacctgtctcccaacttgtttcttgctccttcctatttctttctactaagtagaat

SEQ ID NO: 97297 - DNA, 40359 bp, Homo sapiens
tttttttaaattataaggctattttatgagtgtatagtgcatatctttcaacattattaagtttaaaatgtatatgtactttctaaatataaattctaccccttatgacctacaccaccccaaataaggatatttaggagacggcaggttttttgcacataaagatgtgtaccttctgctaatcaaaaaatccaaagagcttttttcctctcttttgtctcttttacataataccttttttttttcaggatttttaaacattttcaccaccatgtgcaatctaatatacctttttggtatcatttttctggaactagtatgctagatattgaagtctactttaacatggaggtttttaaaggaattaactagacagagactagaatggatctagcaggagtagaaggggaagaaggcaatgtctgatcatcaaaattgtcagataggcacttttgccctttaagtcaaatgggttgtgaaggctgaatggtcttagttaaatgttggaaagtcactccaagaatacgagtattcatcaaatacctatccaaagatgagtgtagctcacattcagctctcattgacatgggaattctttttcctgacgaatgagtcctttgaacactgcctttttcagtggaaagccctatcttccttgtagctgactcacaactctttgcccagtatttctgcagaagagggccatgtgtcagtgctaagatgtcagcctcatgtgatctttctttcctcgatttatcacttggcatcctggcacactcagctcacatgtggcttggcgctagatttacattcaactgaactgaacattccctccagcagctaacctcaattcaccctgggatgagattagaatcaggaagcctggccaggtttgaatcagcagtggtgactccatagaatttcaaatgatcatggaaacaaatatgcatctacatgagctggattgggcttccaaacatattcacattcgttaccaagttgctcagcttttccataaacaacaaaagaaactatgtcatacatttgaaaaattaaaatccagggttgatagaacccttttaacacatattagtgcaggaatattatacaataccataataattttaaaaatttacatttgtaaaattctgccttttggaagaccttgaagcctttaagattaatattcattaagaatacctttgcattttaaaatacatgctgaagtatgtgcttcacatgggttaattaaccttatatttgaaatttaattttagtttttatctaagtaatactgtacatagtttaaaaagccaactaacactctaaggcttacaatgatccaaaacatttcccttttttcaccacctttccctacacccacaacttcccaatcattccaatttagggttaaatcacattcattattatagtcttcataattcacagctaagccaccttggatactatgtttacattttctttatttattgaaaaaaaccacacatctttatgtttttagcttgctcactcttctgtgtgtttgaaataatggtaaaatacaataatattgtcaagcacagtggatcggagatttttcttctcaggactattctgcttataggtctacttcctatagctatttgtcattgtcctcctggtccttctcttttcttctctcctgtgctagatgctctctcttcctatccctccctctcttcccacccccacctcccacttctctgtttatatcctgattttggtggaacacatcctccaggctccctggcacagggtacataagaagaaagaaattgacatcttgcatacccgcatatggtgtattcttaccttcacttattgtcaggggtcgagagagacattttgttcagggacccctgaacaaatgtcaataaccttagtttttttccctgggtgaccactttccatggagaaaggctttaggtgctgtcgtttagtacacatctttgccttcattcccatgaccttagaatagtgcatcattccttccccaggtgttcccattgccattgtccagaatagcatactttcaacattatggagtgcattattaagttcagaagctccctgactcagcctcctcagagaatacatcttagtcttctgccagggtgaaagggactatctgattggatgtgtggggtgggggaagagatctgggcgtctaactgcaactcataaagacttcgaaccaattcttttattttgagcattctcccagttctcttgtttcctgtctttacatttccttgctgccttcaattcctgaggctttctaagttttgggggcacacattagcttatttttatttttttgagacagagttttgctctgttgcccagcctagagtgtaatggcgcaatcttggctcactgcaacctccgcctcctgggttcaagcaattctcctgcctcagcctcccaagtagctgggattacagacaactgccatgatgcttggctaatttttgtatttttagtagagacggggtttcaccaagttggccaggctggtctcgaactcctgacctctcaagtgatccacctgcattggcctcccaaagtgctgggattacaggcatgagccaccatgcccggctgcatcagtttattttggttaggcttctctcttctgcaggcacttagtggtaccaagaagtaaatataactcagtcactatacatctatccactttccatcctcccattgtacctctggctgattgacgtttccttttccactctttattcttgtgagttcattcattttttactgttattctatcaaaggctttggggtaagcaggtatattcaacctaccacatttatctgccgtataaaaaatggagacaaaacatgtcatccctgcaaagatgtagaagtcaagtcacagaaaatgagatacataatcaagatcctaggtaaaggagtaatgtcgttagggctagattttgctttctgtgccttgactagccgtacctcctcttgaggcattgttctgtaaggacttgttatgtaacccaggtcgttcttcttagcagtgagtacccttttcagggatcactcaaataagagggactccaagaagaaggaaagaataaaagggaaggggaaacaagggagaagagatggccatgaaacagtatgcattgaaggcactctgaattgcaatatgcaaccacacttcacccagaactaagtttttaaatgataaagcagtgccagggcaaattagagcacacaaaccccctacagctgaggtagacaatgggacagctaggatccttggtatcaagtgtgggagactgaggagcatcatattcctgagtgtgttccagcgattgtgctatttctacaacatctcattcattacgtacaaagagaagtcatcaacagctccaaggaatacagttcagcatgttttcctttttgtgagaatctgcagtgggttggggacgctttgcctagcactttgaaatcttagtacattagtaataatttatatagtattagagctgtcagagaacatcaagataattttcagatgcccctttttcctttaatgctttgaaatatttgagtctacaattgtctgaaatatgctcttgctatgtcagaaggaaagcacccaagagaagacagtaggtaaagcacccagaaagacagactgagacggtggcttgagaacactttattcattaacaaaaatcttgattaattttgtgaatttgtttcagaagtttttccttactagaggaaacaattgaatgatcttgcatagagaaaagaaatccagattcccttaaattattttttgtaccatatgatgcagaaatttcacttctaggtatatattcagaagaaaagaaatcagtatattgaaaagctccctgcactcccatgtgcacagcagcactattcacaacagccaagatacggaagcaacttaagagttcaccagcagatgaatggataaagaaaatgtgggacacatacacaatggagtactattcagccataaaaaagaatgagatccagtcatttgcaacaatatggattcactcggaggtcgttagattaaatgaagtaagctaggcacagaaagatcaactttatatattctcacctatttgtcagtgctaaaaatgaagcaattgagctcatggagatagggagtagaatgatggttaccaaatgctgggaagtgtagtgggaaggaggaatggttaattggtacaaaaatataattagatagagtgaataagatctagtatttgatagcacaatagggtgacttcagtcaacaaaatttatcacacatttaaaaataacttaaaaagtataattggattgcttgtaacacaaagaaagaaataaatgcttgatgtgatagatatcccatttaccttgatgcgattatgatgcattgtatgcctgtatcaaaatatctcatgtacccataaatatatacccttactatgtgcccacaaaaattaaaaattaaaaaacccttaaacaacaaaaaaaccccaaatcccccccgcctttttttttttttgagacaaggtctctctgtcacccaggatagagtgcagtggtgcgatcttggctcactgcaacatccacctcctgggttcaaatgattcttttacctcaggtaattcttttacccaagtagctgggattacaggtgtgtgccaccgtgcccagttcatttttttgtatttttagtacagacagggtttcaccatgttggccaggctggccaaattcctttttgtcataggaacgagataggcataaattctccacgaaggaattatttctattggaaagaatatgggaactaaatttttttatttgcttcagatatgggacttttggtgaaatttcagttttctgcgcattgtactttcacaacaagtttttagaaatcacgctgaaattctcaactgagagatacgtatcatgatcaacctttgccacttatactctgatacatgtggtggtgtatttccagatttttactatatgtggctgtaaaaatgctgttatgggctacagtgtgtcccctgccaaattcgtatgttaaaatcctaacccaagcacctcagaatgtgacctatatggagatggggtcttttaaaaggcagttaagttagatgaggccactggagtaggccctaatccattatgactagtgcccttgtatgaagagaaaattaggacacaggcccagagggaagaccatagaagtgacatctacaagccgaggggagaggcctcagaagaaaccaactccacagatgccttgatcctggactttcagcctgtaagactgtgagaaaatcagtttctgttgtttaagccattgagtttatggtgctgtgttatgacagccttagctgattaagacatatgcccgtaattttatgactcagtaaagaaaatattcacttttacttaattaacccaatcatgttctttacacacaaagaaggagtctttcagatctgttaccccaggacctgtcacaatgcatggcgtacggaggcactctgtgcacacgttgagtttatggactgtccctgaatgtcattcagatggaggactttgcttgtggccctagttgtgtgatatgaacagacttcagcatggccatccctgccgacgccaccatctcagatattccatcaatgctccttagccccgagagcaggccaaaaagacaaagaacatggtctccaagcggcccagccccaagcaacacaactccctggggtttctccaaaaagagaagggtgcgttgagtggctcttagctgttcctaccaggatatacaggtgagccaagaaaaaccacatggctagctttatcaggagctgctgacaggcctgaaagatccaaaacggacacctgacccatgtgactgttgtcagaacactatccaccatggcaaccaggccagtttccatcgcacatgtgtcccgcagctccaccgaaaaggatcaagaaagtcaggattctaaataccaacagcatcactctgtcaaaaccacccttgcaacctttctcagaaaaggaaatgtaatgacaagatgaaagttagccagaacggccaygtccagaaaagctctcagtagtacagccatctgtccgaaatactctaacctwcaaggtggccacggtctcttcagagggtcatggagctctgcaaagcttgtcttaaaactgattaaggtaaaatagttattagaagacatctttttctttcttaagatcaatagaaaaataaacagggctgggcaaggtggcttacacccagaatcccagcactttagtaggccagggcaggaggatcgcttgagcccaggagttcaagagcagcctgggcaacacagcaagaactcatctctacttaaaaaacaaaattaaagtatcagctatgccatgagctatctaaccaggtgcccctctcccaccatttcctctccctgtaccctgtttaggtccttcacagaacttaggacaatttcgatttgtctttctctctcctcgcctccccgcctatttattttctgttttccccattaagggcaggaactgtgtttattgtatttgccattatatattcaagacaaattatgatgcctgctacataataaatgctcaataaatatttgtagaatgactgactgaatgaaaaaaatgttaaaggggactgagggaagaagctaaaatatatttagtttttgtgctgtgtaccttttaaggcactgttgtagggtcacctcatttaattcttaaaacataatagatgcttaataaatatttttagaatgactaactgaaggaaaaaaatgttaatggaaaccaaggaaaaaagctaaaatacatttacttgttactgcactgtgtaccttgttaggcattgttatatgatcatgtcatttaatccttaaaacattagaatgctgcactcatttattaatttattgagtggaatcttgctcagttgcccaggctggagtgcagtggtgtgatcatagctcagtgaagcctcgaacttttggcctcaagcgatcctcccaccttagcctccctagtagctgggactacaggcatgcaccactacacttggctagagtgatataattttaacataatttttccagtaagaaaactgacatccagagaagtttataatttcttggtgtttctgtaattgtgaaatgaactatctctctgttgcctttctagcactttgaaaataaaattctcaatacttcagaattaaacttatgtatacacacgtgtgtgtgtgtttccagtttacttttcctcttgtccaacctttctgatatgttagtgattctgaactttgtgcaatgctgaggtgaaggctgaggttggctacagagacgatggcagctgagctacaaggcagtctctgtaattttgttttcactggttattttcaatatatttattaggttgttaaactgaaccatcttgactggccccagccaagtttcttacagtggaaatggcacattaactatgcagctgtcatgagagaagtcagtactcttaggtgagtgcctgtaactgaaatacagatgggcaagtcaagagtgggtcgaaggttcaacatgctcttttccaaacctctctggtttggaaatctaactcgaaacctcctggagtcaaggcttmtgatgagattcctggagcttcttggtccaggcgtgggtttggaatacttgggaaagggccgaccacagggatctcagggctcctcatgctggctctgtttggaagtgttgagctgcatgaaaagtagggcacttgatggggtggtggagatttttcaaaacctcaacaggaatttcaattgttcatttggrcaagagtttgggtttggttcctacgtaagcccaagtagtttgttttatactgactttagatttttttgattcaaatctttgctgttattatcacgtaagaaaatcaatctattatggtattttagtttggtcataataaaaaagtcaatatgttgcaaattattaacaatacatttaaagaatgccattctaaatgagagtgtgttttctagtatcttaacgtattaaaaaattttcaatgttttttaaattaaatgaattaaatcatgaaagaaggactaaaatgctattctatctggatcaatgccattaactaaccttttaaaataaaaaagcagattagagaacacttaatattttttcaacaatattgttattcatgagacttgattatgctaatattatttgagaatgacatattatagtcatataaaatgtgaaaaatataggcctgaaagcaaattggatgggtatttataaagattaataaatattctaactggatatcattgtgaaattataaataatttgccttaatatcattgacagattctaacccaaaagaattcaaatatattggatttcctctcctgttcaattggaattcaaggacttaatccacttttaattacactgttcctgttgttgcatcaaaaggtatgtttatcaactggttttgagtttaagtagctgtttcttaaaattcattttaaatcttctgtttttttttttttatataggctttcatactttaagatacagtgcagctgaatacagttgaatatagttgagttgagctattcaactgatcagttccctgcaacttaatatgtatgctgagaaagagttgactcttgggggaatttctaattttttgatatttatcagtttaatatacttaaagttttggggtcttttgtgctcatttgaattcagatttctgtttgcataacactttaatgatgactcggattagagatagtttcattgatcaatagacagaaaaagagatttgccatcttttaaactgattctttaagcacttcatttaccattctgaattttttaacattaatttttgtgatatttttaccaaggcaattcatctctgctctattttctgatgaagatattgtgattttaacagtaatttaaaacaaacaaaaattgaagataatttttcacactttataactgtatattatagaactaagtgtttaaaaaagctgaaaatgactcatttaaaagacctagtttgttttaattggctagatattaatttcaaaaatttaaaataggcaataactgtattcttgaatgccttaaaaactctgcacatttatataatcaaatgctttttaaagaatattagccttgcttttctgagacagttttgaactgtacaatttcaaggactgaattgaaggggaaaccattaggacttgttgatggaggatgcattcactactgattattttctaattcctccatggatttgatcagtgtagcctcacatgtacatatttacttatgcacgtgcttgtgaatggtttaaagatgattcactgcatgctgagagtgttttctcctcatgatttgtccccgcttgcttactgcttccagctcctcagcctttaaagcaaaagcacattttaaagttatttcaaaattatttctttctcctttgctatgggcagtgtaaaccctaaataaaattctaagccccccaaccaactgaattgatccctcctctgggccaagggcattctaacgtaaacctgaaacactagttcaggctatgaggggaaggggtggttggacatgcctcattataccttcctcccttaggaattcaggcacaggtgaccagcactgacattaaaacagagaccttaagactgacaaaacagatgctttgtcgcaataagatactaacatgagatagcaggccctgaaagaaatcgaagtattttaccccaaaacagattgctttgacatatatttgacccattctatgtattttttctgatccaggagagaatcaactaaagagtctggcaccttttaaagtgtgattaagaaacatttacaatcgattctctctgaagcctgctacccagaggcttcatctgtgtaataagaatcttgaaggccgggcacggtggctcacgcctgtaatcccagcactttgggaggccgaggcgggtggatcacaaggtcaagagattgagaccattcyggctaacacagtgaaaccccgtctctactaaaaacacaaaaaaattagccgggcgtggtggcgggcgcctgtagtcccagctactcttgaggctgaggcaggagaatggtgtgaacccgggaggcggagcttgcagtcagccgagatcgcgccactgcactccagcctgggacacagagcgagactccgtctcaaaaaaaaaaaaaaaaaaaaaaaggaatcttggtctccacaaccccttctcttaacccaggcactcccttctattgattccaggtctttagatttttcaaccaattgcctatcagaaaatctttgaatccactaatgacctggcacgccgcccccactcccagccccaactctcctagttgtcttgcctttccggacagaaccaatgtacatctttcatgtactgttggatgtcttatgttaaaatgctcaaaaccaagctgtagcctgaccaccttgggcacatgttctcaggccctcctgggcctgtgtcacgggccgttggtcactcatatttggctcggactaactctcttcaaatattttacagagtcttaactctttttcgtcgacagcagctaacaattgaactgtttgggggattaaaacatgaatcacaaacattcctttcaggtggcatttcatttttttcttctgaaggaaatcaagaaccagaaattcagtttcttctaaattaattagatcattgtttgctgcttttcctcttcctgaccttctcttttcattgattctggaagggaagtgtgtgttccactcatctcaaaggaatgcttgcaatttggcggtagattatgcaaactccaattagcgatccacaaggtgttgaaaaaacaaggcctgatgtgtgggaaatactggcagctcacttccagcacttgaaaaacaccttccttgcttagatgtgaagccacatctatatcaacattaaatgctggtcaaaaatcacacttagaatagttgaaatagaatacaaaaccaaagcaaaccaaaaaagttaaaaagaagaagtcaaacactttaattctagttatgcttccggcatagaagtccctagatattgctagtcaagtcttaattagaatgtcctatgtagttttaggttttatgttaaattctaacacatttcatgccttcatttcaattaaaaatatttacactgggctttgggtatacaggtcttcataaagtctagtagggatttgaaagtgggcaatggaaatcagcaaaggcagatgattagggctgagaaacagaaataaattcaataaagtctcacttagaattgggattatttggtttggagaaaaatgggtaaattgttcatttgaagatgctttaagctgaaaattttacatgcatgcctcatcttattatctagaacatttctgtgaatgaaggagaaagatacattcccaatgtgtggaggaattcctacagagaaaaaacatggttgttgtgttgggtgcaatggctcacacctgtaattccagcattttgggaagctgaggtgggaggattgcttgaagtaaggaatttgagacctgggcaacatagcaagaccctatctctataaaaaatattaaattagctgggtgtggtcgcatacacctgtggttccatctacttgggaggctgagatgggaggatcacttgcggccaggagttctaggctgcagtgagctaccatctattgtgccactgtgctccagcctgggtgacacagtgaggcctcatttcaaaaaaaaaaaaaaaaaggttatggttatccaaaggaatactcagggagtcattgataaggatgtaaccagtattcatatttccctagcttcagctttgtgctctgtctctccatttcttctgcttttgttcttcggttgctaagtgatattcaactttttttctttttaaagagtatttatcatgagactttgtgtaacaggatatattgcatacctgaaggttttttaaaaatcctaaaaaggatttttagtaaaaactttaaatatctgttttcataactggtttgcacctgcatagcgaaagggctgaacatctattcttttgcagttgcccaggctatgcctatttcattaacttattcaaagatccaaagtgccacattcatgttctctaagggctttgaatctctcatatttgtgggtgctataataagaaaatgatggctttgtaaaggagcatcaataacgtttcatttctgttcagtatttggttcggagtcatcccacctctcctatctactctgagaccatgcatcttgccttctaaaaggaccaaaccaaacccaaacagcaaacatggaatccaaggtgcacatctgctctaagggttattgagtcatcctgggggagtcagtcacatttcccagcattaagtataatattatgggcaaggcctttgtgctgttgtgcaatggaaacaggaattgctgtattgcctcrcaggtagaagagtctttccttctgaactgctattaagtcagactggctaaaaataaggaaagagccacatatagacatgcctggataaaacttaaaacaaacaaacaaaaaaagcctttatggaaatcactggattgtgaactttgaggaagccattggcagtggtgtgtaaaattggtgaccttgttgtaaaccaccagttagaactctgaagatcacagggggaaatactattttcacattgttactaagaactgataaaaaataaagagcatatcttagtggttaaaatctgaaatattaactgttccataatagctgctattctagaaatctgatctttctgaaatttatgcctaatcagactttgaaaaatccagaataaactaaactatttagatgaaaacgttacatgatcaccatgtaatagaatctgagacactgaactctataatttaatattaattgatatacggttgtataccctgaatttcttgtttgctgttgggtttggtttggtttttttggaaagcaacatgtatggcttcagggtatatggaaggggtgagccgattttaagcagaatcctacaatgcttctgaaattgaagttaaagcagcaatattcctggcaccctgggattcaattagatgctttgtgatgccttctcactccctggctacagagtataccattaactacaatagaagtttatgaaatagccaaatcaagcccaaagtctctttttaaattagcaagacactcataatcattagtatgacttctcagatgaggaaaaaagatgacaatttcagtttttttatattattctagccctgtgatttagcctcaaaggtggttttgtgaagcaaacgtctaatttgataagctgatttgtaaataattgtataggagaaatggttaataacataattttatggcatcttcaaagcaaactgagaaaaccctacaagcaaactgagaaatacgagctgtagtattttgtttccaggtagctgctgtcaagtcctgctagtcccagagaggttcaagtagatgtctcttccttgacttttaggcatatatgaaattgtgctctggcaatgattagatataaatgcatttgcacacatagacaaatgccaccctcgtaaacctacaaattgttggactctgttacttgcatttgtttattcattcattcacaatgaatatttattgagcatctctatcaagtgccaggcatagagcagtaacaaatactgtttctgctcttggggggcttacagtgttttgagaggaaggcagaaatgaaacataattatgaatgtcatgaaggagaatgaagggtaggtgcctaacttcctaatcgggacatcaggaaaggccctccagaaagagtgacaattaagctaaagacaacgaaaaccatgctttatgggccacgggaattgacttgctttcagaaggaagggaaatggatggagctgattgtcttacctctgttgtaaagttcttggtgaaggttccgaagatgaaggtggagaaaacaaaaagagacagctgagagaggggtcagaaccaggcaaggggacgaatgagagtgaacctgagacactcaagctttaaggagaggaactgtctccatgaaggccccacatttgagaacactgggtaacagcctaagtggtctcctacggattccttcttttgagcagcttgttcctagcctggcattcaatgaacttgccaccaacagagaagcaggtgggtagcttttgcatttawgagattaaaaaactgaagtttttatttttgcctactgtttggtaatttttggctccttgtgcacagagagaaaataatcgtaagtaatttggcttgtttttcttctctcaaagcatttgtttggcctgtttgtgcttttcctttatagctgtaatgttaatacagctgcactctcagagaaattttaaatactaatagtcttccattgcacgctaaaacaaatcccagagtaaaaagctgttcaattaagaagttgtgaatattttcatagttttatcacatgttaataaaatccaaagccagatgatactccacacattgcattaaaaagaattatatttttcagtcaacattattaattatgtagtaaaaaaaaaactttaatgagaagctaccttggactggacaaatgggtgttggaggggaatttattatgttagccaggaagatatggaatattgaaaaataactatagcataagctagaaggtgctatgggtgacggggtagggctgattcttgaaggataagggaatttggaaatgagagggttggatatgaggttttgaatgtctagggaggacaattttgagtaaacgttcagaggcagaagtaacagtgaatatgagaaacacgaactgtgcggttttgttggtgtgcagggaaagtgaggcggagaagtggaaagtaggggcggggctgccttatggcctgccctggatgctaagttagctgggagccacgggaagatttcccagagaatagcataagcagagctgtgccttggaaagagtaacttgtattaagatgggttcatctttaagccatgctgaaagcagggaacacaggtaggggactactgcagtagtctaggtgcaaaatgaggaggtcctgacttaccaaggtggtggaagaaatggtcagaaggatacggatgggaaaaatattaatgagtatacatagttcctttgatttttgtgagatatttgtggtttacttttaacctcaagatatcccattgtggttttaaaatggtatgtatctaagggctttatcagccactgagccagagtctccatgggtctggttaatcagatgctgttcattaaagtaactccacatgctcttccaggtcactgcctacaattttgcaagccttgcgataatatttacccatatttacttgagactcagattcacatattgctattttagaaccttgttttttgtaggcagggtcgctaatactagtctaattttacagaaaagcctgatcaaagttatactagcaaatattcaattaaaggttctcatcactatttattgttgtctctcaatctgtctcagttttgaagattcaaacccatactaatatcttgagaatctagaatgacagcagaaaatctaaacatgggtcagtgttaacagtctctgctctccttgcttcctcttcctgtctactctgctccacaagaatctgagatgggctagaatcaactgctagattctagtgcatgcctagagcaatctcagccttcagttcaatctggggccttggaaactactccagattcactccagagagcaatttggtcttttaggtcaggtcacaggcgaactgggcattggagctggaaaggatgaggtggtgagaggaagggatctttcaggaccctagagctgctcttctcgtgcctgtaatgatcttcttccatcttgtttacttggtacctcagtgatcctgacatctgtcctgacattttgatgcttctttttccctatccacaagtaagataaaagggtacaaactttcagctgtaagatgaatatattctggagactgaatgtacagcatggtggctatagttaataataatgcattatgtcacctgtactcccaaaactattgaaataacaataaatttaaaaaatgtattctatacttggaattctctaagagcttagatcttaaatattcctaccaccacccaccaccacacaaacacaaaaaggtaactatgtgaggtgatggatatattaattagcttcattgtggtaattatttcataatgtatacatatattaaaacatcatgttgtctactttaaacatatacaatttttatttgtcaattatatctcaataaaggtggaaaaaatttttaaaaaaggataatagtactgtatttaccttatgaggatggcgtgaggattgcctgcaaagctttagaacatggtttagttcacaaccactccagtatacccttagaggtggttaggcctccatgcattggcgatcccacagagctttgctcggctctatcacagtaagcatcacatgctattttactgtttcaatttctgtcttatccctagatcgcacgctccataaggactggcacagtaatgctaatatcccatgtttgagttctggcaatgtaccaggaattgtactaacttaaaaatgagaggactgaggtctgagaggttagtttgccaaaaatcacatatgtagcaagagccasatcaagattcagcactgggtatagagttgcattctcaatctccacttgcactatcttagtctttgtaatccctctatcccctcacttcgaactgtcactgccctacccaacatggtactatgcccagcattgattcaatgcttatttagtacttgacgaatgggtttgatggcttctactctatgagtggttgagtttggacacatatgacctctgcagggtactaagtagctgaaggcagtgagaggtattgttgtcccaatttttacatctgaatttcatgtttggcaggcaatactgcccttatttcttatatgggggtgggagagaggaagaggaatcattaaaagttaattgcccaagaattcctgatccagacttgtcctttgacctcttcacccacaacaaatctccttgaactgtgccaaatttctttgattcttttctttgtgagtattcaaatctatatttaattttaaagaaagtgtttaattcatcaataagaattccaaactatgtatctagtcaactaaatgtaacggtgtgaatattttgttaagaattggacaagtgaagacaatatatcagccagatgagaggagaaagaattcaaacacatacacacagaaacacacacacatgcagaactttttatgatctctgacgcctgcaaacaatgccattgacactaatattgattcatttgaaaataaaactgtttgctgtgctactagataataacaatttattttaaagtaacataaaagagggtgccagccaacttcatagtatttgccttattcatttaccttcatgcattcagtaaataattattgagcatctattacacaacagtcactatgcatggcacaatgttccagaaaatagtatgacaattctcctactgatgccttcactgagagagcagccaatacaactccaaggacttcttttttaaaaagaagtggaatatatcaaatgaagcaaatgaagtgaaaagaactctaggcttagaatcaggaggagaggattagaatctcagcttggtcacatagtgatataaccttgaatttactcagcacagacagtggcagatactgtacaaagccttcttatttaggtttttactagctatgtgatctgggacaagtcatttatgtgacttgagcctcaatttcccatttgtaaagtggagtactaattctgtgtctacctcacagggttgttataagaattaaggagctaatctaaataaatgatttttgtacatcctaaattgctgtctcatgaaagttattataataactattgtttatattaccacaatttagattttcttgtaatttacaccttttctctgatttatggcatttttactcagctaataaaatgattttaggttcttacttacatacttctcatgcatactactgtttatacatttgaattttaatataatgtttccttaaagtgggcagaaaagaagaaagggcagaggagacaactggaagagaaagtacaaggagaggaaaaaataacaaatcaaatgggagccaaaagaatcactccctttccccataaggtcaggaacagggtgaaggtctgggattatgacctagatttagaaatcatccttattcaggaaaaatgctctgcaaaataatgattagctaaagaagaaggagggatatattagctattcatttttataaactagatttaaaataattatccattttcattctgatatatgtgtcttccaatttttcaagattaacattccacattagaatacatgggtttgaattttasttagttcttcatgcctggttcctcaattccaaactgggttgaaaattctcaaagggaagggctgtaattggtatgtcttcctatccctctccaagcttggcagagttcaggtggatcaggaatgattaatttatggcaaatacttcctataaagtgatgttcaatgttccaaccaccaccttcactattttcttaattaaggtgtaggatgattagccttttacttatggaagcaatccatttatttcaactgtgaggaggtaagagttaaaattttgaatgtgaagtagtcatgaaaactgagcagcatgattttggggagattaatcgagtagactttgggatagtattcaagcagctactacgttcttggagtttgcataattaaaacttataaatttatgcctagcatctaggcttttcccgctcaactgcagcaaagccaccacccctccttgccaaagttgtcattctgagcttaaatcaaatgcgggctctgtttcaagcgactgtgccttcctggcagggttccaccacagctcagatctccacagcatccagtttgtctggctgtggtgcacagagaaggaaagtttacatcggcatagcaagtaggaagattgccttttgattctccatccagggatttgattaattttgtataattgcattgaggaattattaagcaattggggtcagagatgaagtctgcattcattcttccatcttttctctgcctcagaaacaagtcactcaacccatttatgcctagtgttccattattggaagactaaccttgtgggagttatttatatcctattgctcaaggtcatcaccaaggtctgattttttacaaaaataaattgcaatctctggcataaatgggttaactcctaaactgtaaagttgctgttagttagaccacccctggcccaaagcacaggtcaacttgacctgtcaacacacttcatgccaaacaactgttcagactgactcattcataattcatgcatctraaaagacataatcatggattatgtgtatttaagttgctgactctctaatcctatttctgctatttccatagcagaacctaaaaggcttactttctattaaactattcgttatataaatcacttttttccccccaaatcagtgtcctcaatggttgagtagttatttaaagtaaatgactttggttctagtagtcatttagttctagtaaatggacatggtatactatttttccccctgaattctgtaaaataccacccattaaaatctctcttcctcatcccctctcttacattttccccaaatccacatgtttgacagcacagaaggataccagttaacatgtgtgttgataaaagatgaggtttataagcctcctgaatctaccattgcttaaaacattggaatatcataaactagggctgctaatgaatagtacatccaaaactcagataattcttactagtcttattaccttaaaagtaattaaccaggtattcttttttcttaattccctttggttattgtttctgctttgctactgaattcccaggaaatagacactggaggtgggatggggacatagtttttgtccagtgagcatgctgggaattctgaatattttcagcctcctttggacatttgtgggtgagcagatgttacatgttttcagggtgtcctttatttccaattgaagattatccaaactctgaaatctcatgaggatatctaatggtttttcttgaacataactggaagaccttgacccctgccaatttcattaggagataaactattactgtatgttgatctctttacaaaacccctgatttttgagttcccccctatctggtgctttggaaagatctgccacttgtcaagagtgatcagtcttgattcctaaaaagcagtggttggaattctaatggcaatgtgttatagattgtctttttgcattattaaattgtgagcagaggcrggcgcagtgcctcatgcctgtaatcccagcacttttaaaggtcgaggcagaaggattacctgaggtcaggagttcgagaccagcctggaaaacatggtgaaaccccgtctctactaaaaataaaaaaattagtcaggcgaggtggtgcacgcctgtgaccccagctacttgggaggctgaggcaggagaattgcttgaacctgggaggtggaggtcgccgtgagctgagatggcaccactgcactccagcctgggtgacagaacaagactccgtctcaaacaaaaaactgtgagcagatatcatcccaacaaaatggtgatctagaatctagattcaagtaaaagctttgtgatgacatgggtttttgacttaagtggccattcataccatgaataattgacaactcaaaaatcagaacacaaacttctccttttaactaaggatttagttgacaaccaaatactggcaaattcaacattgtgtgtacaaaattacttttgcatgtaatttgacacaaccaaattttaaactctgcatctccaccctaaaccattcagaacattttggtaattgtatgattagaggtattaggctttcattgtatactttgatgtataatgggtgagagtttgattaaaaaatagaaggatactttcaagatttaccatgggaattgcaaatataattaagccaaaagtctgttctatgacttttctttccactatttatcactcagagtaatgaaccatggatgagggaatgtgaattgagttagtgcttcctgatcttcaaggataagataaaaaggcaacttaatatttctgggtaatcagtagaaatgagaatagtgtgggataataaccattagcatgtacatcacttagcttattatgtaccagcagtgtgctagttctttgtgtggattaactgatttaaccttcacaatcgcaccacaatgcagtttctttggttatttccatcttacaaatgagaaaaccgaggtccaaagactttagtaaagatacagggccattgggctccagagctcatcttttaaccatgataatgaattaaagagaagtatgcctaatgatagggccaaaggggaggggcttagggaaatagaaggctattaatttttcataagattaacaaaaaagaatacaaaccagaaccmcaaacataaaaaagatggagtcggccaagcgcggtggctcacgcctgtaatcccagcactttgggaggccgaggcaggtggatcacctgaagtytggagtttgagaccagcctggccaacatggcaaaaccccgtctctactaaaaatacaaaaattagctgggtgtggtggcaggtgcctgtaatcccagctatttgggaggctgtggcaggagaatcgattgaacccaggaggcggaggttgcagtgagccaagatcacgccattgcactccagcctgggcaacaagggcaaaactcttgtcaaaaaaaaaaaaaaaaaaaaaaaaaaaaaaaaaaaaggattctatctgcaaaggagctcagaattgaaggcttactgaaaagtgtgcctctaactaacttttcagctttgtagggcaattgccaaaaagcaagaactgcagaaagaacttgacagtttttaagatggcccacgaagcctttaaaacacattaatataattagaagtcatatcaccgttataaataaacagttcacctgtgtatgcacatatcttggctggcccttaattaaagcttggtttccaatgaagggacaaagttattcaacatggttagtgtggggaagactgaagacgtatagcaactgtcgaccttgaccttggtgagctgtcaggaataggagcagctcacctctaagaagttaagacacacaatacagaacatgtctttctagtgccatccagattcctcctcctccttctacgtttcccctcattctctgtgccacctctggcattatctagctcccgtcttctttttcctttctgaactccattgttcttttaaaaagccggtgttactttggaaattatactttctggaatcttttagtcttcccctcttctccttccttatcttgcaggatcattgtccagtgtcttactaatacaaagaaagaascttgttctttgtacaaaggagcaagaaccttgtttcgtttctgctgttaatctggttcctttagaccccgcccccttgcccatgccacatgggcagccctcctctgtaagtttctttggaagtggtctcagaaacaatgtctggactgcagatctaggtacacttagcacccagctgctcctcacttttgtactgaataggaatggatccacttgttttcatatttactgtgctgctttcagtgtaatatttatcttttaatctaaacatgcacattctttccagtctttctggatctttgggaaatactaaaaggattttcactgagaagaatgttgggcaaagtgtgtgaaatgggttcaaataaaatgaaaaatgtattcagatatttactctgaacttttaacacaacttgaatttttgagtgtctccatctacatgtgttcctacactgagggactaccaatgaagtaaaagactcagtgctggtactcaaggtagagagcaaaaagttttattaaaaagtagaagtaaagaatactttcaaggtttactactggaaaggcaaatccacatgttttacagcacagaagttagagtacatcatctccctgcccttctcactccccacacrtaaaacatgttctgctaattccatcatgggcatatctaccattataacctttaaaatggaaagagaaaaattaagaagcagtgctcccttttagatagcagaaatgattttagattggcctttggtctgtgccagacatttggctctaattctatacacatatgtagagatgagccacctggacagttttacagaccctcacaatgaaagacagttccacagtgatatggtttggctctcaccttgaattgtaatagtccctatgtgttttgggagggacctggtgggaggtaattgaatcatgggggcaggtatttcctgtgttcttctcgtgatagtgaataagtatcatgggatctgatggttttataaagggtagttcccctgcacacactctctttgcctgccatcatgtaagatgtccctttgcttttccttcatcttccaccacgattgtgaggcctccctagccatgtgaaaatgtgagtccatcctcttcaaggagaactacaaaccactgctcaaggaaataaaagaagatacaaacaaatggaagaacattccatgctcatgggtaggaagaatcaatatcgtgaaaatggccatactgcccaaggtaatttatagattcaatgccatccccatcgagctaccaatgactttcttcacagaattggaaaaaactactttaaagttcatatggaaccaaaaaagggctcgcattgccaagtcaatcctaagccaaaagaacaaagctggaggcatcatgctacctgacttcaaactatactacaagtctacagtaaccaaaacagcatgatactggtaccaaaacagagatatagaccaatgaaacagaacagagtcctcagcaataatgccacatatctacaactatctgatctttgacaaacctgacaaaaacaagaaatggggaaacgattccctatttaataaatggtgctgggaaaactggctagccatatgtagaaagctgaaactggatcccttccttacaccttatacaaaaattaattcaagatggattaaagacttaaatgttagacctaaaaccataaaaaccctagaagaaacctaggcaataccattcaggacataagcatgggcaagaacttcatgtctaaaacaccaaaagcaatggcaacaaaagccaaaattgacaaatgggatctaattaaactaaagagcttctgcacagcaaaagaaactaccatcagagtgaacaggcaacctacagaatgggagaaaatttctgcaatctactcatctgacaaaaggctaatatccagaatctacaatgaactccaacaaatttacaagaaaaaaacaacgccatcaaaaagtgggcaaaggatatgaacagacacttctcaaaagaagacatttacgcagccaaaaaacacatgaaaaaatgctcatcatcactggccatcagagaaatgcaaatcaaaaccacaatgagataccatctcacaccagttagaatggcaatcattaaaaagtcaggaaacaacaggtgctggagaggatgtggagaaataggaacacttttacaatgttggtgggactgtaaactagcttaaccattgtggaagtcagtgtggtgattcctcagggatctagaactagaattaccatttgacccagacatcccattattgggtatatacccaaaggattataaatcatgctgctctaaagacacatgcacacatatgtttattgtggcactattcacaatagcaaagacttggaaccaacccaaatgtccagcaatgatagacaggattaagaaaatgtggcacatatacaccatggaatactatgcagccataaaaaatgatgagttcatgtcctttttagggacatggatgaagctggaaaccatcattctcagcaaactattgcaaggacaaaaaaccaaacaccgcatgttctaactcatgggtgggaattgaacaataagaacacatggacacaggaaggggaacatcacacaccgggcctgttgtggggtggggggaggggggagggatagcattaagagatatacctaatgctaaatgatgagttaatgggtgcagcacaccaacgtggcacatgtatacatatgtaacaaacctgcacattgtgcacatgtaccctaaaacttgaagtataacttttttaaaaaaatgtgagtccattaaacctctttcctttataaattacccagtctcaagtatgtctttattagcatagagaccattcagtggagccaatgggataggacccagcttgtgccttgggacaggtctgacataagggatcaagaatatgtccgcaactggggggaatgaggatggaagagtgtagtcatatgagggaagtgccaggttagaaaccaggtagaagactcaggatccacctatgagttagttagagcaccttaccaatgtgtatataattgaagtgaaatgcctggcacagaccaaaggcaaatacaaaaacacttctgctatctaaaaggaagcattgcttcttaatttttctctttccattttaaagactataatggcaggtatgcccatgatgggattagcagcatgtgttcggcatgctgtgggtggggggggggctgtaccctaactttatacacccacaagaactgagctctgggtggagacttgcacttttcccacatggctgcactcttccatggggagccaatgggatgggccccagttggaactcctcagttctttatggaactgtctttcactacaagagcctgcaaaactctccccagctggttcacctcttcccatttacttcaactcttcaggaggacattctccagtaccagactgacagtcctcatcaaaaactgctccacatacccgaagccaggaaaaatatctttcttcccagcaaatcttcctggagataatgaatgtagtaatcatttttgcttcccctttgccctgtctgctaggaagttctgatcccagttttgctcaactgctttgcgtaactcttctctttcctcctactttttatatatggctttatctctcatcctgacagaatggttttatgtgcttgtgtacttacattttattgtaagcgtcatataagcttacaagtctttttggaaataggtagatattgtgcaaagaagtttttatcctcagccttttttttttttactttaaatgtacatgtaatgtaatatctatttaaatctttatttaaactcctacttcatccctctgaacagcccatacatgtgcctctgcttattatataatggtcaagttccatggtcctggttctgaagttaggaaaatgtctcgaaggggagtgtattcctcattatcatttatatctaaccagcccgtaagtatattgttgtggtgggcaatggaggtggtggtagcgaacgaaaggtggaaataatgaagaatgaaggagttactaaatactttggatatggtaagaaatcttttagcatattatcaaagacattacatggccgtagatgagttgcccagactggaaaagttaaacttcaggaagcaaactccctttgagatgaaccaggcttggttttcctttgttttattaacactcggccccatccagggtttacaatgcatccagcaagctgaattggttacgggaccaatttagaagctctgtgtaatgtctttgaacaccttaatgttgacataaaatccataattcacaatttcaggatatgcttcttgcrgggaagagaggagagcctcctcgcaggggctaaacaatgcgagagttcaaaagggttgaagatgcactgtgggtatttggactggcactcaagaactcgcggatgctcgcgattgcttatctgacttatctaaactgctgacgtcaaaagaattaggctrgaaatcttatgattacagcttttcttgtgatcttttctggtatttcctgtttcctgtgaggccaaatatacttcgagagagggttattttatggcatttcactgtttctgcctcagctagatctaaaggtacagagagcatggagtaaaaataattaagaataacatcagaaatctctgcccgcccccactcccctcactcactgtcatttctttataagaaacaaaaaaaatttctgcaatggttcagagtaggatcttatttttaatggaacaaggtctattgctgatttaaaagaagaagccacttcaattgtatttctaactattgacttatttgggtagtcataaacagacaggctctgaacggcattagcaggcagcctgggaagcgtctgagaggaggaggaagaggaggaggaggaggagaaagtttcagaggataaaggaggaaaaatggtcatcaaagattacactgttccttcggggctacaaacaccttatagaagcaggaaagaaaaacaaatggtgggagttaggcctgtccagtttataaaatcttgcctaaatgtagctaaatcttcaacttgctttctgagtacaggccctgaatcatggtcaccactacttttgcaaagagagcctgaggaactgaaaggctgatcctcagtagcttatgggcacatgtaccacagacccaagccacaatagccacttacactggccctgcttgaaattctacctccaggcaacaatgcagaaggcagcagaactcctgaaaaggaccacagtaacattttatttataatggttaagcaactaccagctaccacctctatctatctctcttacatataactttgttaattcacaatcctggtgaaattctcacctttggcatttttttttttttaattttctggtgaacgtctatctctttagtacattgcaggcaatgtagatgggaaaattcacagagagggcttgggactctcctagacaatttctaatctaagtttggaaacaagaaaaatgtgtgtatacatatcacatgtaggtttacatgtaaacatctaactcttgctcatggaaagatggacactacacacttatatagtgccatcacgcatcacggagacgttaagtatttgggagtgaaaaggacagaaaattggatttagagagattatcatgttagagaagcctcggctggagttgagcggcttcagggttagaccatgaccagcagcgtggctgagtcaatggcatggctggatgtcaagggacctcgagttggcccttgtgcagtcaataactagctctgtgccccacatatgttgtgtaacttctgtggagtctcagctttctcaccataaaaaaaaaatgcagtgatttaactagatcctctcaaagacccattttcattaaaaaattcaagtgaaagtaccctttactgttccatttaaagattttcaatggttctacaagagttaagatttcttgtccatatgcagtctcgtcccactaatgtctttttctgtttcccactcttcttcactcctaatgctgtgccaagccaatttgactaatctccattctcaatcatttcctgtgcttctttgccttgtacctatgttcacgtttattccctcaccaaatttctcacatcttgttgagatcttaaccatcctaaagtcatagctgtaatgatcagtccatcacagaaccttcctgggtcaaccaacaaagagtcagttaatgcccaatcctcatggagtactgatcacacttggtttgtttttgaggmtgtaactttaacacactacattataagatacataaaaaaccatatttttcttatatgttttctcatccatccagtggcatctagtgtgggaagaactgtttgcttagaaaaacatggagggccagtgtggtggctcacaactgtaatcccagcactttgggaggcagaggcaggaggatcccctgaggccaggaactcaagaccagcctgggcaacgtagcaagaccatgtctctacaaaaataaaaaaattagctgggtgtggtggtgtgcatccatagtcccagctacttgggaggcagaggaggaaggattgcttgagcctaggagttcaaggctgcagtgagctgtgattgagccactgcactccagcctgggtgacagagcaagacctcatttcaaaaacaaacaaacaaacaaaacaggcaatctaagtactggaagaaatgtgagttggcgatgtaagaaggatagactgttctgagactatggcgacaacctgtgttctgcatttggggaagagatgaacatgactggaacagcatgtctagatggaaggctatataaatccttcatgataggatgataccatgtgtcaagggctttggcttgattatttctatattatttcttgtggctctgtgtaaaatactatagcacttgggaaatttggtttgtaagttgaagagaaaatattcagcatctcaaaattttcaacatcttacaaatatggtcaatgaatgccactatggttatacatattcgttagtatgctcaccctaactccacctcttcaccagccactgttgctagaatgatctttctaaaatgtaaaatttatcatatcacttcccactaaaattgtctgaagttttcttatccctataggataaactcctcagaaagacagatgaggccaatggcaacctgacccccagcctatctttctagtcttatcctagccctcccctgattcattttataccccataacttggccttccctggaatttgttgcatttggtcctgtgttgagtgtaatggcacaatctcggctcactgcaacctctacctcctgggttcgaggattctcctgcctcagcctcccgagtagctgggttacaggcacccaccaccacgcctctaatttttgtatttttagtagagacagagtttcaccatgttggccaggctggtcttgaactcctgacctcaggtgatccacctgcctcggcctcccaaagtgctgatgttatagccgtgagccaccrcgcccagcccatcatctcctttcttgacacctcctttaccaccatcatacaggcagaattaatcactgtcttatgtgttggcaattggcacagactttgtgtatgcacatttagtatattatatatcacatctatctatctgtctgtctgtctgtctatctatctatccatccacccatccatccatctacctcaacattcttggttcatgaatatttattttctaaggaatgaagaaactatgtggcacatgataggcaccaaacaaacttagttgaataaacacttttgattcttcctctacgttcccatagagtattatttccactttattgtaaagcatatgccattctgccttgatatcagtgagttgtttctgtatctgtctcttctaataggtcataatatcctttattctgtcccagacagaaagcacaatgctatgcactgagtaaagaaaactagaaatttgaatttttcatttccctttctgaatatcttaaataaataaccagtaaatagaagtctcaatttcttctatttctaagttggaaataacacctatttggttgatgcttactgtttagcataagaagttcagtatttgtatgtaacattgaaacatcattttccattttgtgacctcctagtatgtttctaacaatttttggaggatttgagacattttcaaaaatttttcaaaacaaaatttgttttagtccaattttgtctatttacattccctccccactttctttctaggggatgagggccaaagaaaggaggagaagagctctcagaatttccaattagcacatttaagcagtgaaaatgtatcagacctgaccagaatacaatacattgtatgattaggaccacaattccaattagtggcagatacaaaagctcagctctcaatgtgaaaaccaaccagaaaggtgagatttgtacacatcttttttcatgtattacagtcatttggtcaaacttttcagtgtcaacattttgagatggttgtggaaatgtatgtgtttaagagagagacagagaaagagtggtagtagagagggtagaagaatcaggtctagctgatgcttctagttacatgggaatgtaactcagacaaatcatgttgaatacgcaatgctcaaggatagggcctagcacatagtaacttaaccagtgtgtgatagagataatgttttttgatgtatgtccgtgggccattttcttttgttttgcactctcttgtgcatatcctctgcttccacccctctagaggcatacgtggaagatcatttggaatattatagcaagaatgagaagaaaagaagggagctgatattcattgtttggccttcagagtaacaggttttcgggttttgttttgtgtgtgagtttgcagaaggacaataatcttaacagcttgtctttgtggaaagatgaaaggattttctttattcttttattagatccctttaatatattaagaggtgggtctatagatatgggcacattgaggcttccttctgctgggaggaaagaggatatggcacagggtaaggtcatgtcaaagagacagttgcaaagtctactcctgataccctggggaattgcagggaagcgtcacaggcagagcccagtggcacatgaacatacatttgcttctccctctgaggttggcacctctcaggcgtgtgcaggagaaacattggataggtatgtgggaacccaaggcacatattcacccagatgccaacttggagaggagcaaagagtggcaaggtatttattcaaaagaagtaatcgagaagagactgaccaccatggtgctaattaacaagtttaaatttccctattccccatcagggtgggctcaagaggataattttcttggttgaagaagagactcaggctacgtttcatcacatatttgagtgcgcaaacttgaaatctctgttacaaatgttttaaacagtgactgtttccttctcacttctgtatgtatttttttattacacttcttatatttgaatgtttctttgtagtgaccttacctgacttccttttcctgggtgctctaggcctgcctgtctgcctgtcccttcttcttttctttttaaattattttcttcagcaaactatcgacttctttgaatgaacgactgtcacagatcctctaaatgtaatgtcctgcaggttttctgaagtgcttgtcacttacgtttatagatttgtgtgaaatgtttgggtgtcatccaaaaagatttggagaaggaagcaagaaagacaatctttctttagctttggctttaattccagaggttaagaagcattaaaattctaattattgcatgatatgtgtcttattacccttagttatttaattttccttttcgatacctttacrgaagatttacgttcattcccatcatagctctagctgtgattttattttacaattttctggctcctgtacctttcaatttctactaccacattcatgcaactgcgactcggtctctcttgaaatttgtccttcttttctctctagtgattctatttttctgtagtaagcttggccccttggacccaaggctttccacaactaaaccctgctttgtctttgtcagccatgccttccaactgcatacaaggctgacaagttttctcctgtcactcatgatgagaattgtgacctactcactggagtacccctcagcatttgtgttacagcagatgaagtaacaaaatgctcaggacagcgacttggtttataagctctaaaatatatgtcctgtggattttttaggtaagaagaagtgcttagaagaaggggcctctaataattttataatttcaggaaatttaagacaagttcaaagatacaaaactcatttcttggggtggtcttttggcattttagagattgaagtcaattccaaagagaaatgtatggaaaggcagacagggataaacaggaaaataaagtataaagttcacactgtgtgtatatcaagactacagcattgcattaaatcacaaattccgtgagctctgcttactatttctgatatgatgagatgtacctagtatgtattatcaagagtactgaaaattaaagagtggaaaaaatcagatagaagacagtacacagtttcagttactttcgtgagttaaaaaaaaaaaaacttgaaactttcgggcttttcacaataaagctactaatttttttttttggaattggtctgatgcaaaagtcaatgcttttctgtccagttgaaccagccttgtttaatttttttttttaaagggaaagaagaaaaaagaaactgtttgcagagaacgagcagagatcttgggaataccatcctccattgagagccagcccctcaaaagctcattcgtagggctgggtaaacacacaccttttgcactctatttttgaaattatgttcaggagtctacagactgttatytgtagaagaagccacttttgaaattttagtttatgtaaagtgttccaaaatgcatgaacagagtaattattttaaaastctataaatgcatgcatttgctctaaaattttgtaattatcagtagattacaagttctctataggaagagagagctgtctcatattagttttgcacttataccttttttaatagttctgaacttcactcttgtgtattcttttattttaaaagctataatgactaatcctgatcttctgctggaatatgkttaaataggattccattaaaaacaagagctagaattcatgtttcttgagtaatctgtccctaaaaagatgttcattcatgcatctgatggcaatttgtaagctattttattccttctgataattttattttttcacatatcaaaatgtattgagtggctgacatgcaacagatcttagggaaaacatgaaaaaaacagaatgttctccagactctcaaagagctggaatctagaaggagaggaagaaatgtacactaattgtaacaaaattaagtgatttgcctgttaaataaatacaaagaaagttctgtggaacttcagaagagaaaggcatattttccttcagtaatctcaggagggattcatgaaggggctagcatacgagcgggatattaagtaaggaatgggataaattagggacatggagcaaagtcattttaagcattgagaacaatgagcagaaaacaagtaggatgctgtgggaggtttgtcttgtctgggtggaatatgagtactcagagggcaataatgacaaataagactggaaaaatgagttcgtgccagatggagaactttgaatgcaggaggaaagaatctggattttctctgtagacactagagaattattaaaggattttgaagaagggttgagacatatcttgatttttcttttaacactgttgatctaaatcacagaatagaatgacaatggatagagagagttgaaggctattgcaagattatagacaaaacaacatgagatttgaccaagggccatgcaactgaacagagaaaagataatgaatgagagaagttgttgagaaaaataacaccaacaccagtaattatgagagtatacatttactgagagtgtggtggaacttaggttctattctaggcactttttttttttttttttttttttgctattatgtcatttaatcccgacaacaaccttaagcaaaggtgctattattaattctctttttacataagaagaaactgaggcaccgagaggtgaagtacccacccagggtcacacagttcagtaatggagatgcagaatttaaaacttttaagatctcaacattgcaaccacactctggcacccttagcctctcttatggacttagaactagtgggaattggggagctggagttagcagttttgaacctttcatgagtcattcatgaaaataagtcaggtgaaggagaaggtttagttcaaagtgagatgatgtactccagtattgactcaatttgcattcacatttaagagatgctttaaattattaatgattattatccagcatcactacagagtgaaaacaggctgctaaaagcagtagttttagaaaaatgttatgaattaatacttatctgccattgagactaattgattccttgctcaaagcaatttgtcctgctttgaatgaaatcattagaaccaatgagtatttgaaagtgtgtataaatttttacaagtgtttttgaattttaccagttttacagccagtagtttgagttgacaggtttaaactaacaagtgcttgttttcacactgtagttgtagacagagctctgattcataaatccacaattgttctttcattaagcttttgattcatctctgagtccctggtgcctagcacagtgcctggtatacactaagcatcccataaatgcttcttgattataatgatcgaaatgttcattcttcaacatatttgatttatattgtgcttgatacttgagacattttgaaatagtagtttaaatgttaatttgaattgtagagtactggaatcagagaatggttctggagattttcttctctgaaataatttgatattcaggtctgagcataaagaaaatttctgattttgtattctccttgaaaggcaggagacgttacaatggctatggggaagatgagtttctttctttgagcgatttgtgtgtatttatattttcctagaaccaaagcttattgaaatgggaacgagcttaataaataagtaaactataatgcaaaatttagaccagagacaccgaaatgaaaggtaagtttcccagttgcagagtttgcggttatttggttgaattccaaaatctaattatttattcaactaagaacaagtcctgctaagggatatctagtcttaaacaggttgctgactagaattataattagcatcatatttgtcctcacagcatctgagaagctacttaattattttctatcctcatccttctccccactccccacatgggtgcatgctgtcactgcaatggtgtaagctgactttctattgataacagttggggatctttccttggatatttgcagtatttgaagcttggatataagactaaagcccacagaataagtagaaaatgtatacgagacacaatcctttgacttgttctgcatggtaatactatttttctggtttgaccaaggtttatatcacatcatgagttctcattttgccccatctacatgtaatcaataaagccatgtcttggtttaaatttaaatttctattacccagcatgtaccctgaccacatgagttctgtggaccagagttgggcaatcgaaatgctggtctggttctgatacagtttcagtgtgtgatcccggatgccttattgagtctctctgaactatttacctcatctccaaaatacaggggttaactagataattagataattcctttgtttgcttcataaagggaaaaagatgtgagtattaacacaattaaataattgggtacagttcaaagaacagagttgacacttggacctcaagcatgctgataacttccagagccccttgctagggtgaacagtgccttggccaatgcccagctttgggggcactcccagatgcacagatctaacatgtgaaggtgacaagctcctcttccttccttctatcatctcccattccctcctacagtctattgctttggacagccacccaacagtcggcagagcatgccagtctgaagatggtggaagacgtttctatgtatcaccttctctctggcactcccccactttctccaggggactgttctttccattccatactcctaattcagcgtatttcaccttaaaatctctcacgaacacatatttatgttcccatattttttttattctctccttttattaccttagccaaatctcagaacatttttctacttcacttgtgagaaacaaagttccagtcttgttgaagaagggtgcgtaaaaataatgatgccctttgctaaggaaaagaaacactgggacttttaaggttccattaaacacattaagagccaatgacaccatctttaaagtcctctaaagtaactgttggttcgattcagaatttctgcaatttcatggtttaaaaaaagttaaatcaattcattaccacaagcagtcaaaatatacacagaatgttataacatttaattttcctgtttttagttactagcacagcaaaaatatgtgtgctataaatgtaaaatgttaagtaactacaggtaaagatagcaaagaggagggaatagattaccactgggggagacgggaggccgctggagatcaggaaaggcattttaaagagagagatgcttgacctgggctttgttgtttgaatagaaaattttcagttgactgagccaaggaagaaacatttcaagcataaagcaaggctcacctgatgcatagtcagttgcttaaaaggattatgaaagtataaattgaggagactgaggcaaggatgaaatgacagagagagagagcgagggagcaccgtgtcttgctgttttttgaagagctgtctatcataaacctctgcctctgtgcaggaactgaaaacagcttaaatcaccactttctaaaaacaaacaaaaaaatgccagaagttttgaaatagtctgtaagtgttcctgagggccccattgttgtgctgctgtggtgaaaatgatgcagctgaagacacctgatgctcagaggaaatgcagcatcaggaataggatgagtaaggaagaaggtaagagacagtttggaaagtgaagccactcatctttggggttgcatcctatgacctgctgctgcatagatggatgatgatgaaaaggttttatgcccattccagtaaggatgagccctcatctccctgagagtgaggaggcacaggaggaagaacaggaggcaaacacacatcctttggaaaggtgttataaagcctgtctccacacaggcaggcaacctcaacagcagaccagggtgcagcttccctgggaatccaagtggcttcagagacagtttccactgaatgtgaggcagtggtagagaggtatagtaagactcaacaagctctgcttcatcatgtccagaaaagtgtgccttttaagtaataagaagctacaggagttctgctttttctccagagtattgctttttcaggaattagatgttcactaatatagaacataaataataatgtacacctatctccacagacatgctaacaactattgaattagatagttttatcaaagggtgcagtttgtaatatgaattttaatcatttaattgactgaaacaaacctaaagtgctaagagttgaagtgtcagagtaaaattttctgcccaggtgggtttttccatttttcttaccctactcacatgcaacactggtttagcgttacctcatttcatctgaccaagacccatctccctgggcatccttctcccaattgccacataaacctcagttttattcgtttccctcactttcctatgtactcaaggactcattgtttactggagaccaaccctgtttttttctcccttttaaatcttttcttttcccagagtattaacttcttaataatattctttacagattattaagtcataacttaaaaaaagttcctggcataaatcattaaaatcaaaactagccagatttttatttcctactctgtttccacgagaaagggagaggtaatttttgatgtatcttttccatctaccccatccctcaccgccaatggcacgccaggattccactgcataggcctagccaagacttcagatgcataaacacacactcatgttctttcttctgaagtgaacccaccactttccaaatatctagcaacatattcctcaaagaaagagagtgccctgtagtcagctgtggctttcttagtttacgaagccccttgggatccttcccaggcatgctgggtgtcttggtggtggttgtatccactgtcagaaacacagtgaagttctccacaaccgtcccaaacacagcacattcttatgacaagacaaagtccctgggaatcattatttccacatttgtgagtgagttgatatcaataaaggtgtttatattgctgacatttgccaaaggggaaaccaagtcaagaaagtttaccaacttgcccaggacataaaaagcttgcatgccaaactcagtgctgggaacataatacatgctgtaaatggcatagttaaaaattggaaaatgtattttactttatagaaagaatgataaaaagccacccaaggagaatattctcctagggatatctctaacttgttgacaagaaatgttagagtcaggatggccattaaagagcatccaattccaccccctccttggtggggactgaaactcaggaaatttggcttgtgcaagcccaaagggcaagcatttgtcaagctgagtccaggacccaggtttcttgatttccagtcaaatgctcctcctactaaatcactcttaatttcaagatgcatttctatcatacagcagacatttggaagtcacagccctcagacctgatgctacacagttcattttcctccctatggcttggactctacaaagaaagggagttagttatcagacttggtcctgtgacctattacaccccatggtcaatttacctggaaagctgcggagagcatcttcattgtccagaatgcctctctgtttggtcgcctgcag

SEQ ID NO: 97298 - DNA, 12309 bp, Homo sapiens
aggcattagcctctatgctccgccagaaatcttatcttgtgtggttgaagctcattgagattggatggatcggcatttccattgtgcaaaccacactcagtcttccagagtggaagaataaataaatggaatcatgaaaagttaattggcaaagcttacagaaagctttaaccttccctggcctaaggctcttccatttgcttaacttacattctaccctgcttggaaaacatcagctttctccttttgaaataagaatggaaagatccatgcacctggatgaaggagactacgaaccagctctcctgaaaagttgtaaactaaaaataaaatccaaagccctcgaccaactgagtggacccactctctgccaaggagaccccagagaaacctcaaaaactgagctctcagtcaaaataggaagagaggtcaaacgcacttaattctactccctcccttttggagttgaggcgtaacaattgaccagcattaatgttacaatagaaataagaccgcgaaaacgtctctgtggcaataagacaccaagttataaacaagaccttaagggtatgcaaggggagggttaagtcatgtctgcacacccatcaattttgctacatagcatcatgcttaacttacaacatcccttttttttttttgagacagagtcttgctctgtcacctaggctggagtgtaatggtgcaatctcggctcactgcaacctccgcctcccaggttcaagcgattctcctgcctcagcctcccaagtggttggcactacaggcatgtactaccatgccctgctaattttttttgtatttttacaaaaaaagaggtttcaccctttttttgaaggggtttcaccatgttggtcattctggtcttgaactcctgacctcaaatgatcccacctgcctcagcctcccaaagtgctgggattacaggcatgagccatcacacacagccacaacagccctttctgttgattccaagttttagacagagccttactcctttaatcaattgcaaattaaagaatctccgaatcaccgggcaaagtggctcacgcctataatcatagcactttgggaggctgaggtgggtgaaattcctgagctcaggagttcaagaccagcctgggcaacaaagtgaaaccctgtctctactaaaatacaaaaaaattagccaggagtggtggtgtgtgcctgtaatcccagctacttgggaggctgagacagaagaatcgcttgaacccaggagcgggaggttgcagtgggccgagattgtgctattgcactctagcctgggcaacagagcaagactgtctcaaaaaaaaaatctctgaatatgctgaataaataacctgtaagcccttgctttaagatatcccaccttttcatatggaatcaatgtatacctttcatgtactgatttatgtctttgccagtaactcctgcctccctgaaatatataaaaacacacagtaatccaactgcctcaggtgcacattctcaggactccttgagaaagtgtttccccgagccacagtcactcatcttggctcaggataaagctctttaaaatattttacagagtttggtttttccattaacaaggtgatactcttcactattgtcaaggccttataagtttctcactgaaaattctaaattaattaaggattcttttaacagcaagctcttaggagacaaaaacatcaaagatcatggtctccaacctggaagattttgtttaatagaaaataccatcaaataaaggactcctagccacgttagaagggccaatatcaggctaccctgcctaagtggacatcttcctcagtggagatcttcaacactttgttctttagaccaggacaagaagtggattaaaatattcatttggttaccttcaggaataggaacacttttcatatttgtatttcaagttgttttgttgataattgtccttatttgtgtcatccttttgattcttaaattgattatgctttgtatttctagatgtctaaagtctaccacaaaattctataacaaaaaactcatcataatagctagatgcttagaaatgacccaacatacctcaactccagtgtaagtgaatgacctgaaatcccgctgctctgtccccttatttttcaatccaatccctgaattgttgcctaccaattcagccttggaacctcactaagtttttaagtgatagtacttctgcccatctcattccctctgacatgggacaagactatccggaaatgagccttcccagcaatgtgggacaaacttacatccaaaacgttgatcatcagtattttaagaagagaaagatttttattaaaaggaggaaatgagaaagaaaaattgctcagagcagtctgagatatgcgaactatgcaaaatttatcaggcccagagggacatgagcatgggacttcagtcacatcactgcacccattcccaggggcaattctttaaaagcattttgttcctgacagctgcctcacccactatcttcatgttcctggaatgtgtgatacaaagaacaatgtatagccaaccaatagctcgttattgtaacatgaatgcttgataaacaacttaggaactgcctcttcctttttcctttaaaaacccatttgtaactgctgctaataggagcatctactcagggcaacttgaatctatgctcctgggttgcagtcctcaaacttgagccaaacggactctctacatatatatagatatagatatagatatagatatagatatagatatagatatagatatagatatatagatatagatatagatatatgtttttttaaagaactctttcactgaaacatgaaagtagtcttcagtgaccaccacccatacgcaagccctttacacatacacagatacacagatatatgtattcataagtatagcagaaggtcacaaacaacacaaaaaaaatgcttttgaggagctaactggagaaatgtattgcaatgtagttgagaattacatgactgtaaaatcacaccaagaaacaagaaggatatttaaatacatctccaagtcaacacatctcggtggaagtctacacttcagttcaaaacttcatttacaaccaaggaaaggcatctaatatttaacatacctactgacacatgtagagaataatacttgtttttccctcttgctgttttcctcagtttggctcagtacctaggcacaagcattccagggcccagggccaaaagcctctaaagcacagcttggtggccctctcctaagatcaaccaccacaatggggagaagccagggtaggacagaatcctcactccttcatccactctcacacatctacatcattttagtttatctgagaaaactgcagagtaatgtaaaaattacattgccactgcaacatgattgcctctgaaaggcaaggcaacgcaactcttctatttatcctgctaaattaaaacagtgtagctgaggatcatagtgctgggcctctcctaatcccaaccccaggttgcaattagttcaatctgtttctgcagctttatgaaaagtgtgctgaggtttaatctgaaaacaaaaggaattctataattgcagctcctttctagaagacatatcccagagctctttgacgacaattgtcaggatgcttttggggccttttccatttggaagcccattatttggggaagtttttggggggggggcggggttgggggaaaaaggtattgaagtagggaagggaaagaagaatacgagtttgcactttcagttcagtagctaaatagcaatttcaacaataaagggtctcaccgtgtcacccaagctgaagtgcagtggcacaatcacagttcactgcagccttaactttccctggctcagctgaacctcccatgtcagcctcccaagtagctgggacatagacgcatgctaccatacccagctaatttttgtatcttttgtagagatgggtttcatcatgttgcccaggctggtctcaaactcctgggctcaagcaatggaaccgcctcaacttcccaaagtgctgagataataggtatgagtcaccgcaccaggtctatttggtaacatttgtatgttaatgtctcacagtgttccatcaaaagatatgaagtaagaattctttccaattcaatagatgcaaaagaccccaattaatggataaaaaaggtccataatagtcctacttgtggaagtaagtcctaggacacttccatgtcaaatgcccagagtagcatcatcacacagaatgctgtttgaccagttgactgcaggtctcaaagactggacagcttattccaaaactagacctttgctgatatctgttgtggatgtataagtaaatgagcaagaaaaatttaaaacctgaattttgcaattggaaaacctgtaaaggtttataggcatgtagaaatggttttacacaagagttacacactgattccatatacaattatcgactacctcatcgtgtgtgaaacacctcaaggtattaatactaaacaatttaagtgatcaggttgtaaaagctaaggtcttccattaacaaaatttttaaaaggtgactcaagagactaagttctcatcaatattgtgttattatagactcaaaacagtgttacaagatgcaaaattttatcttgagatgcaaacatcatgtggcttggggtacttattctgtgaaactaaggcttctttttaagtactaagcatacggcaccatctcttaagtctaggaagattgattcctcaaagtattatagcatctccatgatgtcccaaatatagtgaaaatggaaatgcatacaaaatgaaaggagacttgaaaaattagaaatttttctacaaagcattattcaatcatatgtaaggggatatattttagggtacactatacatagaaatctgtgatttccatataatacaataaaaatgattctatttccttgctgttttcaatttacttccctacctacattcttcagcttgattttcacaataatcccatgcaatgcacaagggagttgatgttgtcccattttcacacattagaaattgaggtttagggacagttacgcaaggcctcagcaaataataacagccaggaatccaggccttctctcaatcagcacttcccaccatgaattcagaataaaaaccaacccccacatttcatgaagttgactgtgggtcctgcaaatgtcatagcaaaatagcagaggagtaataggtagcttttgttagcaacacaaaccgtgtagcctctggttagaagagtgggcaaagaatcataaaggtttcttcagtcacataatgtgaacatccatggaatttctgagcacctgcaaggaaattccaaaacggagcgaaagggaaaaagtgttccgtagagttcctaataaaacttaaagagctccgctaactcttcaactgcaatcagttaacccaagtgaagtcatgtatactgcgcccagagccccctaaaagaagcaacacattgatgcaccttcttaagaccaacaactttcgcgtttgacatttttctcctctaaaaacccgtactctcctggggcagggggtcgagtatttctaaggatgaccgttttgaacagcctgctttcacaggcatccataattcaagtgagagtgaaccatcctgccctggcaaggtacctggcaggggcggctgtgtagggcacttgcaaaggctgcggaggagagcgcgcgggcgaagaagcactcccggaccatgcctctctccggtgcccggtgctgactgcgctgagagcgcaggagctcggcgccgccctccccgtactcccagccctcccgggcgccggggcctggccgcggacctaccagcgagagtactttataggtgttggggtccttggcagtgcgggcgcgcgccgccttctccagcggctcctcccccacgtccataggggccagcaaggacgcggccgcctgcgggtccccgggcgcctcggcagcgtggctgcggccccgatcgcggccgttccccgccgggccctcccggggagcgcgcccgccctcgccgccgcggctcccgccccccgcgcagccgtcgcgctccatcgtggccccggccgctccggcccsgctgcccggccgcgcctttaataggccccgcgccgcccgccccgccccgcccctccccgccgcgcccgcccctcgcggtcagatccttggctccccgccctacacccggctctcgcagtcagggcaaagcgactcaacgccccggattatttggcttcctgtctgatttcgggcactctgtgtgtcggttattttgggtcccttacgtgggcgtgtcttaaacttccccccaagccgtcccctccccgcgccccggccaccctcccgacacttgcaggaatcgccctgcgtggcctcgcggcgcgggctgggctggaattgcagcgtgtggtctgcagagggcatgagatcatggggccccaaaatagagcggggaggaggagaaggatgcagccgccgatgccggtccggcttctcaaaggcgggagagagtggagtcttggggtcgacctgtgagtttctggatggaaatgcaaatgaaccatggaggaaggcgactttctgtttctccccctctgcgccccgtcccccactacctacggtactctgagagagaaatcgtccacttaaaatacgtgggttcacatgtactgaacacacgtaagggatatttcgattcccacggttttatgtggtttctggagtcttctcgctattgtttgtatgtatatttgcttatttttctagactttctgtattgaaggtttcaggagttggcgttgccctctcctgaggttgacactgatacctagctatatcaaaagtgttaatgcaatctgaaatactttgataagccttatttttcaactaggacgctaacagtgagctgattcttggtgggttttgttttacctttgattctggaacttgtacattttctggctcatcacttagcaaaatcaccagtgtgtagtgaagtgagacagagggaaaccagtgacttcgaactactttgcaatacccaggactgacttcaggtaccaaggaaaacaattaattttcaatacattttgaatacatgaatatatacaagtgtttacaaatgagaatgaatgtttaacaaatataaaatgcatgttatccctttaaaatagtcaacttgggatgctcttcatttatactgactcatccatccacccatccatttattcatcaagtaatgaatccttcaactcaatcttttggcctccaactatgcataccatataaaaaatgaattaaaatgtatctttccttaagtgtggtggaagcgggggtgggggggtaggaccaactcgtaaacaaaataattaaaacctaagtcatatatgcagaatagagtcacacataggatattgatacaggagatagaaattatttaggcagatagtatgagcaaaagagccctcggcagaacttaccttctaacaaaaagcagcccaagaaatcacttcctttctaacaaagagcaacctggaagattgggctgcaaacataggtaaggaaactggaagcttgcacgggagatgccggcagcggcacagacagaaggggctactggggccaggcatgtccaccatgggggttccacctcccctcttttttaccacatgcacagtaagaaggaaataagcaacacggagtagctacctgcctatatagtagaagattggggccggggctgccagacacttaagccctatgcagatgacacacctggtcctaaccgggttttcatgccatatgcacgaaaccgggttttccctccttatgtagatcagacaccgcctccccactagctcatctataaaaacccctgcatttcaccacgtattgcaacccattttttgggacccctctctgtagcagagctattctcctccttttgcctattaaaaattctgctccaaacctcaccctttgtgtgtgtccacatatttgatctttgtggccgtgagaccaagaacctcggatgtcaccatagacaacaaagctacttcaatattatgagagcttagtagaaaggacagttgacatctggaagaagtaaaagccttccctcaaagcattattgaacttttttaaaaagttacctttgagtcagctcacaaaccacccaagagaaacaggttttcactgtttcataatcacacatatttttctgccccaaacttggctccaaattttcctttgactctttccaaaaatcagattcaaggacaaagatttgctccactgagactggtcaaatgagtgtcaaaacctctaaaagcaactcaacagagacattatccaaagtgcctttaaacctgacaaaacaaatggaagaagtgtattgtctgcatctcaaggcaacgaaccactttaaagacttaacatttggaaaacacagtgtgcagtctccagggtcacaaacatcttaaggcctagggaaagcatttttctgtggcattaatttatttttaagattttgtatgacatcctggtttttctttcttttttttgaaagcacaatatgccatgaaccatatttgactgaggcagccctatacacactgcaaaaggcaaaccatgtgccatgttaaaggttgcagcatctattcaacaggattgtgtgcccagtgtgggcagatggtcagatttttcaagagaagcaggaaatttaaatgtttgtgtgaattctccggttgcaaaatgttgtctacaaaattcagagaaacagtttcttcaaacaaacaaaatgtagcacgtttaaaagccaaacaaaatgtagcacatctgcaggacagacctggcacacacgtcaccaggatgtggcctctgcctaatgctcatgcctcatctgtgccaggtgggacttaatatgggtaattataaaaacccaattggaagtctaaaatcggaagaataaaaatgagccaaggccgggcacggtggctcacgcctgtaatctcagcattttgggaggctgacgcgggtggttcacttgaggtcaggtgtctgagaccaacctggccaacatgatgaaaaccagtctccactaaaaatacaaaaattagcagggcatggtggcacatgcctgtagtcccagctactctggaggctgaggcaggagaattgcttgaacctgggaggcggaggttgcagtgagccaagatcatgccactgcactccagcatgggcaacagagaaagactctgtctcaaaaaaaaaaaaaaaaaaatgagtcagatatgccattttcaggtttagctatagacattgcaaagcctatagtgaaatattgcctcagtcttctttattctaaatgatctgagggacagcttcaccatcacattccaaagtacaataaggtcatgagatataaaaccacaacacaatttttgggttaatgcaaaggtgaacaatgaatgtttcatccttaatcctaaatcactctgttttagtgattgcatactctaatctggaatagcagtaaagatgataatttaagattttgtgtaagttttctattaagttttattgtaacataaatatttagacatttctgtcttggtgcttgaagctttggttgtagataaggccaaaacaccaaacaaaaacaatttatcaatgtttaattattactttgaaatattactttgaaacaacttttcttagtgattaaaaaatgaaatatgctgtagggtaattattttagcagctgtttcagagcttttccagctttcttctaattcgccagtaaaacaagaaagacatctagccaaatctaaacagaaaaaaaacccacaagcctctttaatctttgtgaggcctagggaaaacatttttctgtggcattaatttatttttaagaatgtgtatgacatcctgatttttctttctttttttgaaagcacaaaaatatgtcccctggagcaagaagcttggataactatgtgaccttgaacagattaccagaagcctctgagccttagtttccttatttgtaaaatgctctttcagataatatctctaaatgccaacaaaatgtttgacatttcaactttacacaaacatttaaatctatcatttgcatttgtaaatcaaccactcactacccctaagggagagaataaaaagatttaattttctcctatattatgcatggtttatatataatctctgggaaggtttgagacctgttattgggcctgcatctacaaagagggtaaggaaaggattcttgctgctctgggatgaaggagagatgcctacagggatcagttaggtaacaaaacgaatagagagaattcagaagtgtaagatccaaaggagagtaatagaacctgggaaaatggaaaacgcatgtaccatccaaagagagtgtggggttctaattagggaaaaggagtcaggatggcgggaccgagggaaagcaaaaatataaagcagataagctgtaagtctgccttgctttgtggtccagaacatgtagccctcttgcacaaataactcacaatcttcctgcactcagctatcatcagaccctcgggtgattaaaaaaaaatgcaagctaattcactgcaacctcggtgttatcagtactgcacaaagccctcttcagcacacagcacaagcaccattctagaacatccccagcaagccttcgtctccttgcagtcagctcctctcttgctggcctgcccattgttcccttgcaacacattttcatacgtgctctaataaatatgactttctttacctacaagtatcttcataaattctttttacccccacaccactggccccagattgtcgctgattacctgctacaggaagttggtttctagtccttcactttttgttaaccacggtatctgccactccttcattatctcttacacttctatttcaaacaaaatgtagggttgccaggtaacctgaattttaagtttgattaaagtacaatttacctattatcatatctacccattatatgcatacagttcagtgatttttaataatttatacagttgtgcaactattaatatgatccagttttggaacaatttcatcacttcaaaaagtttgtttctgcacatgtataatcaaaaactcccattccagtcccaaccaaagacttctctgctttctgtctgtagctttgccttttctagaaaattcatttaaatggtattatactaagttgtcttttgtgtctgtcttctttcacttagcataatgttttgaagttcatccatgctgatgcaaatatcagtagtccctttttatacatagtagtaatttattgtatggatatatcatattttatcttttcaccagttgctggacattcgtattatttccagcttgagctattataaataatgcttctatgaacattcatgtacatgtctttgtgtgaatctgcattttcatttcccttgggtagataactgggagtttcattgttaagtcatatgcaaagcgtatatttaaatttttgagaaacagagaaactgtttcccaatgtggctgtaccattgtacattcctgccagcaacatgtaaggagtccatatgcccctcctacacttactattcacagtatatcagtgggtaaggagtccacatactttgcaatacttcctattctcagtcttttataatagccatttgaataggtgtttggtggtacctcaaagtggcttttatttgcatttccctaatgacgaattatgttgaacaccttttcatgtgcttatctgtcatctatatgtcttctttgatgaaatgcctactcaaatctcttgcccatttttatcagatttgtttctcatctgattattgagttataaacttttttatatattttggacacaagtcttttatcatatttatgatttgcaaatattttatccaatttctttttcttaatgttgtcttttaaaaaacaagtttttaaaattatttttataaaatccaatttatcaatattttctcctatggaacctgattttggtatcatatataggaaatctctgactcacccaaagccacagaagtttctcctatgttttcttctaaagtgttgtaattttagcccttatatttgggtctaggaccattctgagttaatttttgtgtaatgtgtgagataagggtctaaatt

SEQ ID NO: 97299 - DNA, 15089 bp, Homo sapiens
attaagtttgatatcctaaggatgtcacttcatttccttatcttagttaatgccaataaaattgctggcatatgacaactataggttttatttatttatttatttatttttgagactgagtctcgctctgtcgcccaggctggagtgaagtggcgtgatcttggctcactgcaacctctgcctcctgggttcaagcgattctcctgcctcagcctcccgagtagctgggactacaggcatgtgccaccacatccagctaatatttttgtgtttttagtggagagagggttttgccatgttggccaggctagtctggaactcctaacctcaagtgttccacccatctcagcctcccaaagtgctgggattacaggtgtgagccaccatgcccagcccgaacaataggttttaaaaagtgtttttattctcagctgggaatgatggctcacacctgtaatcccagcactttaggaatccaaggtgggtggatcacttgagcctaggagctggagaccagcctggacagcatagcaagactccatctcctcttttgtttttgagacagagtttcactcttgttgcccaggctggagtgcaatggcacgatctcggctcactgcaacctccgcctcctgggttcagaaagcaattctcctgcttcagcctcccgagtagctgggactacacgcatgtgccaccacgccaagctaattctgtatttttagtacagacggagttgctccatgttggtcaggctggtctggaactcctgacctcaggtgatctgcccccctcagcttcccaaagtgctgggattacaggcatgagccaccacacccggcctctatttttttaattataaataaataaatgtttttattcttactgcatagatatttggtttcccaatattaatggaattatttagtaggaggtaattaagttttaaattctgtgtggaaagctagaatgttcattaatgaaagaaagaaaaaggttttttgactaagttttttggtaaattttctaatgctcgtactatggttatttttctattttcagaaaaatctagttttttaaaatatttccatctcctaatccagctcaatttaaaaactatagtaaatattgcaaaatttcattcagaagcaaaatattaaaatattgtttgaaaactctcttttctatttatttccaagtaaaaactttggaaatttgctctctacctcctcatgttcatgtctaatcattaatttagctttggaagttacatatggaacaatgatagctggcacttggaaaatgagttgattctatctgtcataagttagctcaacttccaagtcccatatgaaatattttggaacaaattctccattatcttccccatgtctaattaacacagttgaaatcaaggctggggttctctaccacagctgggtaatgacacaggtgggagatgaataagacttctctcctgatgccagatcagttgccaagtctgtcttcctgtgcggtatctccattctacacataagcagatcgccaagcatttaaagcacttgctcacatgggctggcagcctgggttacccagaatgcgcttatgggtaacagcaggttgcagccagtggggctgggtatatacttgattcttgtttaccgagaaaacactgggtggggctggacctggcaagcccatctacaggtcccccaacaataagcactagcaccaactctgagggagagtccagtgggcagccaccaagtgtccagcggcgtgcctcggcgtggaagttggccccaaattctctgcataagggtgccagaggaagcctaatctcttactccaggagagtggctgctccaaatgcctggagatctgcctggttgtggagtggagagggtctccttacaccaatatccctgcacaggaaggatggggtggctcaggctactgctccaggtgagcagatgctccaaatacctggaaatctgtggagcagagagggtcccactacaccgcaatctctgcaccagaagaacggagcagctcagattgctgattcacgctgatgggcactctgaatccctggatgtctgcctgggcatgaagtggagatggtccccttgcacaaggatctctgcacaggaaggaaggggcaacccaggctgccagcccatgtgagcaagtgctttaaatgcttggcgatctgcttatgtgtagaatggagaaggccctgctacaccacagtctcaaggaagtaggctgggtcacccaaaaataacacacacagaccagttctagttcatcaagctggcgctggctaaaagtctcattgtccaggagaaaccacagccatagcagctctcctcttgcccaaggcctgtgactggggaaaacacaattccagtgcctactgttgagatgttttccacagttctagctgtggaggaccctaccctgatccagagcaggtgctccaatctctatcaataatgtttgatatgagttggcccatactcaactgaaaataagaaaaatttttatgtgcaaggatagtctctgaggttgagcatttttgttcagtgatgaggcatttgaattaccaacatgcttaatgctatggaaatctatggaacccatttctttaagaaatggattcatatcttaataaagaacaacttttttattgtttaattgccgaaacaagatgtcaacctattaccctaagtaaccagttcaatcatagccattcacatcatctagtaccaagtgatatttttcacggaaatgaacatgtggaggaaaagtccttgactggaaaaaaaattgatacatataatcattacagagctgtatatttatataagactaactgtgagatgaatggagaaagctctgagattcactgttgagtagcttataatttccaagtcctctgctagacatgaaaactatttagtgtagaacaaaaatatgatgctgtatctcacaactcctatataaatgtttccattcctactttatttctgctttcattttcacggtgcatctacagtctctcttccagcctcccatttgtattttacaacatgcataattacagatttattctttaattatttcattttcatatgatttttatatctcttgaaagatttctttgaaacttctgtcttttttattttccagagaagcagagtatttttaggcaataatattttaccttatgatggctttcaactattaaaagaaaaaaggaaagtagtaaaataaataaatgcagagagtcaccaacttacaatgatttcacttaagattttcaactgtacaatggtgggaaagtgatattcattcagtagaaaccatatttcaagtactcatgctaccatgatgtttttccttttcagtacagtattcaataaattacatgaaatattcaacagcttactataatataggctttgtgtaagatgattttgcccaactgtaggctaatgttagtgttctaagcatggttcaggtgggctaggctaagctatgatgtttggtaggttaggtttattaaacatatcttcaagccaggtatagtggtgtgtgcctatagtcagtcccagctcttcaggaagctgaggcaggaggattgtttgagctcaaagactttgagaatatagtgtactatgactacacctgagaatagccactgcactccagcctgggcaacaggacaatagtctatatttttttaaaaaaagcatcatcaacttataatattaccaacttatgatgggtttattggaacataatcctatcataagttgaagtgtatctttatatagtagaatatagtaacatactacagacttattttctcaaagcataaaaataaaccacactaatgatcatccatgggagagggacacctagacaatgtcctgcaaaacgagaaatactggtaagacatactttacattccagactgagtctctttcaccatgaaataaaatcattaagaaatttttagtaatattttaattattatattttaattaaaaatttaggtatagaaagaaggttgtatagctttacattaaaaataaattagtatgtgacttggctacttgacaccaaatagcttgtgtcagattcaccctcccaccataaaaaactatacaatctggccaaaatatagaaaaaattcttggcaggtgtattagtctgttctcatgctgctaataaagacatacccaagactgggtaatttataaaagaaagaggtttagtgaactcacagttccacatggctggggagaactcacaatcatgatagaaggcaaaggaaaagcaaaggcacatcttacatggcagacaagagagagggcatgtgcaggggagctcccctttgtaaaaccatcagatctcatgagacttattcactatcacaacaacagcatgggaaagacccacccccatgattcaattacctctcaccagctgctgagcatggttcaggtgggctggctacatgtgggaattatgcaagctacaattcaagatgggatctgcgtaaggacacagccaaaccatatcagcaggcattgaagaacattgttgtagcaagtcaggtatgagatctttaaggaaggtgaggcacatgaggttagtaccacatttgccaggattttccagaaaggcatcttcctgaccttggtacaggaaaatgggacccaaccaggggttagtggtcttgggaaccaaaagaagcaatgaatagagttcaaagctgctaaattggttaggaattgggggtcaatgtaccatatgggagagagaaagaacctagaaatgggtgtatacatgccattttggtccttctgtgactccttagctatgtgacagttggctaagaagaggggagaccttggagaaagaaactgctgggatacagaaagcagaagagatcatcagggactgaaaacttcctggaaagctactggagttcagatccagccaaatggggaaatgttggcaaacaactgagaaactcagttgggactctaaaaattctcttaggagaggtgcagtatcccaggagtgaggcatatgttctaagaggaaaataaaatataattaccataacacagcttaaaactaggtcttgagagcagcaagatgatctgcaagtaattacaaattctgcccagaaaaaaaattcaaaattcttgagtagttctatatcatattatccataaattcagcatactttaaaaaaaataccaaatatacaaaaaagcaagtaaaacagactgataagaaataaatcagttattaaaaacaaactcatagataatccagatattggagttaacagatagggcatcataacatctatgatgaatataaaggaaagaaagaaaaaatgaaagacaaaacaggttgtgtcagatttctttctggaagctttaaaatgctcactttattttcatagattctaatttcctaaattatgtttgatgtttcaagcaaaaatcatagcattgtctagtgttattctaaatggatgtaagacaattatactacaaatttgatagagtaaagagacataatatgacagaaggttgctatacttcactcagactggaataaagatgataccaattgactgtgataatgtttatataaatgaatatacactaagctgtaaaatgcaaccactaagctataaaatgcaaccaaaaaaactataaaaaagaagatacactataaacactataaataacaaaatggaattctaaaacaaatgttcaagtaacccacatgaagtcatgaaaaataagcagagaaacaagaattgatagagaaaacaaaaaatgtcaggcttacgcattaaagtatcaataattcatttaattatgaatggtctaccaagagatagataatagaagagtgtatttaaaagtatgaccctttcttatatgtttcttgtatgctgtgtacaagaaactcacttgaattttaccartacagggcagrccaaattaacaggatgaaaaaagatatattacacaaacattaatgaaaggaaagcaagagtgtctgtrtgcatatcagataaagcaaagaaaactaccaaaaccagagattatrtaatgatcaaaggtttaatccatgaagaagacagcaattttaaaagtgtattcaccaaaaaataaagcttcaaaataygtgatgtgaaaactgccagaactaaggcgggccgggctcagaccagcgctgcctcaggatgtraagtgtaacaagagggccaggggaggtggtgggggacaacatgggcctgtgaggcctgtgggtgcccgcgttccccagctccccccgcagcccgctccacagtggtccgctccggttggttgtcacgtgcgcattcgggttccagacccaaggctgcgtgttctccaccgcttgttgtggccagtgttactgcggtgaccgccagagcagcctcgacgctatggaggagccyggtgctacccctcagccctacctggggctggtcctggaggagctacgcagagttgtggcagcactacctgagagtatgagaccagatgagaatccttatggttttccatcggaactggtggtatgtgcagctgttattggattttttgttgttctcctttttttgtggagaagttttagatcggttaggagtcggctttacgtgggaagagagcaaaaacttggtgcaacgctttctggactaattgaagaaaaatgtaaactacttgaaaagtttagccttattcaaaaagagtatgaaggctatgaagtagagtcatctttagaggatgccagctttgagaaggcggcagcagaagaagcacgaagtttggaggcaacctgtgaaaagctgarcaggtccaattctgaacttgaggatgaaatcctctgtctagaaaaagacttaaaagaagagaaatctaaacattctcaacaagatgaattgatggcggatatttcaaaaagtatacagtctctagaagatgagtcaaaatccctcaaatcacaaatagctgaagccaaaatcatctgcaagacatttaaaatgagtgaagaaygacgggctatagcaataaaagatgctttgaatgaaaattctcaacttcagacaagccataaacagctttttcagcaagaagctgaagtatggaaaggasaagtgagtgaacttaataaacagaaaataacatttgaagactccaaagtacacgcagaacaagttctgaatgataaagaaaatcacatcaagaccctgactggacacttgccaatgatgaaagatcaggctgctgtgcttgaagaagacacaacggatgatgataacctggaattaraagtgaacagtcaatgggaaaatggtgctaacttagatgatcctcygaaagkagctttgaagaaactgattcatgctgctaagttaaatgtttctttaaaaagcttagaaggagaaagaaaccacattattattcagttatctgaagtggacaaawcaaaggaagagcttacagagcatattaaaaatcttcagactcaacaagcatctttgcaatcagaaaacatatattttgaaagtgagaatcagaagcttcaayagaaacttaaaataatgactgaattctatcaagaaratgaaatgaaactctayaggaaattaacagtggaggaaaattaccgaatagaggaagaagagaagctttctaragtggaagraaagmtcagccrtgccactgaagrgctggagacctatagaaagctagccaaagatcttgaagaagaattggagagaactgttcatttttatcaaaagcaggttatttcctacgagaaaagaggacatgataattggttggcagctcggactgctgaaagaaacctcagtgatttaaggaaagaaaatgctcacaacaaacaaaaattaactgaaacagagttgaaatttgaacttttagaaaaagatcctaatgcactcgatgtttcaaatacagcatttggcagagagcattccccatgtagtccctcaccattgggtcggccttcatctgaaacgagagcttttccctctcctcaaactttgttggaggatccactcagactctcacctgtgcttccagggggaggaggaagaggcccaagcagcccagggaatcccctggaccatcagattaccaatgaaagaggagaaccaagctrtgacaggttaatcgatcctcacagggctccttctgacactgggtccctgtcatctccggtggaacaggaccgtaggatgatgtttcctccaccagggcaatcatatcctgattcaactcttcctccacaaagggaagacagattttattctaattctgaaagactgtctggaccagcagaacccagaagttttaaaatgacttctttggataaaatggataggtcaatgccttcagaaatggaatccagtagaaatgatgccaaagatgatcttggtaatttaaatgtgcctgattcatctctccctgctgaaaatgaagcaactggccctggccttattcctcyacctcttgctccagtcagcggtccattgtttccagtggatacaaggggcccrttcatgagaagaggacctcctttccccccacctcctccaggaaccatgtttggagcttctcgaggttattttccaccaagggatttcccaggtccaccacatgctccatttgcaatgagaaacatctatccaccgaggggtttacctccttaccttcayccgagacctggattttaccccaaycccacattctgaaggtagaagcsagttcccttcaggattgattccgccttcaaaggagcctgctactggacatccagaaccacagcaagamacctgacaatattgttgctttcttcaaaagtaattttgactgatctcattttcagtttaagtaactgctgttacttaagtgattgcacttttctcaaattgaagtttaatggaataatagttctcaggatagtattttgtaaataaagatggtttgaatatgaatcttatgagtaaatcatttccattttattatattctagatcatataacttttaacttggtgaactaatccactcttagagaaacaatagtgggagttttatatatgtaatcttgcaggtgaggaggctttaaattctaaaggttgtggtgtcttcatgccaagaactgtattcactgtggttgtagataaatgtgaaagtaactttatgcttaatttaataaattttcattgatttttttaaaaaaagaaaactgaaaggagatatagatgaatccacaattatagttagaaatttcctcatgcctttttcaataattgatagaactagacagaaaatcagcaaggagtgttggctttggcagcactttctaaaatcagaatgatgccaacaagattaaaacggttcttgaatatagattacacaaaattttgtgaagcatttcatgtttttaaaaagaggaaaaaaaagaaaatcaacaagaatataaaacaactcaaaatgccattaaccaaaagaatctatttggcatttacagaatattccacacagtaacagcagaatacacatattttttttgagtgctgacgaaacacatggcaagatagagctgtcctaggccctaaaactcgccacaacaaatttaaaagagatagtaatcatccagagcagatgaaaaccagaaatcattgtagggaatccaattggaaatcagcataagaaagatatgaaaatccctaaacatttggaaatttaaaaacacacttcacaataatctatcagtcaaagaagtctcaaggaaaaatttaaaaatacattgaactggataaacatgaaactgtgacatatcaaagtactgagaaggaaacttagagcaataaatgcacgcattagtaaagaggaaaagtctctagtgagcaatagatttccacctcaggaacctagaaaaagaagagcagaataaactcaaagcaagtagagggtggggattaatgaagataagaacagaaaacacttacatttacaagagaaaaacaatggttaaatcaatgaaacaaagagatagctatgttaaaagattaataaaatttagcaaactcaagcataaattaaaaggaaaaaacaaattttaaatatcataatgaaacaggcgatatcactacagacataaacacacataacaaaggactatcaaggaatattacaaacaactccacacacataaattagacaatagacaaaatggacaaaatgcagtgttcctcctgcaacacaaactaactcaactcaccaggcatgaatagatcatttgaataactctataaccattaagaaaatagaattcataattttaaaactaccaataaataaatatttatgcttagatggtttaactggagaattctaacatgtttttaaaaagttaacaccaattctacacaatcttttccagaaaacagtaaaagagagagcatttcccaatttattttttgaagctattattacagtgataccaaaaccaggagagagagagagagtgtgtgtgtgtcacacacacacacatatatacatatatatatataaagatatgtataacttacttgataaatagagttctatagtatatttttcaaaatttacccatgtccagcgggggattgtttccagaaaaacaaacctgattaaatctcaaaaagtcaatcaaaataatccaccatgttaacaaacaaaagaaggaaagttacattatatcagttgatgcataataaacatttaacacatttcgatatccattcatgataaaagctctctataaagcaggaatagaggaaacttcatccacttgataaaaagcatctacaaaaagctaacactatacaatcacgtgttgtttaatgatgcggatacgttctgagaaatgtgcggtcaagtgattctgacattgtgtgaacatccagaaaggacttcacgggtaagagcatgcatgaggctgtcgtctcctatgatagcaatgccttcttctggaatacctcttgatggacttgcctgagactgtttagcagttaactttttttaataagtaaaaggagtgcactctaaaataatgacaaaggccaggcacagtggctcacacctgtaatctcagtactttgggaggctgaggtaggcagatcatctgcagtcaggagttcaagaaaacgctgaccaacatggtgaaaccccatctctaccaagaatataaaaaattagccaagcatgatgttgcacacctataatctcagctacttgggatgctgagacacaagaatcacttcaacccaggaggcagaggtttcagtgaactgagattgcaccactgcactccagcctgggcaacagaacaagactccacctccaaaataaaataaaataaaataatgacaaaaagtttagtagagtgtagtaaatgcatagtaaaatacatagttgtttgcttttaaccacgctgggagtgcagtaggattgtttacagcagcaatcccacaaacatgtaagtaatgcattgtgctacaatattattacggctatgacatcagttggcaatatgattttttcacccccattataatcttgtgggaccactctcatatatgcagtccatcaccgaccaaagtgttatgtaggacatagctatactaacatcatatttagtggtgaaaaactgaatggttcctctctaaaatcaagaataaaggaactatgtctgcttttatcacccttatgcaaaacagtgctagaagttatacactgcaataagacaagaaaataattaaaggacatacagatcagaatggaaaaaatagaacagtccctacttacaacagacatgactttctacatagaaatccaaataaatctattttacaaacctccttaaattaagaagtgagtccattaaggtcacagaatttaagataaacacaatcaaattaattctatttctatatacagacataactcattttatcgttctgcaatttattgtgcttcatagatattgcatttccattgtgttaaaattttgtggctaacctgcctcaagcaagtctatctgcaccatttttccaacagcatgatctcattttgtgtcctaggtcaaattttaataatctgtacagtattttaaatgggtttattattattgtctgctatgatgatctgtgataggtgatctttgatgttactattgtaattattttagggcagcataagcacgtccacataagacagcaaacttaattgataaatgttgtgtgtgttctgactgctccaccgacaggccatttccctctctctcttcctcttctggcctccctagtccctgagacacaacaatgttgaagctaagccaattaaccaccctataatgtcctctaaatgttcaagtgaacgtcattaaattaaaagctagaaattattaagctaagtgagaaaggcatgccaagtaagtataaatccggagttgtccaacttgagctgaagtgctattagatctaccaagtcataagactgaatggtcactgcaaccatctatcctataatggatgcaatatgttttagggcaagagaaaatgcaaaagacaaaagtaggctgaatgaacagttggcccagatccctatatcactgatgcctctctctcagcttatacatacagtctcctaggtccttccaaccagctgataccttagtaaacaagccaggcctaatgcaagggcactttggctaggtatattggcacaatatgtcaaccactcagatgtgggacctcaaatataatccatgagggtaaacctactctgataagtagaatacatagattcatcgccatccatagaaagggttcagaaaacaggagctggccctgtgcttttacagagctttatccttcccataagggcaggaccagatattatcaaaaaaaaaaaagaaaattttcaaaagtaaattttgctcaatccttatgccttatccattcttcttctagacaggtcaatgagccccacagattatttaaaatgaatctccaacatctacagattggtgcttaaaaataaagtgtctgagtttctatgtaaaatgacctaatgattaagaccttggaattcaagtttattctcccaacagcttttgggtatttgggaaagcagactacactaaaagaaatgactgcaggaattaatgtcaaggttttattttaaccgccaaacaaacctagacatggatctttgcatctcccaagtgttttctgaatgtttggggaaggaatagcataaatattcatgaaactctaacaaattcacatattttggtagctgtgatagccacgtggtcccaggatattactttagataatatatgtatcctttcagttacaaaggcattttctgttcttgccttagtctcattctctttatcactgtggcttcctcagagacagaatgagacagaagctcaattctctgcccctagaagaataacagtggttgggttcttcatgtctctatggaaatcatgctggtgcaagtgaagcctattttctcatgcgtcacacaaagctctcatgataattggaaggtactctgtggaggtgatgacttaataacaccttcccttctcaaaagcacttgaagaagcaagatccttccttggcatttctcagatgggcagcagagttcccagcaccatcagtaaactcagccacactgtagaaatgtttgccttttctatatgaagattatctaggttcttacacagcagtcatctctagacacctggatttcctaactgcctttgtgagttctggtcaaatataatttaaggtcattttcattgcttgtttgcttttaccgtcacactttaatatcatgcaaaagtacatttctactctcttaatgctcaaattttgctcaccaatagttttagataataggataatatgactaaaatatattaatagatatcagcatattatctatcagtatattaatatattaaagcaatcaatatgttaatggttattttggctggtagctttttttaagttcaagaaatatctgtgtgcaactgactctggtaaatgttcaacgttaacaaaaaagaccagcactttttttctttaaaatttttttttcatataattactattttaaaaattttttaaaagagatgaggtctctatgctgcccaggctggtttcaaatgcctgggttccagcgaacctccttcctcagcctcccaaagtgcttagattacaggcatgagacaccaagcatagcccagcacttaatttttaaaaaggcttaaagtgtcacatacagaagctcattaagttaacaagtgtacagatgcttgtttacttattacgcacaatcttacgaggccacacaatctgagcgatgattaggagctcaaagtttagatccaatctcaggacaacatgaaataaatgacaagaaatcaataaataactaaattattttattttttcaacatgagcataatacttatccttggaatggtggtaggaaaaatccaatgcaaatgaaatactttttagtcggttttgcaggattaaatttataattttatggacatttaaatggaggattattgctcatccttcctatctccaagacaatataattttacataaaaaatgagaataaaatttaagcaaaaatgacaatatcatgcttatgctaacattttaattgtgggatcaaggaggcctgagttcaatcagagaattcagagactctttctgcagcattcctcataaattcatcgaactattgccaatcacctgcatagacaatgcttaaaactgtgtattctagagtgtttatcaatagtaagcccaaatccaacaaaagttactgatcctgttttcgtgtttagataatgacacggtgcaaatctattcagtcattcacataaatgctcatctaaacattgtgggaaa
